United States Patent Application Publication US 2007/0161031 A1 - sequence listing, part 30

SEQ ID NO: 37926 - DNA, 2300 bp, Homo sapien
ctactttgtaggcagttggatggctctcaagtgaggctttttaggttcacagtattgcacttttgtttaagtttgtttgccagtacccagatgattctgatgtttcaaatcagttgcctcttgccctcgtttatgctaagtttaacttcagggaagcaaattttttaagtttcaaggcaagaattctttagttgatgcttaaaatctggttgcagttttaggatctctgctttctccccatggttgatcagtttcacagtattcgatgtagcctgtgtttggccattatagtttttttgtagtttcatttttaggggtgtctaatcttttggcttccttgggccacattttttatagtttcatttttaggggtgtctaatcttttggcttctgtgggccacacataaaatacactaacaatagctgatcagctaaaaaaaaaaactgcaaaaaatctcataatgttttaaggaagtttatgaatttgtgttgggccacattaggccatgcgttggacaaacttgttttaatcgaatcctccttcctgttttttttctttctctttttggtggttttcaagaagttgaagtaaacatacctttattcctttcttttaaaatgcatgtactacagtttgaaaaacattgtacaaaatcatatatttcatttaggaaattgaatacctggaggattagctgtgccaaaatctttttcccaatccttataaagttcggcatgaggtataattctagcctcactcatttggttgcagtgagtttcacatcacagtgaagggaggacagttcctgtgagaacacatgtgttggaactagagagctgccaaaacgtctctttcaccacccatcttattagttgtctctcacagtgcttctgttcctgtctacactctagcttcatgtggccttctttcttgtgcttgcctatagtttctgttctctcgtaagttcagcttacacctgagccgtcatggacaccactgtctctcttttacttacttttgacctttctgcttaagctctttactgctggccaatatagtctctcactgtttcttaatcatatttccaaaaaaaaaaaaaattgattggcctatgccatctttttgttccacttctgatttgtgcctagccaaactataagttggctatctgggttcaggtttccaaacagcttagtggtgtcaggggagggagcagtaggacagcaggggaacatggtatatctgaggactgtcttagcagcaagaaggcagggatgggacacttcaccttggtaagtgagggggcagaacagagctgaatacatcaaatagtccctattttattatgctagtttatttttaatggagtacttcaggcaaatacttagtagtgcagattgaataatgtaggaaactagctaatttttaagtgtcaaaaattgactgcaaaaacctgtaccccgatctgatgctagtttctgttttcattatgacttcagtgccatggtgtggcagaaagaccattaaagtagaagtcaggagtcttagattctagacctgtttttgctgttctgaaaggcttcacgttctgcatcagataaaattttaaggttattgaggtagaatagtgtctaaggtgctgtttagctataaaacttgtgactcacagtgtactataccaagttggtaaaggtaatttccacaagagtagtcagattacaaagcttgtaataacatgaaatcatgagtacaggttaatgtaaaaaattaaaaacgagaatacctggaccagtacatcagagagagatacaggagtttgtagtggactgcatccctctcattttaacttgttttgtttgatgaggagatcatcttcataaactgatacaaaagtcagatattataatcacaaaattttcctgacttgagttgcacataaacagtgtaatgcagtaagtgtaatattgaagtttcaaacgctttttgattttccatgctttttaaaagccatagctggatattcagaatagttaagtaacttgagtttcttttgttttttaggatttaagtgccctgtatgctcaaaatttgtatcctcagatgaaatggatttgcatcttgtaatgtgtttaacaaagccacgaataacctataatggtaagtccaatggtttaaaataatattttaagttagaattaacttacattttatgaatttcatgtttcaagtataatttaaaaggagggaaggacattgttttctctatttttactagtgcattaatgcagtggttctcaaa

SEQ ID NO: 37927 - DNA, 2300 bp, Homo sapien
tatttgtggtcttgattagttagaaaattgctgtacttattttggggtttttagttatttgggagaaatattttaaatctccgtgtgtgtgcattctttacttgcgtgtagtccttattgtgaaagggggatgactttgttatgtattttttgtgactaaactttaattgatccttctgtttcttaatctgttcttctccagatcactgattttatgagttttcagaatagtaagtaagggtatgaagacttacagtaactaaagcaatgttcatggggaaatctatttttacacaggttttcttgtcttgacaagatgcttgaaaaaccaagaggatatgaaaatctgtctctggagaaacaaagacgcaggcatactcagccagaaatctgagttttgtgagacttggtaatacagagatggacaatcgtactggggtaaaaaaaccctgctgaagagaggacagtgaccacagaactcagtgtaccaaacatgcatacaaaggacacacagggattttgaaaatgctgcacatcccttaatagtcatctacataggtaatactgataaacattttgtattcagacgccaaagttaactgatttaaaagttgatttactttttattaagttctccagagctgcacaactagttatgttttgatttgttttgttttttaatttggggtctctttgttttccccaacataatgttcataatgtttctgcattcatctgttcttaaattgaaaaacatataatttacttcttataaattgaagtcttaaatgtgaaaccaagaaatgtaatcaagcagtaaaaacatctgaatgtagaccatgatctcaagttcttccattttctcccccacgagtggaaaatagacttctacataggaaagctaaaatatgttaatatttttaaattaaaggtttaatatcagaatgcagtccaaagagcaaatcatattacataattacattttaattaaatatagaatattctactgaattgcaatttattaaatattcttatcctcttaaataaaactgctcaacagttaatcagcagtgaatcatcttgcagctatgcaatttaaaaaaaatacagattaccaatttcaagtgctgccagctaaaataactgttttaacgggtatcttttgtttgttcttttcacttaattattttattgtgctttgcatctccaggcagttctctcacatttgggtaaaatgtttagcaggctgtaaacttaagaaaagggtaaaataaaattttctggagaggaacttggaatttgagggagattttatatacctttaaaaactgtaatttaattgggatgccaggtttatagcaatttgcaactttaattttccagataatctggaggttagcatttgataaatgattttttaaagtagatatgaagattttgttaatttataatttattcatgtgttattactgtaattgaaaatgttatagacacttttaaattcagtttgtgtagaaagaaatgtgttaaacaaaattatgttaataaatattcccacataatacatctgaatggttaaaaatactggaagagttgtcagggctacaatagtgaatgtccttttttttaatatcaaaaatatcgataagtaggttttgtgttttcaacgtagggaaaatgttatcagtgaataggtggtgtactttacttggtataatttaaagttgcacagtaagtactgtttccttattttaatctttctttactcataatgtatttaagaatttgctgttttatttaacgctgctactcttaatcttctctaaatttttccccctactttcttgcttctgtttcacattttttaaaagggcaagtacaggagcaactgctgctacccagaaaaatgtgtgtattataaataattaaagagtttttaattgctttctgtatgattccagctcagataacattttccctgaagttatgctgtgaaatgccttttgttatgctgcaattgctaaaggaatccaaaacctccattgtgacagctgaaggcacagtttaataggtgcttttttactagttatgaaaaatattcgtcccttaaggaaacgattctttttctgtttttttctgttaccatgaagtcttaatttgatttcattttatttcacatttttgattttgtaagctttcataccctcctgctcaaccccctcaagtaaaacctcttagaatgtgaataattggttcattttctattgctggtatactcttgtgatgagaattattttgtt

SEQ ID NO: 37928 - DNA, 2300 bp, Homo sapien
gagttgaacaatgagaacacatggacacatggaggggaacaacacacaccagggcctgttgggggtggggggcaaggggagggcaagcattaggacaaatacctaatgcatgcagggcttaaaacctagatgacaggttgataggtgcagcaaatcaccatggcatgcatttgcctatgtaacaaacctgcacatcttctacatgtatcccagaacttaaagttaaaaaaagagaagaatgtgctttactagatggcctcttatgcatcaaagaaaggtttgacaagagtaaggaaaatcacacatgcaaattcctcttctattaggagcacgaatcacccttccccagcaaacctagagcagctgggagggaccaggttggcccctggagacagcagggccacagttacctcagggtggtcaagctggggtggttccgcagagcctctgcgaaggcttttgctccttcatccccaacttgattgccccacatcctgagggaggagacaagatagtgaatgttagctccccaagaaacagccatgctcacccctccttttttgccaatggccacagctcagttcctactcaacaggcagatgtttgtgcccagtccctggatctgtggcctggacactaattcctcacactggtctctgagtgggctgctctggatttcaaattcaaggggtgatgcaagatcgaagagcaggggaagccttgtgaacagaggccatcggcaagtggcacagttagagaccgagcctcaccacgagcttcggagagctgtcagcccaggagcctgagctcatgagagaaagcacctgcatgtctcctgtggagcacagaggtgcgcagagtcctggagggaaggccgtgtgcaggtgctgggttcccagcatccgttcaactctgggcagggtcagagacattcctgaagacacagtcttccaggagacaaagagcaggaagtaccttcagaaaccccatcagcaacgttcctgtcacataaagaggacgttacccaaccaagctctgtggctacggccatcttggtggacaggtgcggcgataaagctgtattctgtcccctacagcagatccggagagtctctggctaaaacagtctgcgtggtaagatggtggactcctgacccggctctgccatctgctacctgtgtgaacttcgggaaattatgtagtctcttggacctcagttgccccatctataaaatggggataattagagcattccgtcatggagttgtgaggattcactgagttaacagaagcaaagcacttagaaccgtgtgtggctcacacaaagcgttggctgttcctaataggatcagcacacactgtctacacacaacagaacaagttcgtgtggcccactcacaacacaatggcagctgcctcaacaacacgttcacaccaagcaaactacctgcttacaccattccaggtatggcttgctggaacccagaataagagttttcagtgttttgcttacatatatgtatttactatacaattgaatggcatcacatttttaataaagtggaaagctactcaaggcatgagattaagtgaaaaaggaaggatacatatagtctcacccctactatagtatagatacatatagtctcacccctactatattttttaaaagttgtacaaagagagagaagggagagaaagtgagagagcttaactgagcttaaatgttaacaagaatcattttctgagaagataatttttattatttttcatagtttccaaataaaattacctgtgttccttttgtaatccaataaaaattataatgaaacaaaaagctttaaaaagcctcaagaatcaaaaccacaatgagacaggacctcacactcattaggatgggtactgtcaaaaagagaaaatagcaagtgttggcaaggatgtggagaaactagaatgaactgttggtgggaacataaaatggtgctgctgccgtggaaaacagtatgatgattcttcaaaaaattaaaaattaccatgtgatccagcaatcccactgctggatatatacccaaaagaattggagggaggagccaagatggccgaataggaacagctccggtctacagctcccagcgtgagcgacgcagaagacgggtgatttctgcatttccatctgaggtaccgggttcatctcactagggagcgccagacagtgggcgcaggccagtgtgtgcgcgcaccgtgcgcgagccgaagcagggcgaggcattgcctcacctgggaagcgcaagggatcaggg

SEQ ID NO: 37929 - DNA, 2300 bp, Homo sapien
ggattacaggcacacgccaccatgtccggctaagttttttgtatttttagtaggacggggtttccccatgttggccaggctggtcttgaaatcctgacctcaggtgatccgcccgcctcggccttccaaaatgttggggttacaggcatgagccgccgcacccgacccctctgtccatcttttcaatgggaaactccacaccagtgtggtggccctgcccttcctgctgtccccaggtgaagctttccttcacaccagtgcaagaaaaaacagcttgtaggaaagcagaggatatgggtaaccacgggaagcacactcagttctctggctgcatcagttaggattagttttagctgagagcgaaaaccccaaatgttggtgagttacaagcttatttctctcatgtaaaagtctagaggtaggtagttcaggactggtatggagtctccatgaccctccggagcccaggctctcttctgccttcctgttctgccatcctcactacccggctttcccatcttggcccaagagggctgctcaaactccagccatctagtcgacactctagctatcagtaagaaggaagggcaaagattgagagcatgcctcaatcttttaagaacacttcttggctattactaattatattgctgcttagatttcagaacttaatggtatgggcagaatttaatgagatgggcccagctaaaagatgggggaatctattgctaagaaagtatagatattgggaatgtctagcagcctgtgctgtcttgggctggccatgccatgtacatacacactatttcccagcaccaagctggggactctgagggaaagggtccagagtgtctgacttgatcattttgatgtggcctaaaaatcaagcttttaattgttcagccttttacttgttatcaaggtcagcttgtgggtctaattgggcccaaggcttgtgtttctaagtaaagttttattggaacgcagccatacccatttatttacttactggctgcttcacactacacagttgagtagctgtgacagagaccacatggcccacagagcctaaaatatttgctgtctgacactttacagaatgacatgagcagtctcctttgacagtgggactcacagccttttccagtgacaaatcagggttagcccatgtgtttctggatggggggaagctgttggcattttgggtataacagttcttgtgagacctgtccagcattttgcaggacacctaacatcattggccctgcctgcaagatgacagggcactccctcctccagtcacaaccactaaaagcagcccctgacatttccaaacccatgccctccaccatacgagaaccaggtacagggtctggctgacacataggtcacacgcaaagggtggatgtcagaggtggctggcctcacacgtcctccctgtgtccttcacggtcgtgtgaggagccaggggctgtgctgcagcctcgctcatgggctggtgcaggatgggtctggcggccccacgttggccaggctttgtaaggggctatttggctgattgctgtggccattctccaggggcgtctatacctgagaaaactccagggcctgaaggcttctggatctttgtaagattaatggtccttcataatgagtgcctgccctgactcgtaatttttttgctgttttatttcagactcagcgtaaaccagatcactgacggtggggtaaaggtgctaagcgaagagctgaccaaatacaaaattgtgacctatttggggtatgtctttctccagaacactgggccaactacctagtaataatacagagctgcagggaattcacattcccataggtccctggatgatcggcacggatggcccagggctgggaagagcgctggcccaggagttgagagtcctgggttctctttgtggctcggccagtcatgaagtcttgctgagcctcagcctcctcacctgtaaaactgggatcccagtataggcaagtaggcttacaactggttattgggggatgcaacgagaatataaggggatatatttaataaatgctagaatcctgtttacatattagtctggactattttgggtccataatccctcatccagagcctttggggcaagacccgaatggggattctgagtgcatgctatggcatgacgtggccgcaggggtctaaggcagtgccccattttcaaacactttcatatttctcccgcagaatgtatgaaacagtcaaaccaagtgtggtaagaaagactataagtagctccacatca

SEQ ID NO: 37930 - DNA, 2300 bp, Homo sapien
ggagactgaaggaacagacaggagagaaagaagatttgggatgagtcacattgggagcagagattaggaagggaccaatgtgtaaaagaatgcctggacatcaggcacctcagactatttgcccattttacgacaataattatctagctcatgtaggatggagaaattgaaagtgccgttttctggctatttggaaccattgttgagtctgtattggggtcaaacggtattgcagaagaaaataaggcgtttaggttttaggtcaggtgtgagttgaagaggttttaagttcttgagaacacaggctaagggagaagaagggggaatggagggtggaaggttgcccatagtgaaggaggcaagcccagagaaaagaaggtagagacccggagaaggggggtggtgagcagccctgggctgcaatgtggctgagcagccaaagcaggcgacccacaattgacttgccaccaagggaatgtgggtgaatgaccaaggcaggcatccccacggtgatcagacaccaatgaaatgtacgtgaataatcaggcaggtgtccctgcagtgattaaacaccaagggacgactgttttcctgagtccgtgaccggagctggagttttgggtccatggataaaatatgtctcctttgtctctactagagaggagaaagaactggaattggaaatagagggagatttaagggtagtgagagaggctggagaagacagtgaaaagaccgcttacccgatttgaaattggtgagatgttccttgggctgtttggtctgaggacccgaggtcataggtggatctcctcacagagtgagggtgaggacaggggactggtctcctgaaggagtcctcctgtcccgggtcttcggcaccaaatgtcacacgtgtccgtgtgaagagaccaccaaaaggctttgcgtgagcaataaagctgtttatttcacctgggtgcaggtgggccgagtacgaaaaaaagagtcagcaaagggagttaggggtgtggtagctttataggatttgtgtgggtagtggaaaattacagtcaaagggggttgttctctggtgggcaaggcgggggccgggggggtggaaggtctacaaagtgctcagtgggggagcttctgagccaggagaaggaatttcacaaggtaatgtcatcagttaaggcaggaaccagccattttcactacctttgtgattcctcagttgcttcaggccatctggatgtatacatgcaggcttgggctcagaggcctgacacaagttggcacatttgatcctatcaactttagtttgcactttcacttttgatttaagaacatactttctgtttctcagagggcagcctctgatgggaattttaatactcacaagcatcagtggctatatgattgaatgtacttcttcagtgtgagtaagtgacaactttctgtagcatgatatcccttatggacacgatccccattcaaaacgttttaaaactattttattggggacatttattagcatgttaaaactcttttacaacctattagagcatatgcatagaacataaaatgtacactgccaagaacaaatttaaggataggaagaaaagcttacattttttaaaaagtataaattgaaatgtatgcagtgtaatttaaatttgattacgttaacctccatttcatcaggaccacgtgtcgcgttttaacaagagtttccctatcatgtccaggctttggctctggttgcaggcgctgggtaggcacttttacgaggagggacctggcacgatggcaccacaaattcccaagtgtgtcacctctgggcgaacttgggcctgtccactcggccctgcgcggtggccaggggctcaccctctcgcaccgggcgtccctctgcgcgcagcttctctcgcccccccgcgccagacccgggcgaatggcagcaccgtgggaccctgccttgaccgcccccgcccttcggcggcctctcccagcagccggcaggctcttgggcgcgccaacagaggggcgcggctgcggctgtagtcgcagccagttcccgttccgggcccgcgaggcagccgccccggtcctgcccctccctcgcgctactgcgggagcagcgtcctcccgggccacggcgcttcccggccccggcgtccccggaccatggcgctctccgggctcttctctagctctcagcggctgcgaagtctgtaaacctggtggccaagtaagtcccagcgactggggattcgcgcggggcaggccctttctgaggtcctgggcgctgcgagtga

SEQ ID NO: 37931 - DNA, 2300 bp, Homo sapien
aaggaacagcctgaaaatcaggaaagaggcagatcaggagaaggtggttacctatgttccgctgagaagtggaacaagatgaggaatgaaaatagtttattggatttagcaatacacaaccagttagtgtgaattgtaacttttatcacatctcctggtgtcctgccagggacatgtggtcctagaagaacatctcttatgctgaataaaggtactggtcactccaaccaccccaattcctgagatgtctgacaagtttttctagaaaatataagtgacagggataaaatataaacctgaaaaggatcctagaattatcgtttagttcaactttttaaatttatctataaggaaactaagctctggaaagatggaaagaaatcttcctagaccaaataagccacataaggattctgtattttatttgttttgtttttgtttattttttagtttgttttttcatgtaaggatttttaatcttccccaggactctatcccctgattgcccacctctgtgaggaaagaagttaaactagaaacctaatttcattacttattagttccaagaccttaggaagattgcttaatctttctaacccacagtgtttattgctgtaaaatgggtataagaaagttgttagcaaaataaaacggaatggtccataattatatattagccaatagcactgtgtacaaaatgatccacccgccacggcctcccagaatgttgggattacagacgtaagcccctgcacctggcccccaaaacacactcttttatccatgtctttgggcatgctcgtcccctgcttaaatggccttcccatttgcagttagtgttaggtgctcttatgattattgtagataaattagtataattcgtgagtattagtgttcataagtacacaaatcattcatcctcaaatgccaggtccctcagggcaaatttggtgatatatgttggtaggatactctacagacataaaaggagagagaatattataacccacatgtagccatcacccagcttgtctctaagtaaaaatttatgtgtatgtaagaagactgggaagtaatttgcaaaaatgaaaacaattgtgttcaggcattggggttatgggattttttttccttaaactttttgtttttgttaagatgtctatacatattcagtgtatgtttcatttttaaagaaaaatatttaaaaaacgtaatccttgggatctgggtcctgtctgtttaactttatattttccacagcttcttatgcatagaaggaactcagtttattgactgttttaattgcatggagttcaaggtaaatcctttttattttgatgagggaaatttggattcaagtggatattgatcatatcactttgatttcctttgtaggattttaagcttgactttggcaattcccaaggcaaaacaagtcaaacttggcatggagggatagccaccatttttcagagtcctggcgatgaagtgtggggagtagtatggaaaatgaacaaaagcaatttaaattctctggatgagtaggtggcttctaattataagttaaacagtaattaattcagaaagcagattgtatgtgaggatgtgtacctgtgtgttagtttttcaaaaccacatactacagacatattcattatacttttagagtcaacataaaaggcatgataatgtgagtttgctaaaaggtctagaaaggctatattttctgataaagatttggggggatgtttgtaatctcttatgtaaaagatggaagcccttatttttcattctattgtctttcataatttttctttatagtttcatactgtgaaaaggcatgaagatttctgtaattgttacatatttttgttgattttgaaagtacttgaattcagtttttaaagaacaattatttaagatggcaggtgaatcagtaaataagtaatactttgtaaaagcatctgaggacatgttagaaatgctttgatactttttatgactagagctctcagagttgtgtggcagagcatttcatacaaagaaaagttgcagaaaagagtaggccttgagaagagagggttatctgacatgctcgatactttacctcacttgtgaaggagaaagagccatcctctctacctttgttctaggtggatattctcttgctgtcagaacaccatccatttttgtagcccaaagaacaatgtttccatagtataaagttgaaaaaaaaaacaaactatattgaagcctctttaaagacaagataaatacagagagttatgttaggagtataa

SEQ ID NO: 37932 - DNA, 2300 bp, Homo sapien
ggacgagccacctttatgaactgtaacactcaccatgaaggtctgcagcttcattcctgaagtcagcaagaccacaaacccaccagaaggaatgaacaactccagatgcaccgcctttaagagccgtaacactcaccgcgagggtctgcagcttcactcctgaagtcagtgagaccacaaacccaccagaaggaagaaactccagacacatctgaacatctgaaggaacgaactccggacacaccatcattaagaactgtaacactcaccgcgagggtcagcggcttcattctttaagtcagtgaaaccaagaacccacaattccggacacaccagcactttgggaggccgaggcgggcagatcacgaggtcaggagatcaagaccatcctggccaacatggtgaaaccccgtctctactaaaaatacaaaaaattagccaggcatggtggcgggtgcctgtagtcccagctactcaggaagctgaggcaggagaatggtgtgaacccgggaggcggagcttgcagtgagccgacatcacaccactgcacttcagcctgggcgacggagtgagactctgtctcaaaaaaataaaaataaaataaataaattgtaaccagcagtaatcctcagggagtaatttggcatcaagtgaatatcctgttccctatcaccttttcaccaaatgatatcactgatgatcctggcatgaatcaattataaaattccattattcatttaggatgacttagttggcatacttttgtaaagagaactgtttcctcatcaactgatgctcgtcatcagctgtatttcagttaccccgaaatacagctgctactagaaaggcggaatacctgtttgttttcttaaattatcactttgcagagtaaagttggtgtaatagtcaccaccaatagtgtggcaaatgaagttatagttttttttttaatttggattactctttggggggaatggcttttttatgtttaaagtttccaatcatttttcagtttgcagtcattgttatttttgattctcaaattgttctaattttggccagtgggcaacttcaggctggttcccatgtccttttagaaggacctcgttcgtcttgagaggcgtcctgagcttctgacacaagatgttccaagttgtcctcattcactcctagctcctgacctggcatcagtcatttctcgaaggatcacttggtaccttttagtggggggtggtatttagagattaatagctgggtgtcaaggatagacaatgttcctatgcccttatgttcattcaaaagttaacaatataggttttaaaaaatacacccaggatgtgtgtgtgtgtgggagggggtaaccaaaacacaatataggggtttctactgtgaccctaacttatattatgatcccgatttttaaaaagaggaaacggagaccagaggtgcccaaagttacttggctagtaaatggcagcgtcgggatttaagcccaggcatgtaacttccatgtaacagggaagggagtcccaagcattcagaggggccgctccagcaggcgacgggtccgtggaaaggggtcagattgatgaccagtgctgggggtgccggaaccagcagaaagggtgaacggacccgtcctgcccgactcctctaggccaggaaggcaggacccggcgagctgccggatgagggagccgttgatggagtcgcctgggccgctgtttcgcctcagatctgaccagaacttcctaaggcacagaaagtaccaaagaaccacacacaagcaccccagagcgaagaaaccagtcacgcgccacgaccttcagccagtgtccatgggacccgacccgcctgtgaggagtgcctgtccacccctcaatcagaggaagccttgagcaaggaggggcgggacatcagtaggtcgtgtccaatgaggagccagcgccggattgcttcaggacagactatttctgagtctcggcggaaggcggagggaaggccgtggggatggccaatcaaagggggcgactcaggtcggtggggaccggcagccaatcaggagagcgctcgctcctgactcgaccggcccacgcttcccgccagtcccctaaccctgaggctgccgcgcggcggtcactgcgccggggtagtgggccccagtgttgcgctctctggccgttccttacactctgcttcaggctccagtgcaggggcgtagtgggatatggccaactcgggctgcaaggacgtcacgggtccagatgaggagagttttctgtactttgcctacggcagca

SEQ ID NO: 37933 - DNA, 2300 bp, Homo sapien
acccatttaggattaagtaagtttttattggctgggtacggtggctcacacctataatctcagcactttgggaggctgaggcaggcagatcacctgaggtcaggagtttgagaccagcctcctggccaacatggtgaaactctgtctctactaaaagtaccaaaatgagccaagcatggtggcgggagcctgtagtcccaactactcaggaggctggggcaggagaatcgcttgaacccagaaagcggaggttgcagtgacctgggatcacaccactgcacttcagcctgggcaacagagtgagactccatctcaaaaaaaaaaaaaaagaaaagaaaagtttttactgggggtctgaagacacaagttttattggaggtctaaatgaactcctcaaacctccgtgatttagcaggagatgtgataagggtaatcaccccagcacttggacccatctagattcaatacatttactgaggctccagaagaaggtcttcacaccttagttatggattagaagaagttaatcacttacgtctttagatgaatgcacacttacatgtagacatatggcttagaaggtatataaaccctggaaagctttgtaattttgagttagtctggtgatatattccaggccttctccctgtacccggttacaaaaataaacttccttccttcccagttcaactgcatcttgttattgggccgcgagaatcagcagcctgaccctcggcttggaccaggaacaacatggtctgagagagctcatcccatgttccaaagggagattaaatgacaaattaagataccccaataataaaatgccaacaataagatgccctacagtgtaatagaaacaatgtaccattatgaaattcccagtaggaaatgaaagctcaaagactaaattcacttgccatttcaagataaaaagaaaatttcaggtccaaacttttttcctgcctcaatttcatattctgatcaggctcagccagaggatgtctcagtatttagacagagtggaggttcctgcggcaccatcctggagaggtgtaacattctttgggtggaaaaggtgaactctgctctcatatgctatctacttaaagagtctggaattaatagggcaccaaagatgatcacagctctgtctccacatccaccaaatttagaaaccaaatctgataactaagtcatttatcagagactcagtggtacccaagtgaggaagggccactggagacaatcttgtttttttcaccggggctggagtgcagtggcgcgatctcggctcactgcaagccccgcctcccgggttcacgccattctcctgcctcagcctcccgagtagcccggactataggggcctgccaccatgtccagctaattttttgtatttttagtagagacgaggtttcaccgtgttagccaggatggtctcgatttcctgacttcatgatccacctgcctcggcctcccaaagtgctgggattacaggctttagctacggcgcccggccattcccctcccttttctgctaggctcactgaactattaacgagcaaaaagtaaacttcccttttctttgagttattatacatttggggtctatttgttagagcaatgcgcttgccctactatactctccctgggccttgtatgatgaaattggtaacagccacaaaaactgcatctgggacacagaaggtggtagaggggaaaataatctgactgacaaagattctgtttataggtgactttttaggattgtggagttaggcaaagctgggatcactcacacagcctgataggggattttcctacgtgggtgggctgacctggtggtcctggttacactgcccaccagccttctggtgtctctactaggagtaaggtgccttctctttctcctccaggaccccacacctccagaccctgctgagggagggccacccatttctagtcccagctcctactctaactatctgtgtgaccttaaacaaggcctttcccctctctggcctcagtatccgcctctgaataatggggctgggcctgccgaccttctggcccttttctgctctgtgagtttgtgaacttgtgatagggagacaggagtcctaggaaggaaatggaactggtgatagggagacaagagtcctaggaaggaaatggaacttgtgatagggagacaagagtcctaggaaatggaaggagagcacgtttcactctgtccagcagagggcagcagctacccacaaatcaacagctgagcaaggccagggctgtgtgggagc

SEQ ID NO: 37934 - DNA, 2300 bp, Homo sapien
ctggctggccatttttaaataatgatctaattactgatccagaaacagccagtttagtaacatgcgtaattaacctgggacaatttcagcaggctttacaaaagtttagaactcaaagactccccacaccaggaactaaccagcaacccaaaatcaggccaggagataaagtacttgttaaaacatggaaggagggatcacctgctgaacaattacaacccaaatggaagggactattttcagtggtactggccatgccttctccagtcaaagtactgggaatagttagttggatatgtctttccagggtccagcctgcaataactgaagcccccagacctggaacctgaagatcccatcagccactaaacctgtgaacctgtagaagacctgaagtacctgtttaaaaggcagccaaaagataagtaaattcctatcaactttccttggtgtccttcttgtatatttactgtaagctggatataatagtagccatttttatatttttacaatttaattgctttcttccaaatggattgaatcacttcttttaaagtgttttaattaatttttatctatagaacaaaataacaaataagtattttttttttataccataatggtcacccacagcctgtgtatactaagaccatgcatactgataatcagctttattttacaaaagagtttcgctttacccctctggtaattaatggattctgggtatttattaaaaactttaacacaaagactgttaaataccaccagtccagctttggcaaggcactgttggctttgtttatctccatcatcatccaaacagactaccaatcctgatcccagcccaatcttgggcccttgaaaaaataacttaacatcctaactacaagggagaaactcctttcaaattaatgaacctggctgacttatatagccttaaaattatggaaatgacaagggttacaatgtcagaatgagcagtaaaccttccccagtcctatcagagcaaactttctggggttgcatcccctcagaaacccatttggggcccaatctcaatgcacatatcagtgcgcaaagcactaaaattccaggcaacactttgtattgagagaagccaaaattttggtcccgccctgggacatctaaagtcaccaatgtaactacaccatacagattaaaccctcacatgatcatgtaagctatgcagttacccaagctgcatcatttagaaaacctgtacagtttttatggaaaccatccctagtcaaggacactttaaatatatagtctaaataccgttaaggtaggcccactagctgtgttcacattttcccttggccaccttaccagggactttaataacttgggaaagtgaaaacaacaagctaacccacatgttcaccatagaaaacaattttgtcttgaaaaacaaggactctttttcccgtgtgggaccagttcctacttatgttttaccagccaattggactggaacctatacagttgtttatttagcccccgaaattaatatagctcccaacaaccaatccttcattatacttttaactgcaaccaccagacacaaatgagccatccaactgataccactttcggtagagctaggaataacagcaggagtaggaatgagagttagcagccttgcagtttccctatcctattaccaatgcttgtccaaggattttatggaaagcttaggtgacattgcccaaaagtatcatcaccttacaaaatcagatagagtctttggcagtggtggctttgtaaaatagaaggggactggatctcctaaatgctgaagaaggtggcttatgtctttttcctagaggaagaatgctgtttttatgtcaaccaaacaggattagtaagggatgccacccaaaaactagccgattggtaccataagatatgacaacagctgtctgagtcatggggcgcctagtcaaaatgctaatttggggctcacatctccttcctctggccagtccactattaattattatacttgccttggcttttggatcatgtttgttaaatcttttaaccagatttatttcttcttgcctagagaccattatgataatgcagcagggccaccagtcagtttcagataatgatgtcaaccccggccaccaagaagtaaccttgtctccactagacagagcagggtgagagttctgtaatccccagtaggtagggactgtgccccaagtcagcatgaagtagttatggaagaaagaccatgggtccctctgcctcccagaaagatttatggggat

SEQ ID NO: 37935 - DNA, 2300 bp, Homo sapien
accgtgtgttgtggggagggatccagtgggtgagagatgattgaattatgctgttctcatgatagcgaatgggtctcatgagatctgatggttttgaaaatgggagttgccctgcacaagctctccttttgcctgctgccatccacataagatgtgatttgctcttccttgccttccaccatgattgtgaggccttcccagcatgtggaaatgtaagtccaataaacctctttcttttgtaaattgcccagtcttaagtatgtctttatcagcagcatgaaaacagactaatacataaggatatgaattatagttaatatataattctgtatacaaaatatgccaaaaaatgtgttattggtgagaaagaattattttgtgtagtttggaggttatctgaaagttaattcaaattatggactttaaaaaaaagagttatttatgaaacaaggtagtaaggaaccagtaagtaggggagagatgtgaagaaagttatatatatgaagatatgtttttgtgagggaagattgtagagatggtggctttgtaggagaaaagatcttgtacgataaattcttgtcctaacgtaaaatgactggttgtttaaaaagaaagatgtttaggaaaactcagaaagtccaagcattttgtagatggtctgggtaagttatgaaaagaattcatgtaagaaaaggataatgtacctttggtaaaaagcatgggaatgtggatttcttgcctaagtttagagggtgaaaggatggttttaagtgagataggaataatctaaaaggtttgaacaagttgtggaaggcttatgaaaaattaattgtaaaagagattctgtgtgtgaacatattggctaaagttaaaggggaagactggcaattagacttcacccatatgccagtgtgcaaagtatacaagtttttggtagtagtaatagatacttttactggctgggttgaagcttgctctatgagaacaaagaaggctcatgaagttgctaagcttcttttaaaggaaataaatcccctagtttgggttaccccaaagcctctaaagtgataaagacccatcttttagaactcaaggggctgctaaggctctcagaatcaaaaattatttacatgggaaagtagaaagggctaatcaagctcttaaaatgggtgttagctaagctatgttagaaaacatcagaaatttgggtcagcttattgcctgtagccctcttaagaacccttaattctcctagagcaaaaattaatatgagctcatatgaaatgttatacagaaggccatttttttttgagatggagttttgctcttgtcacccaggctggagtgcaatggcacagtcttggctcactgcaacctctgcctccctggttcaagcaattctcctgcctcagcctcctgagtagctgggattacaggcatgtgccaccatgcctgactagtttttgtatttttagtagagacagggtttcatcatgttggccaggctggtcttgacctcctgacctcaggtgattcgcctgcctcaacctcccaaaatgctgggattacaggcatgaaccaccgctcctggctggccatttttaaataatgatctaattactgatccagaaacagccagtttagtaacatgcgtaattaacctgggacaatttcagcaggctttacaaaagtttagaactcaaagactccccacaccaggaactaaccagcaacccaaaatcaggccaggagataaagtacttgttaaaacatggaaggagggatcacctgctgaacaattacaacccaaatggaagggactattttcagtggtactggccatgccttctccagtcaaagtactgggaatagttagttggatatgtctttccagggtccagcctgcaataactgaagcccccagacctggaacctgaagatcccatcagccactaaacctgtgaacctgtagaagacctgaagtacctgtttaaaaggcagccaaaagataagtaaattcctatcaactttccttggtgtccttcttgtatatttactgtaagctggatataatagtagccatttttatatttttacaatttaattgctttcttccaaatggattgaatcacttcttttaaagtgttttaattaatttttatctatagaacaaaataacaaataagtattttttttttataccataatggtcacccacagcctgtgtatactaagaccatgcatactgataatcagctttattttacaaaagagtttcgctttacccctctggtaattaa

SEQ ID NO: 37936 - DNA, 2300 bp, Homo sapien
agaaaataccaaaacccaattcctagaaagaccattaaaaataatttccctttaattatagacaacttgattatctaaaagcttttttttccataaatccgcttatgatttactccagaccattcatgacatgcttgtgaggtagaagaatagggtctggaggcagggaatctaaggccaatttgccctgacttcctagaactgaatcacaaggaaaaccccacctctccacacccaagtaacaaaagtatcagaggctactgtctttgcactgcctcacagataaaaatggaaagtacctctgattggtcccctcccacaaccaatcagacttgtcgtgggccactccttcacttacatagggtataaccaagtaaccaatggaaaacttctagagggtatttaaactccaggaaattctgtaaccggcctcttgagctccttgctggagcccaatcccagtctgtggagtgtactttcatttaaataaatctgtgcgttctttgcttcattctttcattgcttggtttgtgcattttgtccagttccttgttcaaaatgccaagaacctggatgactcatagtcaagaccctccaccagtaacatatattggcgagccagccaggaggtaagcccaaagtttgggatttatttttcttctcttgatttcccttttcctctctgctccttacaggggaactcttttctctgtctctttttccctttccagcttggaaccctcggtggacagtgcctaagcacagaggcaaccacaggtttctaacagggccactctctggtgaaactgaaaggtttctgtgtgaaagtgcctgaccaccactgcccaattcaggtgagggacctgagtccttttccttttttcagtctttcagtggccgtttcctagtagcttcttggtaattgagggaaactggccgggaccactctctactgttacctgaaggccaaggagtgaacctgggatagctctcctgcccagaaggcggaaggactcttttgtatctttttgagttatagtccctgatccctacctgtgatgcaattggcagcagaagctcgtccagggtgaactcacacacatttcaggcgacttaaaccctctttcttaagctaaattctcccataaagttggcctgtaaggacaaaagataatatctcttagatattttgacctcccttctcctactgaatctattgactggctgaggacctttgggacccacaagctttagaacacattctacatcttggacctccacttaagggagcttggtggtcattgctttggcatcagtttgcttgccctgaaccccgtagaaattctatatatcttttatatacccaatataaacccaatcttttatataacctctgcaccatttcttcatggggaatatcccactagccttggtaccgttaactctgcagtgttcgggaacctccttagtcttgcaaggaatgcaggaagatatggcctatctaaattggtaggaagctagaagctgagaccttcatccagggacaagagaaaagctcatattaggccattgcctctggagggaaaacatacaaagcaacactggtgcccacctaaggtcagagatgtctgacacttttagactggacctcaaagggggatgcctaggggatccaactccagacctcagcctctccaaaggggatgccctaggcaaaggttctcaggtctagtactaaggcctccttagaattgtctctctcttgcagaccactacaggaaacactccatttattccacctgacttcccacttggctgcatcctcaaccattgaaatgaatttgaccctgataatctaaggaggaaacatttgatattcttttgcaataatacttggccccagtattgtttggaatctggagtttgctgttgaatgggaaagcaggatgacgttgcatgtatccaggctttggtgctgctgtcctaagaagggtcaggcctagtcagcatatggtgctctcctttggtgctatttggctccagtgtctttggagtctgaggaggtttggcctttaaaaatcaaactgccaccggaactgctttaaaaatgtttggttcacagccttcactggattacctattggagcaaacaaagtgtaaccatgtaaaacctgtgagcttgtattgatatctcatggctagagttccaaggtaaaagctattggatcttcgtttgtgtgtgtgtatacatgtctagatgtgtttatttgtatgtacacttattgttatatgttgtgtca

SEQ ID NO: 37937 - DNA, 2300 bp, Homo sapien
ggggaaaatgttctttatcttgcttggtgttggggttacaaaaggatattgctttgtcgaaacccattgaactatacatttttgttcattttaatgtatgcaaaatttatttccctcaaagaaatgaactttaataaagcaagaaaaatatatgatcatacatacacaatactagggcctcttgcagggcacttaaagagcccaacagagaaaggggctaaactcacttgaagcttcattagctatgtagaaaatctgcctctgcccccagctcacattctggcccaacactcacttagttgtgtgaccatggacaagctgtttgatatctcagtcccttgaatcccacatgtgaaaattctgaataactatagaacctatctcactaaattggtgaataaattccatgagataaattagaactaactggtacatagtgagtgctcaacaaacataaactattatcattattgtgcagacacagttttcaaaagaaaactgtttgggaaattcttccaagggccatgaagagcctactgaagtgtcctgagaagagaagggacacagtcagatttgcctttcagaaataatgactgggccgagtgcagtggctcacacctgtaatcccagcactttggaaggctgaggcgggcggatcacgaggtcaggagttcgagaccagcatgaccaacatggtgaaacctcgtctctactaaaaataaaaaaattagctgggtgtggtggcgcacgcctgtaatcccagctactcaggaggctgaggcaggagaatcgcctgaacccgggaggcggaggttgcagtgagccaagatcacgccactgcactccagcctgggtgaaagagcgagactccgtctggaaaaaaaaagaaaaagaaaaaagaaagaaagaatgactgaagcagcagtggggaggatgaattggtcggggaggagggaagaacggatttggagtcctttcaggactgtcctaacatgaaaatggatgagacattattgatctaaggaattttttagaaataaaatagttttattcaaaggatatagaatttcaacattttaataaaaatctaaataaaaataaaagtaaaacttaaaatgatttttcacatttaaagatattaaaataaattcaaaattgcctagtaaaataaaagccaaataaattataattaatatcaaatcttgaaataaaagtgtttaaaaatataattgttcaatattgcagaaggttcttaagcaacccaccctgctcatgttgaattgtaagtacttctccagaactgcacactggaacgggaagagaaataacatggactttcacaccattaggaaaggagacttcattatactgagcccgtctactcctgcacactcctggggtgggattgtgggtcacagggagacgtacgtgcatactgccgaagagctcccaagtggctggctgcaccagttaacactcccctgagcagtgtaggggagtctcagagggtcacttggcattttccatcattttcattttagccatttttgcaggtgtgcgcaatgctgtttttataaccaacacatcatttttctcttcctttcctggagggggaacccagcttttctaggccctccaccctttgggcaggaggaactgggtgtgtggggcggggggaagccatctctgggtggttggtcagctggggcctaaccacaggaggcagatagactgaggctatgccaagcagaaagacttatcaggcacctcttgcctttcctcatctctgccggttcaaatcctgctcgccccgcaagggcagattggaatttaccttctccagaaagcctggggtgactctatcccctcactcctcctcccccgttcgccagcttttgtcttgacatcggcggaccaagaatgtgtgactctgggcaaatcattaacctctctgggcctatttccttatctggggaacatctgcacttgagcaacagaagtctaagatccctatctgatttgatgttttgcgacccttttaaggcgcagggcgcgaaagaacagaaacagaagtgtccgttcaagtaggtcggccggggtgtcactcgtataaaaacctatgctttgaaggttctcgtgtgtctcggcctgcaggtctcgctcagagctgtgtccctgaacatccaccctgctggggtggcttgacgcacttctgtgcaaatctgttcgctcgcaaccctacctacctctctcccgaaccggagaaaaccttcggcggggtccttccgggttttgtgtcg

SEQ ID NO: 37938 - DNA, 2300 bp, Homo sapien
tgtgtctcatttccccatatacaaaaaatgggtaaaattagatcatctttaaattatttttcagctgacataggactcagtaattcacacaattaactaactgatatatgtgtgttcttggaaaattagaaaaaaatatccaaactaacttaaatcaactaactcgtatattcggaaaatatcttaaagtacaaaacaataatcaagacaacataaacaatacacaagacagtagttagtagcatcggaaagctgccgcgatcaaagtttactttagttaactagatcctgtcttaactaccgatggatgattttcactgcagttccaggctaacgtggcagagggaggggtttgggtgtggtggtttttttttttctccaaattagttgtatgcttccttctaaagggaaggatattttttaaaatggcaagttaagaaaagacaaaggaaccacacctaattttatttgtggagtggaaggtgggtggagggagacagaatatgcaatcggtgttctgacaccaatcatgaagaaaaaagttaagcccgtggtgatatttcaaaatgaaaggctatttattaaaatcggtcaggctcaaaccagcgaagaggacagatggcaaagtggctgaatttgcggcagctatgccccaatgaattatttccgagatagggttccaccctctgtagctaaggcaaattattgcatcaggcgcccatgcaggagaaacccgtttggtgtttactactaagtcatgatctccggggtcctactgcaagctctggctctccctaattgcatatgggaatcatctgaaataatcttttccttgatatctctaaattctaaactctatggcagtgccctaggaaaaggaggtctatattaaatcaccaagtccttcagcccatgaaaccttccctcaccttcgggaaaatcaaatgtcaaaatattccatactaaggatggctgacttcactccgcaacacttagtttcccaggtttacgatctgagggctcactggttccaaacggccttttcagaagccagaaaagatgacaagagcaaaggatgatgagttcacagcattaatagaaaagttcgacacctccccacatccacatttcaattctattttctcagccaatcattccgctaaactaagcactgaatgaaggaagatgttaagggggaaacactatcaaagcatcctaaagattaaagggcctggccgtaagacgaaagaaccggcagtttttcggctcatcattgaccactgaaagaattaggaggctttccacccagggtgcacaaagagtacagcagagcctggaaaactgaagttaaggttattcagttaggaggcgaggacaaccaaagggtcacagatcccagccccactggaaatagaggagacgcgggctgtgacagaatggggaagggagaacggagccggagagggacgcaggaagtcggaggggttccagggagtcatccaaaaagagaggaggacggaggtccgcgggagaggaggtggctgacgcacgggggacttgggaccaaagtgggggaggcgaagaagacgccagaggatgaagggaaagaaaggggtaaccgaagaggaggacagttccccggggaggagggaaggatgaccagaagaaggccctgggaggagagccggaggcttagcggagagcgcaaaacaccggtacctgctggcgcactgctagcctcagaggtgccagcacctcctcagcccccgcgccgtccatgctgctccgggaggcggcggcgggcaaggagatcggggggcaggaggccgcgctgagggaccggcggagcaggagcgagggtcgggctaagagccggggcggcagcagcagcagcagagcggcgcgagcacctctaagcagcactggacgcggagagggcatgagcctgcggccctgggctgtccagagagggtggcgacggaagcggcgcgcgccgcccggctcggagcatgatgaaatcgccgcgtaaacgacgcggcgcgcgtgctgccgcacattcaccaccgcgtgacgcggcgccgggtcgccgccgcagattcgacacaaaacccggaaggaccccgccgaaggttttctccggttcgggagagaggtaggtagggttgcgagcgaacagatttgcacagaagtgcgtcaagccaccccagcagggtggatgttcagggacacagctctgagcgagacctgcaggccgagacacacgagaaccttcaaagcataggtttttatacgagtgacac

SEQ ID NO: 37939 - DNA, 2300 bp, Homo sapien
cttaagcttggcttaggatttctcccttcctctgtgctgcaccgtgctgtgtgaagggctatcccttgtatatgagggacactattgccctgtgaatacatgggctgacctggccagccaccctctggcctgtgtgggaccctgggtaacagggctcagtctaggagcggagggtaggactctgcctaggtcctcccctgctcctggcactggataatatgaagaccaaggaacctctacctctgcagctgcccagagctgagcctgggctctcactgtccattcaggaggcagagggtagacctggctggctgctcagcatcttgttcctgccagtcagcaggccctggagagattccagggctcagccctggtcttagtgtggtctcactcgctctgcctgggcagtgacagcaccattaatatggaggctggtgagagcggagcacacaaaagcagcctgcctgctgctttgcctctctctgcccagggcatggtgctagttcatggtggtttcagcctttcctagcagcttaggtttatgtggaggatggcaggggaacaggactggtttctgagactaggttccagctctccttgccctctaaagatagaaacaaacaacacacaacacacatgtatgtcttccccagactctccgtctcataactcagaaccagagagtctcagagctgagaggggcctcggggaagatttcactgatggagaaagctccagaagagagggcaagcatcctgcctggggtaccatggcagggagagcagagtcagaggctggaccaaaatgcagcctgagtggaagcatgccttaccccaggccctgcttcccgagcccaatgccccactcagctggcagacacagcaggcccgccctgggcactctgagggtgcagccacagcagatcaccaaggaggcattctgggccagggtggggtggggggcctgggcaagttctctggggaggtttccagctcctccacacctgctgtggggcctgattctccccgcccctgccccgctactggtgtggaaaccagggtcaggtgaagccctgcccaagccttgaggaagagagacacattctcacttcttcctttattctttctggtgcccaaggcactaacaactgggtgtataaagccttccagataatttcagccaatttctcccctagacttactccatctgattaaatggccacccagtcactcaagcaggagacctgatgttatccctgcctctgggctcctacttaaaaccagccacccactccagttcctcctcaccaggtctggctgcccctccgaaatctctctccattccagcttccacggtctgatccaaggacttcaacccactcaggccacttgatctcattagactcatgggtgtctccctgcttccctccaggcctcctcgatacatttccttcccagaggctatggaggcttttggaggatgcagatctgcccatgggctctccgtctctgcctccctccagtgtcctcgctcagggaggggaagctcaggcggaaagctgccgaactttgggttgcggctgtccctcgattagcagagctgcggtgttctcctcgggcaggcgggcaggtgggcgcgctttgctgccccctgcagctcgggggcctgcgatccccgcacagagcattccgtcaccccaggcccacgctctccagcccaccgccctcctctggacgccgcgagtggaagagagctgcgaactgagaagccgtactttgggcagggtggagggcccgggggctggagactgagcccctccgagaggagccgcccggccccgccccccggcgcagccattggccgcggcggagcggctgtacccgcagctccgtgcactcggcggctcctctccgggaaggtccccacttgacagctctgggcgaccggaggtggcgcccaaaggctgcccgggagatcggggctgggctggcgggggccaggaccccgcgccctctcggccgctcactctcgcgtccactccctcgcagtcacgccgggcgcgcactcccactccctctccgcacgcggctgcgggacgcgatggacgcggcactgctccacagcctgctggaggccaactgcagcctggcgctggctgaagagctgctcttggacggctgggggccacccctggaccccgagggtaggcgggaggcgagcggtcggaggctgcgcgggctccttctctcgcgcgctgggtgcgcccctgaccccgcgctccgagagccccgcgtccctgc

SEQ ID NO: 37940 - DNA, 2300 bp, Homo sapien
gagaggaacctgggctaagcaccacagtgcctactgctacccggaccctcctaaagctgcagagaatctggcttccctccagcttgccccacccagccaggctcccagctgcatgagaccttgctccctgcttctgctcaggagacttccccatttgcagtaagggtctcccattcctccatctgcttaaacccttcaaggtgctcctgcagtaccttcccaggaagtgccctctcactcccctgagctggcccagcacctgtgccatgtcccacctcccatcagttatggatgccaggtctcatgggttccccatgcctctccttcccatgtccctgcacactctgaggctggcctctgctcttggtgcctgctattaggctggcccctggagacctacagctgaaggctgctgaagggaactgtcccagccatctttcagagtctgcccagctctcaaagtccttcccagcttatgatgttttgtaggaggtatccaccttctacaaggagccctctctgaccaagcccatctggctgggtccgggaaagccaaatcctgccccaggacttgggatagggttttcaccctgccaccttcaaataaatgaggaatccgatcaattcttcctccatttttcctataaagatttccctgtaccactgagactaagctctgtacaaaataggagggaagggagaagaaaaaacaaggagaggaaggttggggcacatccacattcatccttatcctcccagagcttggagaacagtccacaccagcgaggcagagcttcagactcagacctgtgagatttcacaggagagggaggtgggacctggaacagccaggaaggctgcctggaggaaggggctgagggtggggaggaagcactcaaggacagaaaagtgtcccatgtcttagatagggagaccggaaggagcacagagtgtctgagttacttaaatcgggactgagttttccaaggtctctctccaccatgcctgcatctccaggagaaagtttggtgccccactaatcacattcctcacatgctttcccctcagatcctaacaacaagcaaggtgcaactgtggcttaagcttttaaaccccctgcaccaggcccacctgtcaggaacagctcctaaggaggcttctgaggctctggaagaacagacctcacctcatgagccctgacccagccccaggttgaacctgtccccgccaagaacagcactgctcagccacctgatatcaggatccctaaccatttcctgaaatggaacctgggccccatacagacagacacctgggccccatcccaagctacttcattggaatctctgggtgagccctgccatggctgtatttgctgtcggttgggttttttttttttttttttgaaagcattttattttgatagaatttcaaacgtacagaaaagttggaagaatgatccaaagcatatccatataccccttttccagatttaccaacaatttacattttgccccatctgctctcttgttctatctatgtatctatctgagtttatttctgaaccatttgaaagtatgttggaaacatggtgcccctttaatcctaaatgtgtattttccaagaatgagaacattctcttacctacccacagtacagtatcagaatcagcagatgtagcattgatacagtactatctaacccagcatccacactcccatctcagtcatcccagtaggcattagcacctgttaaaagctcctcagataggtgttaggcagtgctggttcagctgagacccagggcagcccaaccctgtgctgaagcagggaccacagcctaggcccctcctgcctgtctcaattcctctctcccacctggggagctacagccccgggcaatgctggcagccgatagaaggcattaaccccttctctgcaggctggatggagagcatagccccttggctggctgggtagcagcagctgtctgggaccagctataaataacctggaggctgtgggctgtggggcggggtcaccactgccctgtggaagaagtgggtggagaatacctcctcatgcccaaggccttaccttggcctcccctccagggccgggtggggtggggctggccagggtgtgaccaccgtgctgggcagcaggctccagtccctaacccccagccactactggcatgaggggtccctcagggcccccaggcctcctctacgtcccacacctcctcctctgcctgctctgcctcctcccaccgccgctccaatacgtaagtgcagggag

SEQ ID NO: 37941 - DNA, 2300 bp, Homo sapien
gtaggagaaggaggtctgggtatttattctttagctactctattagtccgttttcatactgctaataaggacataaccaaaactgggtaatttatgcaggaaaaaggtttcatggactcactgttccacatggctggggagacctcacaatcatggctgaaggcaaggaggagcaagtcatgtcttacatggatgtcagcaggcaaaaagagagcttgtgcagggaaagtcccccttataaaatgatcagatttcaagagacttattcagtatcatgagaacagcatgggaaagacctgccccaatggttcaattacttcccaccgggtccctcccacaacatgtgggaattgtgggagctacaattcaagataagatttgggtgaagacacagccaaatcatatcagctcttttgctattggctgctgcaggaggccctctctgcacagctctgtctcagtctcactgggatgatggctcctccatgctgctagccctcaggttctgtgatggtgctttctatgagtcaacttggctaggtcatggtgcccaaataggtggtcagtcatgatcctggctgtttgtgtaagggtgtttttggatgaaattcacatttaaactttgagtaaagaagatcgccctccataatgtgggcgggactcatccaatcagctgatggcccaagtagaacaaaagactggccttccccgagcaagagggaattctggcagcagctggtctttggacttggactgcaacattggcttttcctggtcccacccttcagagtttggacttactggcctccacaattatacaagccaattacttaaaatagatctgattctctcagtgtacacaagctgggttctctttctctgaagaaccctgactaatagaggtaccatatgtcttccttccaccctgcccacaacttagttagcaccgtgcctttattgcacactcctccaatcatgtaatgcgagccctgcagtttcctgcctgctctgtatgccttttgcaggccagcacgacagccgcaggcctccctggaggctgcccaggcacccgccccttggaagccaggccctgacgaccgctgggtgttcctgcgtctgtggcatcacccatctgttgggccctgtggattcagaattgtttgtttacttaaagccagaacaaggcattcctgtccttcccactttcagggcaagaggcctgaacctccagtgtagcggattcatttctgtccggtttgtggccaagtcagagccatttcctagtgccaaaaacagagactgagcttttttctgtctgtgggagattttacaacccagtcccatttcaaagagaagactgaggccaggagtgtcttacccggagtagccaggtgagtcagtggccaggaagccaggacccctctgacagtttatgctttatgaccgggcgcccttgttctcattcatggagattgacgacaatttctgctcttctcccagtgacctgcacagtgatgccaagtcagccattctgctctgcctcctggggtctgaactgtgttctccagcagggatgggggatgcatgaagctgcacccactgcctggcctagagagagccactgggccccagtgaccaccaggcgacaagatggggatctcactgtgcactcaggtcacaacacctgtgacttagaggagtgactttggtccttacagtcagtgaagtgggcacgcaggtggggaaacataggtctgacacctacttggaggccacagagcagcatgtggctgccagggctgagagttgcacccagggctgggcaccatcaattgcctttgacggacatgggttggtccctagaggcagcagggccagggcggctgcagccccagctgtcatagctctggggttggggaaacctcaggtgtgtcagtgtggctgggaggtggtgagacatgcactgccttctgcatccccctagaaggagaagctcaaggaaaggcatacttgggaggagccatgggatgaggctggaatgctgggggtggagcctggagagcttggagccctcataagacctgatagcaaggagggggcacatttcagggacaccatgaagggtggcttcactgggggtgatgagtaccagaagcacttcctgcccagggactacttggctacttactacagcttcgatggcagcccctcacccgaggccgagatgctgaagtttaacttggaatgtctccacaagaccttcggccctggtgagcagagggtggcccttccccttgagc

SEQ ID NO: 37942 - DNA, 2300 bp, Homo sapien
gctcaggtggtaatgttcctttgcagctactcacctcctgctgtgtgacctggttcctaataggccacagacccataccggtccacagcccagggggttggggacccctgatacacaatctcttatggagcataaatctgtctcatgttattctttcattattacacatcatccatcagtgtgtcttcacagctggaacatgagggcccctggaccaagcatcatactgtctcctgcaactctgcccttctctctctacatataagagcacatggctctttctcacatagcacaacatgttcaaaagaggcttctcaaagaaccattgcacgttgagaggggaaattgcctggagattatggtgcaatctgccacattaaagctacgtcctatggagactgtatagggtgagatagttgcttcccaagtgtggtacatgtgccagtggtggttgtaaggtgatttaggtgaatgcatacctttctggttttgtgtttgttttaatgtgtattagagatttaataagcacataaaacccaagatcttgtggctattactgcttgggaacactttccttttaaaataaattgtaaaacatgtatgtggatttaaagaaaataatacataagtaactgtataggggttaagggctgaattgtgtctttcaaaactcctgtgttgggccgggtgcggtggctcacgcctgtaatcccagcactttgggaggccgaggtgggcggactgcctgaggtcaggagttcaagaccagtctggcaacatggtgaaaccccgtctctactaaaagtacaaatattagctgggcacggtggtgggcgcctgaaatcccagctactcaggaggctgagggaggagaatggtttgaatccgggaggtggttgttcacttggcagtgagccgagattgcgccactgcattccagcccgggcacctgagcgggactctgtctcaaaaaaaaaaaaaaaaaaagaaaaaaaaattcccgtgttgaagtcctaatgcctggtattccagaatgtgactgtgttggatagggtctttaaagaggtgatgaagtggaaatgcagtcattagggtggaccctattccaatacaactgatgtctttataagaagagattaggacacaggcacacacggacggctagccacgtgaagacactgggagaaggtggccatctataatagaggccagggagagaggcctcaggagaaaccatccagctgacacctcgatcttggtctgtagccctcagaactgggagacaataaatgtgttgtttaagccacatggtctgtggtactttgtatggcagcccaagcaaaggaatacaataggtaacatgcggaagtggcaaagattgtgaaggtggaacccaggtgactaagttcggggaaaatgtactgggcttggttagaaacccaactttcccagtacccagctgtgtgggcctcagcaaaatcttagcctttctgaatctcagtgtcccgttttaaagaatggggccaacagtaactacctagccaggaagttgtaaggattaaaagtgcaaccgtgagttaagagcttggtgatcaataaatggcagtctcattacgggaaagcaggcaccaagggggcgaggaacatctcctttaatttcggtgcccaagaagcagaatgctgggcttccttgcccccaccgtcaaggcccgccaaggtcagtagcgttggtggccccagagggggccgtggtgctgagggtggacctgagggggtcacttccctgtgagtttagtcctccagaaacaaggaggcaggtattcttcccattttatgtctaggaaaatggagcctcggagcggagcggtaatttgtcctaggcctctcagatgaccagggccagggtcagagtgaggccccgagtccggagccgtggacggggccctaggcgacaccagggcgccctgactgcggcctcccactccgagacgcgagtttgcgggacgctccaccccttccctcccgccccagcccgccagccccagggaaggggaggagttcttgccgcgccgacgccgccgtcgccacggcaacgcggccatactgcgccggacagacccagttgcctggtgctgcggcccggcgtgggcctcgtgggcagagccagagccagagccatggacagcctcttcgtggaggaggtggccgcctccttggtcagggagttcctcagcagaaaggtaacggctcgccccctccaaagcccaggaagtggctctaatttggggggatcatcgggg

SEQ ID NO: 37943 - DNA, 2300 bp, Homo sapien
cttttttctgacccatatatccatttctttccatttcccttccctacggcctcctctttcctctgtttgtttcaagattgtgttcttttagtttcccaaattgaccttcttagctaaattcatggtgggcatgggttttgtcatgtttccccagcagctagagcctctgtaaaattctgaacacaaaggctctgggagaggctgaagcctgtgtagcactgggggtctggaatccattaagaacaaggaacacccctaacaccaggctgagctgttggtgaggcatgttctcagcctccagccatttgacaatcaccatggcccagtgaggtgggcagagagcaactgctgtggttgtttttcaaatagagaagccaggcacttgcgaacaggaccctcacttcgccaaccccagattttccattgctagagcatgtctcagctgggccttgaaccttggtcttctggcagttcagggtgggatgatggaaagtggctttgctcatgacttagcatttaccaagagcttctcatgggcctgggtcccagagtcatggactcacagtttgggatggttacagcccccacctgtgatgtgattccattgtgttacattgggcaagtcaaccccatctcctggtttccccatctgagagtgaagggaatgaatattagccttttgtttacattttttcttttgtttaattttaaagcttcatatactatggttccaaatgtagggccaaacccaggactcctgtgcgcgagtcctgaactcactccttatctgcgaaatggcctgaaaacttcagccttcacttagcccatggggctgttgtaagaatcagaataatattaattattgcaaaggtgatgtcaagtgtaaaggttatatgagaattatcttggtgaacatcaggaatcgtttgcttgtgctttatgagaacagcgggttttgatttaagatggtaaacagcgattcagctttcttccctcagggcttaaagaagacatgtgtgaccatggaccaggaacgcccacgctctgacctcagcataaacaacagaaatgatcttcgaaaggttttgcatcttgaatttctctataaggagaacaaggtatgtgctttctaaggtgtggtgtggagtcttggaactgagtttggcactgccaaagcactcatgggccctgccagtgacaggagaggcttgaggttctcctggcctgtcacacttgcggtcagagagaaacggaccccccaaatgtggacagatccccagcgggagtgggttttccatctcggtcagctggtgccgcccattggcgtgttgtgtgtgtgtggttgtcgggctcattttgaacagagcctgtggcagtgctcagcctcccgcagttattccctgtgctccctcctcccaacatgaggctatttttagtaagactgtacttaagaatatcgtatccagttatactaaaattttccatgccctgcttatgtaagagtttccttcttcagttctgagtaataccttagtcttgagtctcctgtgacatataatttaggtagaggagggaattgggttcagctaacccaggtgcattagagttggaaaagcaaatggaactgtgttttcttgggcgggaagggggcttctctgatcccccagacttgatctcccccaacctgctattataggctttcatggcaccctctagttttcctgtttttgtgtttatcacattggcaatagaatatttatgtgattttaaaattagtatctgccccccgccaataccttggacacagcagaagccagaaatgcagtcttttttgttcactattttatccccaaacataaagtgttgtccgatggcatagtgaaatatatttgtggaataaatgaatgaatgactatacgaatgaatgaaactacactttctacttaaatttttaatttgttatgaagacagaaaaagaatgggctgtccagcaaatgttgctgtgtggttgggcatagtgtcagagtcaaaaagaaaatgatatagttcagcatttatcacaattttttaaaaaagcaataaaatgatatctcatgtggaagtccaatatgcaaagcaaagaagggaaaatgccctatttgaagtggggaaaaggaggtcttgctttatcgtctagcctctcagcgtccagctttaaaccactgatcaattcccttctctcaggagggggagctgtgagccagagagagttggctatccaaggtctcacagtcggttaccaggtagggatgaggctagaa

SEQ ID NO: 37944 - DNA, 2300 bp, Homo sapien
taggaacaaaaggaggcaggtgaggtcaccggaggggcaatccacctgaagtgctttcacccctcagcctggggagaggcctcagggcctgtcccaaaagcatggattaggatggctccctttctacgtgggttgctctgtccaggcgcatgggagaaggagtgctggccggggcatcgggagccccaggctgtctgtcctttgctgcctgtccccagctctggtttttcactggagtcactcagtaggccaactgctgatgcggtgcatccaccgcctggcctgggcagaggaggcctggagcaggggcctgggggccccctttggcttattccttagtcatatgtagccttgggaaagtcactgggtctcagtttcctcatctggaaaatggaagatggagcagttatcaggtagcttccagctcttcatcatctaagggtggtcctcaaagaagaaccttaaacacttggagaagggtgtcttccaaatgcagtactaggcagtctgaaggagcagaaaggagacctgctgttgatccggagtgttgtgagagtgcagcagtcacaggagaggcgagcagagcctgatggcatccgtgtgtgggatctggccagggtggccaggaatgggatcacctggtcacactcccagctgaagcagaacgtggagccaccagagccaggaaaaggaagtgactggtgaggcttcaggggctaaggtggagcctgagggtgattgctcaaatgaccacagatcctgaggcttgtagctgcccactgatggactggggtggcccctcagcaccaggacctctgcatccttgtctatgagatggagcctccccctcagcctgtaccccagggctttgatgaagcctaaccaagacagggactgtggaaggggttcagagagtgggatttgttccagggcgagggggcctcctttcagtgatgcctctggactcaaagcagtcgcctcctcgcctggctttggtccttggtacaggcggtcaatattcggccctcctcactctggaaggcagctctccccctgcagtttaattcatgtttttgctggaagcagttgagctgcctcagcactgccctcaccaaattcatttttcatggcctgggcctaagaggggttcctcgtgccaggcctggaaatgtataccaagccatctttgcccaaaatcaatagcctccttgctgtgttttcattactgctcaccctctgggcaaggtgtctggcaggctcctggccagctggaggatgcccccacctctgcctcccattggagttccttggtagactcaggtctctgtggagtgcagagtagcactggaagaatagccccttcttcccaagtggcaccactttctagaccctgatggcagttttcaggccagttgccttgcctgacctcgcctttcaatgcaggcgtgttgccctgtggcctcccatgtcttggcagcttgaatttgatgagataattgtaataaaagttttaaaaaacaaaatggaatattggtgccatttagtgtgttccagcaagggcaagaagcctcaagcagggttcttccccacccactgcagagaggcatgtccagggctcaaggggtccccttgagggtgttcctaggactgggggcaacgctggcataaatgtaataatagttccccaaatttacacagagttggggtttacagtgggtttctgtgtctgttacttcactgcaggtaggtaggcgttacaggcattggcggaaggggaaacagaccacagaccaagaaagtactgcagctgccccaggactgcatgtatgtccatggcagaagtaggcaagagttctagaaggagaaactgagaccaagaacactttgtgactgtccaaggggagatggaaatttgtggcagattaggtaggctttctatggaaagggacaccgagaccaagagcttcgtgacttccctaggcagcatgcagagctggtacaagggactggtgacccaagtcctcctgagcctgtgtccccctgtgcagggggagacatcagcattactctttgccattgtcagagcacttccacagacattgtctcaagaatgtgcaccataagccaaggaaataggccaggtgggtcttcattattcttattttgcaaagaggaaactgagggcagcataaatgaagtggctggcctgagatcacagaatgaagacgaggttgatttaacattgttgttgattcattcattccattcctacttccaaaaaaagactggaagttgctttg

SEQ ID NO: 37945 - DNA, 2300 bp, Homo sapien
tggtctaaggggtgccacccctgccctcaggagccaggtctgcaggagaaacagtttgccctccaaaacttcaaggtgaggggatcctagccctgcagagagagctctggttggacgcccctgaaactgaccagagagctcctcatgtgggtcagtgtccctgccagggcatggggccaggggccaggggccaggggcatgagggagcctcccagagactggaatgctgagccagggctcctcagaggaaaggatgtagaggagggcccaggaagtagcccagtggggccagtttcctctcctggacagctaagaaagtacttatgaccttcggccacctgggctgtctgagcaggcagggcctgctggccaccaccgtcctgtacaggcacttaggggaatgaatcttccccacctgcagccccagcaaacacacaccaggctggtccctggcaattcaccccaagagccaggccacagctgggcagaggggtggccagtaacagctggtgtcattctctgcaggatagcccctggacaagaggcataagacccactcatccttgccctgccccaggcacacttagaaaagtcctctcaccgggcctcagtttcccacctataaatgggaagatgccaacacgcccgagtgggactgtggtggggcaggcaggaggtgggaggagagcccagatcatcccaggccttccctaggggacgcagggggaccctcccttctgggcctggttcttccagcacgttccatgcagcaggcaagagggccaggcccaggggttcctgacagcttgctggccctggagtccagattcttgtttgttggctggcgctaggcctctggattggagatgcccggggcacaggcggcccacggggatctgcagcagggcctcggcccctccctctgcaggggctcgtctggtccctcccgctctctgcctctcctcatttatctctccctttctgcttcttggctctgggtccagtcctatctcccctgtttcagtttgtcttttcctagccctttgcgctctctctgtctctctcagccctgcttgtctcactgtctctggctgggggatctgtctctttcacttccacttttgctctatttccctgctactgtctttcctttctccttgtctgtctcttctcctcccctcagccagcatctgtctgtctctgcctttctctcctgctccctccctccctcctctccagcaccttccaatgccaggtggggctgccattccttccaccttcccagtgacccgccagtgtgactgccttgagaggaaagtcctaaactgtccctatcttcaccagcctgccctcaaatcattggttcaaatcgctgtcgagaagtttgggagctcccagggcgggggctttctaacagctctgcctagctcgggcctgccctcaaccgcagcatgcagggcagccacagacaacctctctgcaacttctgatgcctccgtgcccccatccacagagccctggctctgggggactggggactctgggacatccctaacatggcatgcagtggcggtgcgggaggacttgactgcccctctggagccctgggcccggggactccaggccagtgcctctctgggtcgggatggggatgtcaggccagcaggatcatggtacctgcctccagggagggcaacgtccacccactgagtccagcccgcccaccccacccactccggagcacctggctctgccctcaggaactccctgagctttgcacacagggccgagacacctggatttctctggttccctgagtggggccagcttggaagaatttcccaaagcctattagagcaacggctgcctcctgcctgcctccttgggctgggcagggctgagggcggagggagagagagagagagggagggggagaggaggaaggaaaaagttggcaggccgacagcacagccgtgtctgcatccatccagaggaggtctgtgtggtgtggggcgggccaggagcgaagagaggccttcctccctttgtgctccccccgccccccggccctataaataggcccagcccaggctgtggctcagctctcagagggaattgagcacccggcagcggtctcaggccaagccccctgccagcatggccagcgagttcaagaagaagctcttctggagggcagtggtggccgagttcctggccacgaccctctttgtcttcatcagcatcggttctgccctgggcttcaaatacccggtggggaacaaccagacggcggtccagga

SEQ ID NO: 37946 - DNA, 2300 bp, Homo sapien
gcagaactgtgagccgcaataaacctctttttaaaaatataataccaagccttgggtattcccttatagcaatacaaatgtactaacacagaggttcagaaaggctaaatgacttgccaaatgtatgacagctagcaagtgatggaggcagaatttgaatcctgagtgtatacagaattagctagagaagacagctccatgaagaaacaggcctgcagggatccttggggaacatgtacagttagagcagggtttctcagccttggtcttattgatctttgagactggataattcttcatatgatcaagggtgggggcatcctgtgcattgtagatgcttaatagcatccctggtctctactcattcgataccaggagcaactcaccaccccactcctcaccctaactcctagtttttattttgataacaaaaaatgtctccagacattgccaaatgtcccctagggaagcaaaattgctccaggttaggaaccactcgtttagacagtaataactattattaattatcactatcaacctcaataattagccatcattaatgctaatgatattgatgctaattatcaacagtgattaatcgtaagacttttttttcctggtgctgttgcttctttgtagctgaggaacagaaggttctagctttcccttcaagttataccttttcagcactctgcttttccaacccgtgagctctcagcctgccaagagaggagctctgctctcccctaaaagtgtaaaagtgtgcagagctctgtgtggcatgctgcttgcacccatttcacagttaagctcatgaaaacacttgcacaggataggagggttttggagcttggggtggttcatgtttttgtttcgaaatatttttttttcagtattttgttgacaatgaagaaaaatggaaaaataaacccctgctgatgtcaaaataagccctaaatccagatgtagcgggggcgaggagccttcaacattcatgatgtgatcgggctgtaaacatgtctggtgttctagcacgcagcccagcagcttctgtgagtggagacgtgcacacaaacatcaggacctgtcggctactgggatattcaggtctttcagaggtgacatctttgacatttcaaagtgctgtgcaagatccaggggcatttagaacactgtctttagcctggccaatggagaccctgcattttaaagtctaaaactataataaaagtgaccaggcaatgaatgttcaatatagtttgctgtgtaagtcttctcatttctgctaccgatgagagttgtcctccccctattcaagatggcttgacccatgaatccttcacaaggcttccaaccaacctcattttccccttttgccgtgagagttttggagagattttgataagcccccatgtgaaatccagagccttgatgcttgcagcttcagctcaccatccaggccagcgtccttgcccagtaaaggacccaggtcttgctgaaatgacacattcctggccagcccatgccagtgcttacagatcatacttcctttcctaagaccattccaaccctccatctccactaataccatacccttccccttccccaccagttccacacagctctgacctcactctccagccctgtggatgaggctaggagcacacatcaaataacctgggagcttcccaagggcaggcccaggtccccttcctattctttaagatcccatcaatctgaggggtcactccaatgatggccaccagagacctgggcttagagaagaaagtggtagagaatattgaccaagtgacctgtggctgtcacctctctgggcccttgctatcaggacagacacacaagcagacttatagccagagtagaaggcgatgagggtgggggctcagcccctgcctgctggaaacagagtcccacctcagggtcaatgctgagctgggcaggtgtcctgcaatcctggtgaatattcagcggtctgtgtccccttggctagctcctgcctatgcaaacagccacctgagaaggggaagcagagggtgcggtggaaacggctgtgtcaggggacagcaggggaaggaagatagccaaggcttactgaggctggtggagggagccactgctgggctcaccatggaccgccggatgtggggggcccacgtcttctgcgtgttgagcccgttaccgaccgtgagtagccagctgagaccctctggcctctgccactgggctccagatttgggagccacagggccaactggagcctggcggagaccctactgccc

SEQ ID NO: 37947 - DNA, 2300 bp, Homo sapien
gaaactggagaaccaagagtacggaaagagaataaatctggaactgagtgctgaacttcaaagtaggggggcctctatctggaagcctggccatccacattcccaggatgggctggtctgccatagatgaccttgatcttcacccttcctctcactcccaggccctctacgtcctgcactctgagtccctcttgactctgagactcctggcagcctcctttccctcacacttagtttcacagtttatagagagtttttatacacatcatctcatttgatcttcacaacaccagagttggaggcagatgaagaaagcggctctcagctctcaggggttagggcaacaagctaagaaggggttagccaggattaaagggaggtcctgtctgtgtctgattttagcacagcacctggcccttttctctccattatttcttctctcctttctcttcattctttcttgatatagataagactgatattctcctccaccaggaagctctcctggactgaaaggaacatgaaccaatcagactaccagtgtgttgtgtcaatgggggtcagcggtcattggtcagtaaagagaaacatggacctaggaacctccacgcgtctttctgggccctcagattgcttctttcaagtttccatatggattcctctccatccacaggtcctttcctctttggtagactggcgaccccaaaggaaggctcaaggctctccctcctccttcccccttcttgaggcctcctggacaaggtggccatacctagaacttggacccaaagggaagctgagcgagaatttacttgaatgggcaagaacagagcctggctgcagaactgagagctctcagagactgacgcctgaggcagggaccaaaaaccgagagcagaggcaggcaggagcagctgtgggatgggggctgggtggggtgggcagagggtgagaacttgcctgggagtgggtaactaactactctcagttaagtttgggcttcgctgccaacccgctaggccacctttacctgtgtagttctccttattaagccatttgcactaggaggaggttggacaggactgtaataacagtagcaatagtaatttattcagcatcggcgaatcaatgataccagggagaaactactatggggtgagtgtaccatttttatttaatgctgctgtgaagagacctgggggccggtactattgttcccttgtgcagatgaagaagctgaagctcagagaggctgagccacttacccaagctcacagagctgtggcacagcagggactggagccaggcagtctgatattttaagttgcctctgtcctgtaagcaccaccatccccttcctggtctttctccgggggcgggggggtcacattggaggacatcccgacaggcaccccaaaactagctgaccctcccaggcctgggcggtaggggcaaagaagagcccaaggagggtctgagacttgcctggtaaggaaggcttcttggaggagagggaagacaggctctgatacacaggaaatcttgaggacctagggagaagaaagaaggctttctagtcctggctatgatggagagactggaaagagggtggtgagcccaggaggcccagagtcagaggagacggggatgacagggggctgagggctccacctcagcgcccccgacccccgccgctgggatttcccgccgcagctcctgctccagtctgtgctgcgggtggggtcgggttgagcagcccggcgccccccaccgcgccccccaccgcaccgccctcgatctaaccccgcccccgggcgctcattggcctgcagcaccccctccccagcctgtgaagtgagcagggggaggcggtggtcggtcgcctccctccagcgcccagcctggcttcgcggcggaggcggcgcctctcccgcaggacggagccaagctggactgccgcgccgcgcggggcgggcaaagggggcgctgcgctcggccccgggcagggagtgacggcggcggcggcggctccgggcgagcgtggtccccgcgtgcgcacacgcacacgccgccgcgcagggacacacggaccccggccgccagccggccacacaggcgcggagacccggctcggcgcgcgctcctcggcgcacacgctccccatccccgcgccgcgcgggccgcggacttgcaggctgcgcgtcctttgcggagtctgccccggccccacggacaggccccgcagtgagcaggtaagggtcgccccgccgcggctgcccctccacgcctcggccgtcttc

SEQ ID NO: 37948 - DNA, 2300 bp, Homo sapien
cagcaccaaaggtttttctttcgtgttcaaaggcaggaatagcacagcctcaaatgtttttatcgataaattgcttctcatttttctgcaaatgccaagataaaatataaaatctaccctttcaatgaagtacatccatggtaattttctactggcatatcatgtcatctattccttggattttgattttcatgtttgtgatgcctttaatacaatgcagcttttggagactttgcaagtttagaatatggtgcaatatacaaaattcaagacagcactggctgctttgtggctcatgactctgatacttacgctcctttacatttaaaaattaaatcatatgggagaccaacaaaattctgcaactggccttcctatagaaattctctatgctaatataaaaactgtgtgtacttcttgaattaaaagccatctgaaatatactcaatgcacccattaccaagtaatatattcttaaacaacaaattttacaatggctatggtatatctggctttttaaaaaacagaagctaggccaacctacctattttaacttaggagtttatagcctgactcttattttaaatttgcattttttactgggccattaagagagaaaaattatctgcttttacatatttgattctcctttttgccagcttccccaacatttctagaactgtccaggaaaagtcaagcaactttttgaagaaggtggaaatgagtggggtatgacagaagcaaaattgaatttagtgtgaggcccttggtgccaatttggatccaaagtgcattaaagcagcagaattctaaaccttgcaaaactgggatttataaggggaatgctaacacagattcaacagttacagctctgcagggattactttaataccaaaagcatactctctcactttatagaaagagattactcagttgccaaacaacaaaggttgcgtttatttgtttattttaaaacttttacttattttttttaagtgcactttttactttactggcaggcaatcctgaaatcaaatgtcctttataggggtgggggcacgggagaagagaaaacaggaggaaggtggagtttgtctctgcctccacagttcgtattatctataaggctttgccagctttgcttaactgtttccaccctgcttttgttaagaagaaaccaaaagtgtggagcggggaaaaaagataaatctgaaatacacctgacagggaaaaacaactggacactgatacaagaacaagaagatatttaaattgatgttggtctagagaaaaatgtgaggacaagatttttaagagaaagaaaaaaatctgaaagtcaaaaaaaaagaaaaaaaaacaaaaacaggaaagctaatctttgattaaaatactcagcagaatgtcagggagaggaagacaaacacctaagtgataatttttatgtttattgtgtctgaaatgaaatgagagggaacaagcaagttaacgctgggaagagataagggacaataaaagagtgaagttagtgactttctgcagaggacaaagtatgtagtttgaaatccttaacaacggacttgcagtgtctctgcaaaagttggtgaaagataccagcaagtgtaggaaggggagtatttgaggatgtctttcacagaccccagatggagaagctgttcttttattccaaatgcctaagaagcacagaagtcttacatgttaataagagaacacagagacacacactcataagttacacgctgtgaaacaaaacaagcaaaggagaccttttttgacccctgttcacttacacaaatcttagtttggttaaacgtcttaagaccagtttccagctccttttcacggctttctttccctgggtacccaggtgcacaaatgggatggtgatctttacaaaacaacatcatcaacaacaaaaaaaacctcttgctcacacaaaagcccaccttgtaaatgaatggaatattaacgatcacctaatacttgcacctttggcagggcgaaactgaacactaacacagctatttctacagattgccagtgaaaccgaagcagttcgaggagaaatgcacctactgtacgtgaaatgctggtgcagatttttttcctatcagtctaaccttctgtgttgatgcatgaaggctggtacccacttacagggatgccagatgatcagtgcagaatgaaggtcccaagagagaggatcacatggctctctctgccctgtgacgtcactagcagatggcatgggtaccagctctggcagttggcatcaatgtcac

SEQ ID NO: 37949 - DNA, 2300 bp, Homo sapien
ctgctttctacagcagtggttaaaaaaaaaaaaagaaaaaacagagagaaacaagttgtggtatgtccatgcaatggactagtatgtagccactaaaaataagtcaaatggagaccagcctgaccaacatggagaaaccccatctctactaaaaatacaaaattagctgggtgtggtggtgcatgcctgtaatcacagctactcaggaggctgagacaggagaatcgcttgaacctgagaggcagagtttgcagtgagctgagatatcaccattgcattccagcctggacaacaagagcaaaactccgtctcaaaaaacaaaacaaaacaaaacaaaaaagagtcaaatgtatctacttggacataccatgatgtccagtacgtgaaaaagcccagaggacaaggattggcaacaacttgatgtgattattacattgtaagattgaaaacgtagggatatgaattttcacttaattttatacacattgtattgtttaaaatgtttgcaatgagccaaaatgatatatttcttatctacagaaagaatgatggaaggagggaatgtgaagagagaatgagaacaagagaatgaagggagcagggaacaagcagctctccaaaatgttgtgaagttttaacgaggctgagcttctgtttcatataagatgataaaagtactgtgttaggagaagaaacaggctagatatttgtacctttcataatagtttttttttgccaacaaaatattaggttattaaacattgaccttgcagcaaattaaatatggtattaaccacattaatggttaataaataaatatggtattaatgcccaacttggacgaatttcagtgaatcacagagacacataggattgggtgaggaaaggaaagagaataaggctagaagattaataataaaccctctttgtaaaacacagtatataatgtgcataatcacctggatgtcttattgcacatttaggtttgttgaaggtttctgcgtgtgtgtgcatgtgtatgtatgtatgtgtgtactattggttctgggaaatatggaaaatattttcagagaaaagaactaatatatcaaaccttagactctataaaaagctgacccaaattatacaatcttgtttattatttcaactacatgtacaaaattcaattatgactcttactgtctaatttaaaacacccttgatatcccgcaaatctcagagaaatcccagggagggtagtagacaatgtggctgagttagagatgccatagctcaggaagagaaacggcttgctctaacagacacagataatagttggcagcacccagatttgaatgtaagtctgtcttgccaaagcttataaacttaaaaaaaaaattgtctgaatacaaatagtacatgcttagataaactcaattagagcctatgtgtccatttgcactttctacaacagaagtttttaacagaacctccaaagtagtgacttctctgtgacaagatgtgactggtaccagaaatgtctttctcagaagttgctgtgatattgtggccagaagtggtgggttctcggtctcgctgacttcaagaatgaagccacagaccctcgtgttaagtgtcacagttcttaaaaatggtgtgtccagagtttgtcccttctgacgttcggacctgtccggagtttcttcctgctggtgggtttgtggtctcacttcgtggtctggctgactttaggagtgaaactacagacctctaccgtgttacagctcttaaaactggtatgaacccaaggaataagcagcaacaagatttattgcaaagagcgaaagaaaccaccattcccagagaacaaagcaaacctagcagatttcaggttttggttcgggtggcctgcttttattcccttatgtggccccacccacatcctcctgattggtccattttgcagagagctgattggtccattttacagagagctgattggtccattttacacagcgctgattagtccattttacagagagctgattggtctgttttggcagagtgctgattggtgcgtttacaaacctttagctagacggaaaagttctccaagtccccatcctcccagaaacccagccggcttcacctctcaccaacagtggctgcgggactttccagcacctagcctgggcattcccacagcccagagggagctcgtcccagacaaccaagaggaaaagaagggaaacaagaaagagatggagacccatcattgtggccaacgaccccacgaagagggaatagcggtccacgcacgg

SEQ ID NO: 37950 - DNA, 2300 bp, Homo sapien
tggctggctgtttggctttggacatgcaacttaatctctctggtcttcaatttaccataaaattgtgacaattatattacttccttcattgacaattaagttaaataatgaatgtatagaattcagcatagaatctagcacataataagtattccactgaggttaacagttattaaaattcggtagagtgtatcgccagtttagaaataagggaatgcagaaaggttctacagtttatgtgagggcacacaacaagttgcagaaatgagactgagccaagccaatctgttgccaaagccctcatttttctccaacatttgggcctcaaaaataattttatagatataactgttaggtaaatttgaaggctatttactgggtgtgtcctcaagtctaatttctttgctctccgtccacatcccagaccaccaaagtgaaagtgcagagtgcgcatgtggtctgatgactggcatggccacttgagtcccaggctgctttgccttggagagggaaggaagcatttcaccaaactgagacagggagcttggctcaggtgggtgagccaggttcatgtatgactgtgaagctggatcattcatctgactgtaggcattctggccttctttctccctttcactgagccaagcccagaagctgaactcatcgtgtctgatttgtttgtgtgtgtgtgttttaagttagtttgcagaattactctcctatgatggcacagaaatcacaaggatctgacaaccttcaggaaggccaggaaaagagcaagagagagatcctgaagtgcaccaaaagcgcgtgggctccgctggatgagtggctgccccctgaccctgaggaggaaagccagagtctcaccatccccatgctgggtgagaaggactctcaggcctatttgaaaacattcctctgtgagtggtgagggatgtgggagcttttggccaggggcaggtgattttggaacaaaagtatttggctttgaatataccagtgttcctggcatgatgccggaaacatttatgaaatgggcacttctgacttctgctatagacatcaggacacagacctccttgaaagaagtagaccaattaatgaatgaactctgcttcctttccactccaaacatccctcatcctaagttcccaggactttgaagctgtgtggggtctgggcatgaggcttctttcaggtcatcaaacattttattgaaaaactctgatttgttggatcctgcaggaggcattgacaaaaattttaatcatttaaagagtaataagtaagaaaatacttccagcactccctgcccccattatgtaactgttgaatggtttttcttctttgcccattgcccaattccttctaacttcacagcagttcaactgaagaacaatacagacctcctgtgtccacctggcttttatggttcacctgacaccttgtgagggagataattcaggcacttcactatttgataggataaagtcaaacaaaattagcctagagtacacagttgctaagcagaatggaaacaaatatttaacaggaaatgctgctttacatcctctcctttttacctgttgactatttgttgagccaatgataaagatccaccttaaaagactggtgcctttttaacacagggtgcctttggcaatccagggactctagtgcaatttgtccctggaatgaatgcaaatttggtttctaacctggcagagaactccttgcaaataaccatcactggctggctgccttaggtaaatgtgattcaataaggagaggctttgtggtgatttatatccaacaagagaaagacaaaagtctcttatgctttctcaccctttgtattcacaccaggtaatttaaaaattattctaacatctctcgttcttcagtggtttatttttcttctctctcacattttctttctttttttttaagttacagtcttttgacaagtttacacttcattctcaggaaaggctgatcatggaaaacaggagattttgccttcaggaaaaaaaatgaatatgcttatggaaggaaacatgtgactaaatatgtgggaaatagtgactgagtggcggctgagtaaacagggtagcatccttttagctggttgtgctttgactaactgatctgttctttcttacttgtagaagattccaagcaagaaagtattcagcagtggctggactctggattcttgtaagtgtttttgtgtgtgtgtgccttacatgtttctcttgcaaagatccatgaaaacaatgtgtgtaactctgcctggg

SEQ ID NO: 37951 - DNA, 2300 bp, Homo sapien
aagccaaacccaaaaggctacctactgtattattccattattaaaacattcttgaattgacaaaattatagaaatggagaatagattcatggttgccgagtttaaaaagtgattgggagcaggaggttaggaaggaacggaggggggcatggctatataacggcaagataagggaggcttgtggtgacagaaatgttctgtatatattcatgtaaatatcaacatactggttttgatattgtaggatagtttcataagatgttaccattggatataactgcttacgtataggagatctccctgtattatccctcacaacgacatgtagatctattacctcaaaacagtttaattcaaaagaagaattcaaggatttcagaaggaaagtatatcttttccactcaagtgtggactgaagatgctgctaactcattggccaacaaggctgttgttaagaagataaagtaaggcagggtttaatgcctaggtgatgggttgataggtccagcaaaccaccatggcacacgtttacctatgtaacaaacctgcacgtcctgcacatgtgtcccagcactgaaaataaaataaaatttaaaaaatgaagaagataaagcaggcagttttgaacacagacctgcttctaggccctgtccctcaacatctagggccttcccttcctagacaagagcatcacctttcagcaaccctcatctcttcccaggaggtcccaataaggatcaacacaaaatggaacaggcaaagaagtccattctctgcttatctgttaccatggcaaaagtctaaccctaggagtcaacctcttggtgagtttactatggttctagccctgttatttgggatcctggcaagtgggagggaggcaccaacaaacacattgccagtggcaagcaggcagttgaaaccaaggggttgccagggacctgctctgcagggaacctcaggtaagactggaaaaaatatggatgtgtggatggtgctcacgtatcttctgtgagaacatatttcttgggcatcactgggtggtccattggctgctatcagggggtctggagcccttctagtgggtcctgatacctacctgatctcccagactggccttcctgctttggagtcaaaactgctgctcctccaaaccccagtgggctctcctccagtgagcagacccaaaacatagaaccttcctctccaaaagacagcatgtctcccgcctctcccaccttgcttaaacatccactcttgagtgcctacgtattcctaatattggtacatttggctttgttcctttgaaggaggaaattttttctggcctgcacactataacctatagagttgggggctgctttctttgctatgtgctgtttgaaatgctctctttgctgagaggtattgcaaagtggttacaagcgtggaccctagcatttcattaccccattcaaaccctagcttcaccatgtggggagaccttggtcagatgatttggtaactcttgagccccagcttcctcatcaataaaatgggatgatgactgtagctcatctcacaaggttggcctgagggttaagtaagtagatatgtgtgaagtctctagaagagtgtctggcattttggtagccttacataaatgttagcagtagctacccttctcttcctcctcatgatagtactttgagaagcagcaatagtgattgaaagtactctggatttaaacttaaatagctttgagagtcgaaattagctgtggcctctcttgggcatatcacttaacttcttgtgcctcagtttccatatttacaaaatcaggccaaaaaaaatctatcgcatgggaattcaatgatgtagctggtttgtctgaatttctctggtgtgcacaccggaaactcaaagcacgactctatactgtacttttgtaatgtacaatgattgccgtggagagcagcgatggagatgttagtcctctttccttctccatcccccttgccctggtgcctgtgaaacagagcatccccatggcaacagcagcagctggtccctagataagaggagctggagccggccagcagcagccactgccgcagaggagccaggcccagcctcggtgagcacacacgccctccctgtctctcgccttcgcttccctgcatctgcgctgattggtaagtgcttcagatttttactccaagaacttttgtggtgagaaaagcaagtttccagtcagttactgggacaaagaaggctgtagctggtggcacggggttgtgctttatggagcaaggctaagc

SEQ ID NO: 37952 - DNA, 2300 bp, Homo sapien
agatctggcaacaaaaccgtcatctccattgcaaaagaaggtggcttaatatccctactgcatgaccaaatgtttgctaatctagtttacagcaactattaagatttcaaatgtactgatattacagttttgcactgacattttccccttatgaatagaacaaatcttgttacaagggagacagcaatgaccagtatggaaatgtttaattggttatcccattttttttggtcccctagatttccttctcctcagacttggagggtggaggtgggcggggggaaaggcagcattgacacttttctttttctttttctttttttcagattcacaagagtaaaaaagacctcatagacaataaaagaggctgccagtgtcttgcatcattctagctgagcttcttcattctccttcttctccttcttccacaaagacccatatctggagaaggtgtacaactttcaaacacaagccccccaccccctgacccttggccttccctcacaccatctccttccaggggatgaatctttgggggttggtttgaggtcttagaactctgggggatattcccctgagcaaaacaaacaacgtgagatttttactcaaacagaaacaaaacatgaaggggcatcctcaaaatcctttgctaatgacctggctttcaaggcatctgtctggcctgatgagaatggacatcctggatatgctgggagaggcctgaaaaaagccacacacacagtaattgccattttatgactgtcaatgccgttactttaaatgttgtcatttttgcactggctactgatgatacagccatgctgacattcatcaccgcaaagatgatgattccagtctctggttcctttcctgagtcaggaacatttgttttctccaatttcctttcagacttaaaattgttcttatgctttttttcccacttctgtaatacagaattctgtttgttttctaaaaaagattattctataggaatctttatttgatggctaatttattttctctgtgcattcattagtataaacctgaatgttcagctggtgactgtactgttgagtgggaacccattgtttccactggtagcattgataactaagtggttactgaaatttttaccactggctggacatcttcttttggatatctgtggttttatttcatcactcttctttttattcagtaaagtgctaagggaattagtatcagggagatatggcagataattctttgcattttagtgagtttttaaaaatacaagatagaagtggattaatagcacgaataaaaaataagaatagtagatgtagcatggaaagagaataacattgcagcccccttgagaccaaattacaggtgggatctaagggagtgcaagtaaagtgggattttatgagtctaaatgatgtgatttagataaaagtgattcttaaaatgtggttattggtcacacaggaatctctgagtccttcccaagagtgaagcacatgaatatgctgatgatgaagtggggattagtaatagaaagagagctaggcaataggtttaagtgtattccccactacagatttaatttctacatgaaaaagcacgagaacagatatttaaacgtccttttattactaaggtgaaatattggcattttttcaggcagaaagaaagagactgtatgtggtcttcctggacctttgccttgccaaaatgttccccaacagaaagatctgaagaactttgtagtatcgaatgcacaacagcatgctgatatttgaacagatttcttctgtcagctttacattttgccttggagaaacacttagatttttctgttgtgctccctgtgttcataacaatgacctcaccacataatgtggccagaaattcaaatgacttcaggggcctagcaggtcaagtaaatgaataaagcaagccatgtaatatcacagtcattgtggtaaatggcaattcatagtgggcctttgtatcagcaagacaggaaggagcaatggggactgtgagaaattggagagggtgggtgctgtcaaaacagggtagttggtaggcagcaactgaatttgagctgtgtggggatgggggtcctagatacctaggatttgatataagctctctccaaatttttacatattgacaactaactcaaaaacttacaaacactgtgctaatcaaatgaaacatgcctgtgagctgcattcaatccatggggcattggtttgcaagctatgttcttagaggtggtatgattttgtattgaaattaaatataaccaa

SEQ ID NO: 37953 - DNA, 2300 bp, Homo sapien
aagtctctccagatgacctcaatgaatcataaagctgaaaacaacataaaaatatttttgcctaaatgtatcactttatagatgtggaaaatgggactctgtgagggggatgtatttgtataggataaggtaatcagccataactcaaactctggtcttttctagttcagttttctctctagttggtctaggaagcctcctggtgcttcagttttcttactgtaaaatggggatgataataatagtatctacctcatagaatagtctcgagtattacatgagagtagaacacttagaacaatgcttgggctatggaaagtttctgacacttgtttgctgttattatcattattgtacttccacatggtgccagcaggctgcccaaggtgcacacactaatggaaataccccatttggggaccatgctgctgtcttccattctcaaaacacgtcactataaaaatttcctcttgtgacattctatttccccagggcactgtttctctgctgggtgacactggaagggtaattggttttattcagatagatgaactccatgttaaaatattgcttaatgttaccattgcctagtaataataccttaactcagtgaaaatatatgcgcctccataaaccttaaaaggctgcctttaatggggcgacttcagatttacctggcaggtgagtaggtaagtcgtttttcatcaaacaggtcttttgtcttaccttgagttactaccttctctgctagaatgcatggggccagccaagcatcctcatcactctcacctctaagttctggaaaatgaatgccaattatgaagtgggtgagcatttatgatttagagaccattttattcctttgttaaggtcaggtgaatggaactttacttgagcagtgaagagaaactagtcctcacttctaagtttatcatgcttttgggaagcaggtaatcatctaatagataggaaaataattctgagagtgtgatggaaagaagtattacctgtcattgaggaaaaatactgtatagggcatgccccaccctgaatctcaggaaccctgagagccaggtttgaaatagcccctggtggtggcttcacctagaaggaagtttgacggacccttctgtgatgtcgcttgcaatcatcttgggcatggattcccccagtctttggttcctctcttcatctgtcctccctccctgactcccaacttcatacctggtcccgttcttccagagcattctaccttattgacattgttcatgaactaggggaaccctgacagtgagttgcagctttgtggagctgaaactttgtcaccatccacagccgcccagccagcacccaggagggaccctcttgagtagcgtgtgatattgatctgaagaaacttacctcctcactattggtatattttctccttttcttccgcacaagagagagagatgggggtgggggggtgaaagggagggagggagggaatgagggaggagagagagcgcgagcgagagagcccctttagcaagaaaacatcaagagtttttgagtgtggtgtgtggttcccttcgtccccatcagtcgcttcaatatttcaaaatggatccggttctgtggcgggtgcgagagtgaggctgtgggggacctccaggcccaacctccgcgaagcctcgcggcttctgcgtgccctggccccgggaggataaggatttcccttccctcctacttgcgcgcggagccgagctcttgttgaggtgagggttccggaagcccacgcagctccgcaggtcggtggtggccgcggctgccctgcgggggtgagtgtgcccggccggggtcggagcccagcgtgtgcccggcagacggcggtgcccgcgcgcccctccctccgcgcccgcggtgacagcccagacaccagcccgggcgctgacagacgacttttctcacttgtcagttttctcgcttgtcagcagagctgctggtaagtgagagaaaacagaggggcgcgaaggcaggcgcggccagggagtgagcggggcgctgggcgcggggcggagccgggtgcgcggcgtccgggtcaggccccaccgcccgcgccggctcccgctttgctcagccgccgcttttctctcccttctcactttctctcctccccacccagccctccttttcacctccaaaccctttagctgcgcgctgatcgcttctgtggctttgtttgggggtagggggagaatacgaatagacccgaggtgctttctcttggagctggagtccaatcccaatccctatctcta

SEQ ID NO: 37954 - DNA, 2300 bp, Homo sapien
actctatctttattttttaaagctgagttatgcatttgagttccttatattatttaaaataaaatattctgttgcttcaaaaatttgaaaacctccaaactgtgttgtcttttgggctccttcctgctctaaagactattatggctgtagataaagcaaagttatatttttcctgactttctaatacacattaattttgtaagaaattttctcaaatgaaacaaaatctagcttcaaaaacttaaaaaaaatgtttttgctcttttctctctgatttgcttaattgcagcaaaagtcgatttctttcctttttcttccaaaatttgcttttctctgacaatcaaaattccactaagagtaggaaaaagtcatagatgtggtatggagtgaaaggtaagtatcatgcttaatattcctttgtatattttcatcctaggccagtacttagagaaactatgacatagttaaaatgtgaattcagcattattcgtctctcttttcagcaatttctttttccaagtctctccagatgacctcaatgaatcataaagctgaaaacaacataaaaatatttttgcctaaatgtatcactttatagatgtggaaaatgggactctgtgagggggatgtatttgtataggataaggtaatcagccataactcaaactctggtcttttctagttcagttttctctctagttggtctaggaagcctcctggtgcttcagttttcttactgtaaaatggggatgataataatagtatctacctcatagaatagtctcgagtattacatgagagtagaacacttagaacaatgcttgggctatggaaagtttctgacacttgtttgctgttattatcattattgtacttccacatggtgccagcaggctgcccaaggtgcacacactaatggaaataccccatttggggaccatgctgctgtcttccattctcaaaacacgtcactataaaaatttcctcttgtgacattctatttccccagggcactgtttctctgctgggtgacactggaagggtaattggttttattcagatagatgaactccatgttaaaatattgcttaatgttaccattgcctagtaataataccttaactcagtgaaaatatatgcgcctccataaaccttaaaaggctgcctttaatggggcgacttcagatttacctggcaggtgagtaggtaagtcgtttttcatcaaacaggtcttttgtcttaccttgagttactaccttctctgctagaatgcatggggccagccaagcatcctcatcactctcacctctaagttctggaaaatgaatgccaattatgaagtgggtgagcatttatgatttagagaccattttattcctttgttaaggtcaggtgaatggaactttacttgagcagtgaagagaaactagtcctcacttctaagtttatcatgcttttgggaagcaggtaatcatctaatagataggaaaataattctgagagtgtgatggaaagaagtattacctgtcattgaggaaaaatactgtatagggcatgccccaccctgaatctcaggaaccctgagagccaggtttgaaatagcccctggtggtggcttcacctagaaggaagtttgacggacccttctgtgatgtcgcttgcaatcatcttgggcatggattcccccagtctttggttcctctcttcatctgtcctccctccctgactcccaacttcatacctggtcccgttcttccagagcattctaccttattgacattgttcatgaactaggggaaccctgacagtgagttgcagctttgtggagctgaaactttgtcaccatccacagccgcccagccagcacccaggagggaccctcttgagtagcgtgtgatattgatctgaagaaacttacctcctcactattggtatattttctccttttcttccgcacaagagagagagatgggggtgggggggtgaaagggagggagggagggaatgagggaggagagagagcgcgagcgagagagcccctttagcaagaaaacatcaagagtttttgagtgtggtgtgtggttcccttcgtccccatcagtcgcttcaatatttcaaaatggatccggttctgtggcgggtgcgagagtgaggctgtgggggacctccaggcccaacctccgcgaagcctcgcggcttctgcgtgccctggccccgggaggataaggatttcccttccctcctacttgcgcgcggagccgagctcttgttgaggtgagggttccggaagcccacgcagc

SEQ ID NO: 37955 - DNA, 2300 bp, Homo sapien
tcataggttatatttcagaaagcttttctgttaagatgattaaataccaagttttaatttcactcacttacgcaaggaaaaatttccattgcaatagactttttcttttttcttttttttgataatttactacaggagactcagggctttcaggttcctcagctgaggacttattttggcacaaaaaagacatgtgcttcacttaaaagcttgggaagatgggagaaatacagggaaaggggaactataagaaacctttggtggttactatattaaaaaatacataatattaaggtcaggcatgtgtctcattcctgtaatcccaacattttgggagatggaggcagagggtgacttgagctcgggagttcgagacaagccttggcaacatagtgagaccttgcctctacaattttttttttaaagcagccaggtgtggtggcgtgtatctatagaccctgctactttggaggctgaagtgggaagatcacttgagcccaagaggtcgatgccacagtgagccatgattgcaccactgcactccagcctgggcagcagagtgaaacactgtctcaaaaacaaacaaacaaaaaaccaagcccacattatattacatgtaatatattatatataaaatgttacatataaaaattctcttcacctataaaattaatggtggcaacaataactaaaatacgttatttttgtcacagagaagaattttccgtgcagtctacatagtaagatctgggagtcagctagtgattgcaataactggaagcatacactgtgcctaggttttatgcacttactcctacttaatccttattgtcagaggaggaaagtaagactcagggaggtcaaggccatgtagctggtaagtggtggagccagctttcagacccaggtctatctgtgagcagagccattttcatgcctccaggttgtaacaggttccaggcatgggtattacagtctcaaggactacatgatgattttgaaacacccctgactgcatgctgaaatatgccattctatgtggcatgaggttcatgacactgttggttgcctttgtgattaattaatctcgctaccaacctaaccagaccatgtgaatgtggttctaggtctttcctgagagaatttataactgaagtgtcaactacatacactctgacacaattccatttctttaaaaatacatggtgaattgaaaaagattaaattcctgggacatgcattaacctgggttccagtaggcttgggggttttaatgggccccctgaagttgtatgtagaatattgtacatgtgtgtctgtgtgttttttttgggacaaggtttctaatcttcattagattctgaagatatgtggagccattaccctctaaactgaactggaatcaattaagaatatacctggttgattcttattattggcaagtgttcgttaattgtgtcaaatttcatcacaaaaatgaggctaaattaattgtagtctcacaatagcttgagcacagaaccctcattccacattgttataccgtggactcttctgtgtgactcagctctggtctcttttcccgtgggcatctgcagcccctgatagcactgcaactgtaaatcctcaataattgcttgctgatcggtgggaaaaattttcccagtgtaagccttgcctaactcggtcatttcaggcactgcaaaggccaatggctaacttggcatcgtcataaagtgaaacttctgcctccaaagtccgccacttccttgtgtagcacttttctcaagccccatgcagcctcagtttcctcccctgtaataagagcgtcagctatgggattggtaagatatcttccacatcagcaaattccaggagtctatcacattgggcaaacccaaattcgaaaggacaggacaagctatttggaatggttggtaaggggcgagttctaattcgattgtacatttcacatcatagagcctccggtgactttgacaattaccttcctggcagggacagtggagaagaaacactatcggggctccaggccagtgctgggggcagtggctagaaggaagtgggcgtggcgattttcccgacttccttgtttggagtaaacttcggcaacatctcatggctgaggggtttgcctttccatctgttgatgtgctttctggaagctccccggtctgccagagaaaacatatctagaagacgcacgacgccaattcagccattcccttgggtccccaaatccccccagccaccagagacggaaggagaaggtgaagtagaaa

SEQ ID NO: 37956 - DNA, 2300 bp, Homo sapien
cattatgatgttagctggttattttgcttgttagttgatccagtttcttcctagccttgatggtctttacattttggcatgttttttcagtggttggtaccagtttttcctttccatgtttagtgcttccttcaggagctcttttagggcaggcctggtggtgacaaaatctctcagcatttgcttgtctgtaaagtattttatttctccttcacttatgaagcttagtttggctggatatgaaattctgggttggaaattcttttctataagaatgttgaatattggcccccactcccttctggcttgtagagtttctgctgagagatccactgttagtctgatgggcttccctttgagggtaacccgacctttctctctggctgcccttaacattttttccttcatttcaactttggtgaatctgacaattatgtgtcttggagttgctcttcttgaggagtatctttgtggctttctctgtatttcctgagtctgaatgttggcctgccttgctggactggggaagttctcctggataatatcctgcagagtgttttccaacttggttccattctctctgtcactttcaggtacaccaatcagacgtaggtttagtcttttcacatagtcccatatttcttggaggctttgtttgtttctttttattcttttttctctaaacttcccttcttgcttcatttcattcatttcgtcttccatcactgatatcctttcttccagttgattgcattggctcctgaggcttctgcattcttcacatagttcttgagccttggctttcagctccatcagctcctttaaggacttctctgcattggttattctagttatccattcatctaattttttttcacagtttttaacttctttgccattggtttgagtttcctcctgtagctcggagtagtttgatcatctgaagccttcttctctcaactcgtcaaagtcattctccgtccaggtttgttcagttgctggtgaggaactgtgttcctttggaggaggagaggcactctgctttttagagtttccagtttttctgctctgttttttccccatctttgtggttttacctacttttggtctttgatgatggtgacgtacagaagggtttttgatgtggatgtcctttctgtttgttagttttccttctaacagacaggaccctcagctgcaggtctgttggagtttgctaggggtccactccagaccctgtttgcctgggtatcagcagcggtggctgcagaacagcagtggctgtagaacagcggatcttggtgaaccgcaaatgctgctgcctgattgttcctctggaagttttgtctcagaggagtacccagccgtgtgaggtgtcagtctgccactactggggggtgcctcccagttaggctgctcaggggtcaaggacccacttgaggaggctgtctgcccgttctcagatctccagctgcgtgctgggagaaccactactctcttcaaagctgtcagacagggacatttaagtctgcagaggttactgctgtctttttgtttgtctgtgccctgcccccagaggtggagcctacagaggcaggcaggcctccttgagctgtggtgggctccacccagtttgagcttcccggctgctttgtttacctaatcaagcctgggcaatggcaggcgcccctcccccagccttgctgccaccttgcagtttgatctcagactgttgctgtgctagcaatcagcgagactccgtgggcgttggaccctctgagccatgtgcgggatataatctcctggtgtgccatcttttaagcccattggaaaagtgcagtattagggtgggagtgaccggattttccaggtgccatctgtcaccccattctttgactaggaaagggaactccccgaccccttgcacttcccaagtgagacaatgcctcgccctgcttcggctcacgcacagtgcgctgcacccactgtcctgcacccactatctggcactccctagtgagatgaacccggtacctcagatggaatgcagaaatcacccgtcttctgtgtcgcttatgctgggagttgtagactggagctgttcctattcggccatcttggctccacctcgggcccgctttataaaatttacatcacagtggtaggctcaggtgctttgatcgtgtgaacctgggcttaataaggtagaaaggttccaactctgatgtggcgacagatcatgacctcagtcctgggcatgcagcagggtttaaccatgtctccatctagtaagttggtgg

SEQ ID NO: 37957 - DNA, 2300 bp, Homo sapien
gtccacaaggacaaatgtctattgggaaaataataaaatttctaatttaactcgagggagaaaattagaaatgcctttctgaacatataatacatggaagagcctttggtagttacatgtattttatgataaattataaattctattttacgtcttctacttaagacttaaagggagaaaaatccttgagacatagagctatgacatattttcaagttcataacaactctccatttggaattggcctgttcttcctttttgtgtcttgcctcaggagagaaaataataaaaataccactccctgaaatccccattaactctactatgtaagtgaactatatatcgttccttttttcagattctaaagagattttctttattctttattagtggcattcaaaattgctaatgtttattctgttttttttttgttgttgttgttttgagatggagtctcactccgtcgccaggctggagtgcagtggcacgattggctcactgcaacctctgcctcccaggttcaagcgattctcctgcctcagcctcctgagtacctgggactacaggcgtgtgccaccacacctagctaatttttgtattcttagtagagatggggtttcaccatgttggccaggatggtcttcatgtcttgacctcgtgatccgcccacctcggcccccaaagtgttgggattataggcgtgagccactgtgcccagcctatttttctaatttttaaaaactctatcaaataacaacaatgttttgaattctcccatactgtcagtatggtatggggaaaataaaataggaatagaaaaggaaaaccaggaaaagaggtggttttcaaccaaatgaggattggacaaaaagaaaaaaagagaaagagaaagaaagaagcgtcacaaacaaatctggcattacttcgtatttaaaatcttatgaagagtaaggagaatgttgatgggtgtgaatgaaatagtgagaatcaatttaaagaatattcattaggcgccctacagtgtgcctgaaaatgtagtgtgcacagtgtataaaataagaaattgcttccttaaagtggcttatgtctggttataaaaataagatgaatgcaaaaccagctagcaatgctagctttatgtagcttcactctgagccagacatcatgtattagaaaacaaggataagtaataacagctcatgtttaaaagggctatgtgccaggtcctatgctgaccacttttcatagattatctcaattaatcttcacattaatcttatgagtagatactgttgtccccattttttccaatgggtatattgagacttaaaaagttaaaataacttgcccattgtcaaataactgaccatggaatttgaaccaaagtcatttaattcaaaatgaagaaatttaatcacgtaaactactgcttcccataattctcagccttgaggaactcagtctatgaaggaatgatgggtgcttaatgaccatttgttgtatgaatgaatgacgttctttgtggccgctcatgtttattgtttagctttttttttttttttttttgagatggagtttcgctcttgttgttcaggctggagtgcagttgcatgatctaggctcactgcaaccgctgcctctcgggttcaagcagttctcctgcctctgcctcccgagtagctgggactacaggcgcacgccaccacgcccagctaatttttgtatttttagtagagacggggtttcacccatgttggccaggctggtctcgaactcctgacctcaggtgatccgcccgcctcggccttccaaagtgctgggattacagtcgttaccactgcgcctgacctagactgttcaggtttaagttcctaggatacaaatataaaacagactagggccgatactttgctgttttcaacacagaagtggaaagcatgattttacacttctggaataatttagagtgacatctggtggttgcctgtgagacaagaattgttgaagaaactgaatttaaaagcctataataaataagactaccagacataaaaagataagaacgatgaattaaagtagtaaaaagtttaaaaaacatatcttaaatcctcactaaagaaaaattttaaaaaatgctagttgcagattttcaatccactggactttaaaaagaaacaatagattccttaatgagtagttgtaacgaaaattgtaacagttaattgatggcaggaaatacgaattgatttatactggtttgaagattctggcttgagaggaaatgcaactttacgggggaa

SEQ ID NO: 37958 - DNA, 2300 bp, Homo sapien
attctaaattcttaagtggtccagtctgtgtatttagagatgaaaaaaatcctggaaattcccttgttcactttctgtctcaattttcccagtaactaactttttctttctctctctctccctttctttatttttttgagatggagtctcattctgtcatctgggctggagagcagtgcagtgacaccatctcagatcactgcaacctccacctcccgggttagggtgattctcttgcctcagcctccctagtagctgggattacacacaccaccatgcctggctaatttttgcatttttagcagagatggggtttcaccatgttgcccaggctggtctccaacttttggcctcaagtgatctgcccgcatcggcctcccaaagtgctgggattaccagcatgagccaccacgcctgaccctctttttatatatatcttttttttttttagaggaaatctcgctcttgtcccccaggctgaagtgcgatggtgcaatcttggctcactgcaacctccacctcccggattcaagcaattctcctgtctcagccgtccgagtagctgggattacaggtctaatttttgtattttgtactagagagggggttttaccatgttggccaggctggtctagaactcctgacctcaggtgatctgcctgccttggcctcccaaagtgctgggattacaggcgtgagccaccacacccggcccttatatacatctttaaaaggtgttcaattagacagtaattttagccatgccaattgtggaaaatatcaagacaggttatatcaagaaaatattaatagttaacacatcacacagctgacagctcaaaacagttaatatattaagaaaacagttaatatattctgcatacagggagcaatatagttttacacagttttcttagccaatgccaataattttgtaatacagaaaagaaatgtatagcagcatcttgaaaaatgtctgcagtattagcattaaaacagttctactgaatcacagaaactaaatttgatttaggaagcctactgtttttctcagctatggttagattagaacagagctccttacttttcaagaccagaagtgcaaaatatcacagttactgtagtaatctcgaattctatttgaagcagacacctatcctttaggttatttgaaaactgtcctagataagacttgttaaatcttttctataatgcactttaaattgacatgagattcactgcttaaaaaagaattgtagtacaatcagtaaaggaattaaaaaaccctggtgacaacagagcccatatattttgtattgaccagagtactacacccaaaatgagatggaatgaaaagaatattcttataaaatcgcaggactagaataatcattttacacgtatccaagtaaacttcctttgttgtcaaggatattctgtttcaggttttaaatgcgtctcagattcctacacataatatttaaacgaagaaaaaaaaactctagaaagaaacaaacaagaattctcgagtaagcaagtaatttaaaggctgaatacacagatacgcaacctcaccagtatgctccatgttactacatatttaagaataaggacgggggccacagaggcaaaggcaaggaggtgaaggaatcggacactcggagagtgaaccgaaaagatgtgaaaaagcaaggaaaacagaagagaagagggaagtgggaaaactttgaggaaaaagagaaggcaaaagagaaggaagtgctttgagattgaatccagggaggaaaaagcaggtgtgccacgccgcacctccaggtcccgcggacaccacaggctctgcaagcccagccgcccgggtcacgtaagccccaccccgccgctcctcgtcaagtcccacccggacccgccctccccccgctcctccccccgctcctccccgccccacagagtcgatctctcctctcctagacccaccccgctcccccaggctccacctcggcctctcagaccccgccccgtcagggccctcccggccttgcccagccctgcctcgccggcggcggccgccgtgtcaggtgacagcccggaagctgcggaagcggatgagggaagggcggccgtggccctgggggcggcgggagctgctttgcctccaccgatctccctgtgcggccctcatgtgctgtgctcgctgacacccgaagtccgcggctttccgcacacggtggggtcgtcagacccgctgcccttggcggtcgaagtcgtcgtgcgggcccgcggcggccgcccatggagaaggc

SEQ ID NO: 37959 - DNA, 2300 bp, Homo sapien
ctctgtccttgtgaagtttatattagagtgggaagataaagacaaagaagaaagacaacttgatagaaaaatggacaaaatgtttatgaactgatatttcccagaagaacaccacatggtcaataaacatatgtaaagttgaccaccatcatttgttataaagaaaatataaattcaaaccatagtgaaataccaactcacatctaatagattgataaaggagctttcgtccaccacaggtggacatataaattggtacaactattttggtaaacagtgtatattatctggtaaagttgaaggtatggataccttataactcagcaattgtaatttaacatacatattcccaaaaaagtattgcacatgtgtactaggaagtacatacaataatatggtagcattatttgcaatagcttcaaactggaaagaacccaaatatccattaacagagaaatgaatacattttggtttattaacatggtggaacagtatacaataatgagaatgaatgaactatgcagctacacacaacatggttgaatcttacaaatataattttgaatgagtgaatccaggtacaaaatttaaaaaaatgctgcattcttccatttgtatgttgtttaaaaacagattaaagtaaatcatagtttgatatgtgtatagaaagagttatgttgataatctcaaaaatcaggtcagtagctgattcttatcttggaggctggcaagtgaagacagtataatcatttctctatttcaattaattatatggtgactacatggacgttccctttacagttctataatctagaaattttatgcacttttctatatgccgtgtagaaaaatataagctcattaaagtactttgagggaaaaggattgctttgagattgtttgggcaggtttaaaaatattctatttttttaaaaaaagttctgtttttgggccaggcgcagtggctcacgcctgtaatcccagcactttgggaggccgaggcgggcggatcatgaggtcaggagatcgagaccatcctggctaacatggtgaaaccccgtctctactaaaaatacaaaaaaaaaaaaaaattagccgggcatggtggcaggcgcctgtaatcccagctactcgggaggctgaggcagaagagtcggcttgaactggggaggcagaggttgcagttagctgagatcgctccactgcactccagcctgcgtgacagagcgagactccttctcaaacaaacaaaaaaacaaaaagacaacaacaaaagaaatggtttttatctttcatctgatttttgtattcggcattattgcttgtctgggactcaagtaaagaatatttgcagtagtttagacagttctaagttaatgctacatgaaactgtttgaatcttgtcttcatttctcaatcccttaaagccaatttcaaaaataagaatttgcctttattcaggttattcaaaggatgtgatctagactctaaagtgctagcctgtttcttaaaaattactttatgcggtggggcgcggtggctcatgcctgtaatcccagcactttgggaggccgaggcgagtggatcacgaggtcaggagtttgagaccagcttggccaacatggtgaatccccatctctactaaaagtaaaaaaattagccgggcatagtggcacacgcttgtaatcccagctccttgggaacctgaggcaggagaatatttggaacccaggaggtggaggttgcagtgagtcgagatttcgccactgcactccagcctgtgcgacagagcaagaccccatctcaaaaaaaatttatgttcacaccttatgtattttatttagaaagtattttagctatgataaattataaaattgagattaatttatatgtacactttttacgattgtacattcaggatttaagcatcaaccacatgggtatggtttagtactattatgttttaaatatgatttaaactatggtttaaaattctgaggtaattttgtgaaaaactcactgtattttacatgaattttgattgtatactctgttattattattattttttacagtgggactcaactaggaggtcttattacagtactgtgctgctttttcaaccatggagaggtttgttttctagaaagcaatttttaagaaatagaaggggttatagaggaacaaagaaatatactcatcgaaacaatatataattgtatactacttatgacttcacaatattttaaagacccttgtgttataagttgatattttaatcatgctgatcaaaatgttta

SEQ ID NO: 37960 - DNA, 2300 bp, Homo sapien
tcaaaatttatatattgaagctaccccaaaaaacatctttctgtatcttcgcattctgaaacagaagactaacttatagtcaagattgccttacaatgggatatgttaatactcaaattccaaaatttatactcaaatttgtaagtacacagccttctcagaaaactactttaaaacgtaaaatactcattgaggtgagccagttctaatttttttttaaatcaacaacagtattttacaataattcttaaaagtgaatcataatattattaaatgtttatgaatgtttacaaatgacagcatttttggaagaaacatgccttcacagctttgaacttcattaagaggttctattctggtgacattccagcaggtcttagtttctagtccaaataaattcattattcccatggatgtgcgacaccaggaggctatgattacctttaaaaagataaaaacaaagagataatggaggaaaatatattctcttcataataataatctttccaaaataccattttgtgatggttgccttagacattataaattctgacaaatttatttagatcatttcacttaggaatcagtcacttcaaaattacacattatgcctctatatagaaaaatattatatatgtgatagccaattctgtaatataaataatagtaagtcaatataaaagtatataattaaaatacggtgattaatagaaaaatacaaagatttatagaaacatttcataattcacttcatttagatccttgaatttattccttcataaaatatataaaatatattataaaaactggaacagaatggaataatagcacctgtacccattacaattttaatcaagcagaagatttaattgaccaattgtttccaaactgcaagctatttttaaaagttcaaagacaaagaaaaaataacagaaaaaaatttccaacagaatgttcatgtctcagaggttttttaaaaataacactatacattctgggaaactaatgtgaaatcactggggggagaatgtcaaaaaataaagagttgaaaagagaaagtaagcacctcttagagctaaccatttttaatattttggtgattggtgcggtggctcacgcctgtaatcccagcactttgggaggccaaggcgggcgggtcatgacgtcaggagttcgagaccagcctggccaacacagtgaaaccccatctctactaaaaatacaaaaattagctgggcgtggtggcaggcgcctgtgatgccagctactcagaaggttgaggcaggagaatcacctgaaatcggaaggcagaggctggaaatcggaaggcagaggctgcagtgagccaagatcacaggactgcactctggcctgggccacaagagcgaaactccaactcaaaaaaaaaaaaaaagttggtgattatctttccagtcctccccctaggcatttaaaacatgaaattagagttattcaatactacctaatgagatcatattatcaacgttaatgtaatatacatcactaaacatcagaaacatctttcctcgtctcagaagcgtagttttattaggcaggttaacatagtaggaaaagcatagctttgatatcagaattgaactcaaattctgactctgcaagttatagtttccatggtctcaagtaatccttcaacggctgtcaatcacttcacctctcaaataagtttaataataaccattctacaagagaagtgagataagcgctcacatatacagtcgtatatgtcctgtatgtcctaagtatagtgctggcatatagtatgcagtgaatgcttttacctttttaaaacattctgttctaaacttacatttttatttgtaaatgagaaattaatcccctgtgaaattaatctcgcagggggagcgaagccacggttgcgggggagcgaagccacggttgccgggaagcgcgggccacccctccctccctctcattcttcgtcctcccctcgcgcgccacccgtttttcctctttctccgttaataacggctgggtggctgggggaggagggaaggtggctccggcggagtctgggcgggcgcctcccactcagccgccagtcgccgtgggagccggaggatggcggcggtaacagcggccgccggagaggaggcggtggggaggcccggggcgccaagcgcgacggcagaaagcggcagcggcccgtcatggcgcaccgaaaccagcggcagtcgcacggccacctgagtcgccccttcctgctggagccagcgaggggtgcctgcagccgggacacc

SEQ ID NO: 37961 - DNA, 2300 bp, Homo sapien
ttgaatttattccttcataaaatatataaaatatattataaaaactggaacagaatggaataatagcacctgtacccattacaattttaatcaagcagaagatttaattgaccaattgtttccaaactgcaagctatttttaaaagttcaaagacaaagaaaaaataacagaaaaaaatttccaacagaatgttcatgtctcagaggttttttaaaaataacactatacattctgggaaactaatgtgaaatcactggggggagaatgtcaaaaaataaagagttgaaaagagaaagtaagcacctcttagagctaaccatttttaatattttggtgattggtgcggtggctcacgcctgtaatcccagcactttgggaggccaaggcgggcgggtcatgacgtcaggagttcgagaccagcctggccaacacagtgaaaccccatctctactaaaaatacaaaaattagctgggcgtggtggcaggcgcctgtgatgccagctactcagaaggttgaggcaggagaatcacctgaaatcggaaggcagaggctggaaatcggaaggcagaggctgcagtgagccaagatcacaggactgcactctggcctgggccacaagagcgaaactccaactcaaaaaaaaaaaaaaagttggtgattatctttccagtcctccccctaggcatttaaaacatgaaattagagttattcaatactacctaatgagatcatattatcaacgttaatgtaatatacatcactaaacatcagaaacatctttcctcgtctcagaagcgtagttttattaggcaggttaacatagtaggaaaagcatagctttgatatcagaattgaactcaaattctgactctgcaagttatagtttccatggtctcaagtaatccttcaacggctgtcaatcacttcacctctcaaataagtttaataataaccattctacaagagaagtgagataagcgctcacatatacagtcgtatatgtcctgtatgtcctaagtatagtgctggcatatagtatgcagtgaatgcttttacctttttaaaacattctgttctaaacttacatttttatttgtaaatgagaaattaatcccctgtgaaattaatctcgcagggggagcgaagccacggttgcgggggagcgaagccacggttgccgggaagcgcgggccacccctccctccctctcattcttcgtcctcccctcgcgcgccacccgtttttcctctttctccgttaataacggctgggtggctgggggaggagggaaggtggctccggcggagtctgggcgggcgcctcccactcagccgccagtcgccgtgggagccggaggatggcggcggtaacagcggccgccggagaggaggcggtggggaggcccggggcgccaagcgcgacggcagaaagcggcagcggcccgtcatggcgcaccgaaaccagcggcagtcgcacggccacctgagtcgccccttcctgctggagccagcgaggggtgcctgcagccgggacaccttcctctccgcgtctcctcgtctcccgcgcccgcgtcaggccgccagccttgcccaccgccccgagaagagcgcgccgggcgccgactgcccctcggggcgccgagcggcggccctggacgtgcgggggcctctctgggccggccgcggcgcctcggccctgccctctagctcccgcgttcgctcctaccctcttggctctcggggcacagcgcgcggcccggtccggagcagggcggacaggagcgccaggcagagcggcctggccgccgctaacggcgcacgcgcgcgtactcggctcggatctaccttccagtagcagcggagtggccaatgggaccgggaccagggctgggggccggggggccgccgccgcggggaggttcccggctcaggtgcccagcgctcaccagcccagcgcctcgggcggcgccgcggtggccccggcagccccgcgcagctgtttcctggggggcgtggcgtcgggggcccgcgcggcgcagtcctccttcagcatcccgaacagcagcagcggtccgcaggactcgcaggactcggtgcacagcagccctgaggatggcggcggcggcggccagcaccggccggtgggcgggagccccggcgggccgcgcctggtgatcggctccttaccagctcacctctcaccgcgcatgtttggaggtacggacccctctccacgcgcccgcgctcggttctcccgcggctgcacgtgggccgtggccgccggctatttttaccgttc

SEQ ID NO: 37962 - DNA, 2300 bp, Homo sapien
aatttctgataacatctcatttcattcccctttatcacttcttcagtgctttctttgtcctccttcctcagctactataattcatcttcattatcttaaaaagaagtctgcattaggaaagggtgagagataatgaagtaacagaaaaataatctcaaacactttactatttaaataataaacctgggttatagcttatgaaacagtgcaatgaagtatcatattacaataagaacaagtttcaaaaccaacattaaaataagcgataagtaagaaagccataaaaaaggaaacaataaattgttataatattgtttttataatttgcttactaactcgtatgtttttaggcatttataatgcagtatggcacacacctgaaattccttaactcagtggtttttaaacttaattgttgccgggtgcgttggctcatgcctgtaatcccagcactttgggagcccgaggcgggcagatcacttgaggtcaggagtttgagaccagcctggccaacatggtgaaaccctgtctctactaaaaatacaaaaattagccagccatggtagtgcatgtctgtaatcctggctgctagggaggctgaggcagaagaattgcttgaacccagcaggcggaggttgcagtgagcagagatcatgccactgcactccagcctgggcgacagagtaagactctgtctcaaaaaaaaaaaaccaacttaattgtatatctaaaattcttgtggcttgtttcacccttccttccatcccaggcctctaaatcagaacagaggcaggttagtgtttgttttttaagtttcaagtgattctaatgtaccagccttgggaaatacctccgtaactgttgaaaagggttcagaatataattttaaataaaattactttagatcaaaacagacttacaataagtataatatcacataaaggatcaactttcaagcgccaaagaatacaggtgtgtacttgaagaccttttagtagtgaaactcagcagctgtaggcagtgaagaaaggagcatatgtgataaacaaaattagctgtggtcaacaattatgctatagctaacttatgtagtcagtactttccagtgaagttgaaaataaagcaaagttccatgtattaaccctgttttccactaacccttctttacatgtaggacatatgccagggtaccaaaaactgcaggaatattccctagcattgcagcctcagttctaataccaaaatctccctgcagactaaatgtctagagcagcactgtatcaatagaacataggggcagatctcataccttccaagggtagaaatcgctgagcacaggtaaaaataaaatattccagagggaaatattattttacaaatttttataaacacttttgtaaaataatgtacacagccttgcacactgaaagagtcaaagccatttaactctgtataaccactgcagaatctttatcttcttttttacctgacttccaattggcgggtgttactaaaactttatcaccaaagttatttcactagctgagcgtggtggctcatgcctgtaatcccaacactttgggaggccaaggcaggtggatcatttgaggccaggagtttgacaccaacctggccaacacggtgaaacctcatctccactaaaaatacaacaaattggctgggtgtggtggcgcatacctgtaatcccagctactcagaaggctgaggcacgagaatcacttgagcctgggaggcataggttgcaatgagtcaagatcgcgccactgcactccagcctgggagacagagcaagactgtctcaaaaaaaaaaaaaaaagttatttcactagcaacatataattaccataaaacaaaggagggttttaaatgaactacacatgcaaaatacactagaaaagctagatatttttaaaaacgtggtgaattatttggtaaagccaaaatattttaattcataagttactattcccccaatgcatctattttgtaaatgctgtttcacatatgaggtttgtaaaaaagcaaaatatatgtataaaatggcgtacataaagatgttctacaaatatagccagaagttattgttttactgtatgcaaagagtgatggcaatttttaattcaaatgtttttaaatatttcgaactgaaactaaatcttaccaatgtaaaattgccacaaagacggctggaaaagagaaaagttattaaaagctgctttattataaaataccattaaaacaagtatttcaaatgtattattttacatgtctagaaaaga

SEQ ID NO: 37963 - DNA, 2300 bp, Homo sapien
gtcaagagttttgaataagggattgtgggtatgtatcaacttactcctctgtgtaagaatgcttgtttttccacaccctcaacaacactatgccttgctgcattattaatgtgtggaaatagccagtgattttaagtattatttgccttagagattatagtagtagaactcagatttatagtgtgacatgctgttctggaagagcaaagttattaccttaaatgacccagagtctcactctgcctttgcacctgttttagttactttcaaagttaacttggctggaaacttgactgtatatcaagttagcagttactgtaatagtatagtttgtcaggaagtgtatgtcattctctttgacataatggatggtattttgtgaggaaaaataacagtgattctaatgatggagtcatttctcattatggtaactaatggtcatcttaacagttggtgaaaaaagaggtggcagtttttatagttaacatattagtagcattctatttgggattttcctcttttcctgatttgtaattcctttgccatgtgttgtgaatactgagttccaaattaaatttttattcagctggaattttggtttttttttttgatgaatggtatgcagtatgactaaagcctaggtttttttgcccccttgagcagttagccacttccaacattatttgttgaaataaaccattcttcctaacttgagataccatatttatctttatcatatctaatttctttttttttttttttgagacggtgtcttgctctgtcacccaggctggagtgcagtggtgcgatcttggctcactgcaatctccacctcccgggttcaagcaattcccctgcctcagcctcctgagtagctgggattacaggcacacactaccacggccagctaacttttgtatttttaatagagacaggatttcaccatgttggtcaggatggtctcgaactcctgacgttgtgatccgcctgcctcggcctaccaaagtgctgggattacaggcatgagccactgtgcccggccagtcatctctggtttcttatgtgtacttggttttatggcagttttatagtacatttaatattttcataaaaatcattaaaaacttgcccttcttcccctcaaatatcttagcaacctttgtgcattcttccagataaatcccttgaaaataggatttagattggatttgtattaaagttacatattaattcggagaacattcatatttgtgtaatatggagttttctgggtaggaacatatacccattacattttatgttttttttttttaagtaaaatatacttttatttgtaaagattcctaggaaagaaccactccacaaagaaacaaattacatatagttctcctagtgaattgaatggcaaatttgaaaattaacagtttgaatctatttaccgtatagtttaaattaaatatgaagactttgtgaacgtgtttaaaatatattcggagaacgagaaatctctgtgtaggagagcaggttttttgtttttttaaaaaaatattttttcttaaatattatgatcatttgttgctaccagacaaataactaagagatctggctttggtaatttaagttgtctattttgaaagagctttaaaaatgtgtacttattcatgtgttcgttattttctgtgacagttatattttgtatagaaggcaaaagttaacttgaaattacaactggtaattttcttgttttttaattttaaatgtagactaagaatcttcatttttgtcatgtttcacttttatggtaatgtctaaagttgaacttgaaataaatatgatttctatttaaggctgccattttaaacgttatattctaaaaccgtactggcctagatactacaactgaactttttttctttttagttactccacaggatccgctgaacataggatgttgccacaaaatctacctcgtgtatttttctctttcactcatgagctgcacaattgcagatttgagcacaatgtctgcagactgtgttgaaaaactctgaagaacctaattaacacaggatgacctaggagtgattctaagtctgtgtaacaagatattactcattagtgaatgtgtcagtcttggtactgaatgctgcagataacagcaagtaggttctcctttatttctgaagtattcacttgaccttccatcagtaagacggacttttctaatctgttcctggagatattaatggaatacagtcatgtccactcaagacgagaggcagatcaatactgaatatgct

SEQ ID NO: 37964 - DNA, 2300 bp, Homo sapien
cttgagctattgaaccaacaaaggtaactgcctacctgtagatttgaggtcttgtttaagctattataatggaatcttttcgaaaaaaatgtgggcccaaatgcattcctaactgtacagccattaaaaggacaactttagtcctctctttcatcctcacaattcattactcctcttatagtcactgataacaccatctaatcaccctaactaaaaaactcagttatccttgatttcttatttcccctcatcctctaggtaatcaagtcttatttatcatagctggctagttttcaaatgtatctctgcttctccattctcactgacactgttagtttggactttctctccaactcatgtctggactgcattaacagcgtcctaactagtatccctgcttccagtctgctatctatcatgctttagaattttttctctaaaatcttatcaagatattctcctgcttaaaaatcttaagtggctttttgttgcccacaggatgaatcacgaactccttgccgcaggtatcatttgttgttgttgtctgcatgtttagaccgcatctctcatacccaatctggcacaaagtaggtgctcaagtgtgtgttaaatgactttaatcttttgtatagcttgtttgatatcataccacttaactacttaattagactaagtacagtggtagcatgctggaaactcaatgaagatttgttgaatgtagtttccagattctacagtaaaacaatcctttatcagtagttcctgataacacgcatcttggtgtgcattcagttgatctagcctagtttacaggaagaggctcccttcagtaatgtactgtatggcctttcagattataattagtcatctatattctctagattgggcttgtgccaagactgtaagttaggaaggtaggtggagtctgtgtgggcatttctgacaattttttgatccacgaatagctcctagcaaatttacagcctgcctgccagcaagctgtgccaagttaactaaaacagtacgggccacagccattagctgctgctacaaacgcttcgctttgcgaagcaacgctgaaggcgctcttttggaactcggggggttgggggcgtgcagccgccgcattgcagcacacaacggaaggcttcagacgctggagctgccgtccgcacccagatgtctctctctcccttttcccctaacctcccccaactgcgggcccttttgggtgctgctctgacttcttccttggccttgggaaaagccgaagcggctctggagagaggagggcatggtttggagaagaggtgctgcggcaacaaagcgacccgcccaacgcctcctcaactttctcctgcccccggtctggtattgtttagtcctactcattcccactttccgagccagcctgcaaaaatctgtatttcaggggaaattccaagggataaaacacctccttcagcataacaattggtgttttgctctctagatttcctagcaatgaacttgtcgggcctctccatccgcccgtctaggcccaaggcctcggccgccgcggctactcggagtgcccctctgccgcgcacgcgcccctcaagggctctcccatgacctttcccgggaacccccttcaattacgcttcccgtcacctcgcgccgcccccgcccttcctgctctttccgtttcctctttcgcgcctgcgcggccccaattgttttggctttccggtggcatccggcagaggaaaagggcgggggcagctagagtaagggaggggcgggggacggtcgcgaggacccgggaaactgcaaaactgccgctggtgccgacaggcgcgcgcgcgcgcgaggcgggagggcggcgtggcgagggcgggcgcggcaggctggccagcggtccattgcgcgcgcgttcccgggccgcgggcgggggcgagagcgcgcggcgggggcgggggcgggggcggcgggggcggcgggcccggcgtctcgcggccccggactgacaaggcggcgcgggcgggcgggcggcgcggctcccgggggaggagtctggcggtggtcgggccctgaggagcgtgcggcggcgcccgcagaggacgctgctttccgcgctggacggaccaagcgagggagggtgcgaggggaaaccggaaggaagaggcggcggcgccagccttcctcggccggaggcggaggcgagaccccaggcgaggccgcggcgggagggccacgcccccgccgccgcgccggaggggcccagtgtggacggggccaccggctggagcggatcccac

SEQ ID NO: 37965 - DNA, 2300 bp, Homo sapien
tgccactacgcccggctaattttttgcatttttagtggagatggggtttctccatgttggtcaggctggtctcgaactcctgacctcaggtgatctgcccgcctcagcctcccaaagtgctgggattacaggcatgagccactttagcaagtctctaaaaataaataaaaaataaaatttaccaccaaagaaaagctctggacctaattgcttcactggtgaattctaccaaacatttaaagaactaacaccagtttggccgagtgcagtggctcatgcctgtaatcccagcactttgggaggctgaggcaggcggatcacaaggtcaggagatcgagaccatggtgaatcccgtctctactaaaaatacaaaaaattggctgggtgcagtggcgggcgcctgtggtctcagctacttgggaggctgaggcaagagaatggcgtgaaccccggggggcagagcttgcagtgagccgagatcacgccactgcactccagcctgggcaacagagcaagactctgtcttaaaaaaaaaaaaaaaaaaaagaactaacaccaattcttttcaatcatttccaaaaaaattaaagagaaaggaaaacttcctatctcatattgaggctagcattaccctgatacaaagccagacaaagacattataagaaaactacacccccaaatcacttatcaacattaatgcaaaaattctcaacaaaatggtaggaaaacaggttgaataccttattaacagggtaatgcactatgaccaaatggaattgattcctggaatacaaggatggttcaacacacacaaatcaataaatgtaatatgccacattaacctacttgcacctacttgctgcaaaacaagtaagaggcccagggtaaggtgtccgtttagattccatatgaattttaggattggttttcctatttctgtaaaaaaaaaagtcagtgggattttgccagggattgcactgaatgtgtagatcactataagggtggtaataacacaagtttaagattaaagacattcttattaagggtttagctgattggtacataacaagtgctgtgtatggtagcttttattttcatctccagaacctataccttgctaaatacaatatacattgactatgttttaagcatggatcatatgatctgaaaattggagaatttatatgcagagtattgctttcttccaaaaatggctgaatcctattgctatgtaatgagcagctcccgtgggtctggtcactagggatctacaaacctgacttgcacaagaccccttgcctcggtcgggaacctcaaaggggcagggagatgagtgtggcctggcgggaaccctgaagctcctggaagcttccccaggctcccaaccagggccccgccccgcctcggctccagccgccgccagcgggcgctccccgcccaccggcggctgggctctggggctctgcgcactgacttggggccggccgcgggcaggcgggcatctggcggccgaggccgggacttcggggcccctcccgggcgagtcgcggggcggcggcgggaaggggcgccgcacggaggaagtgccctcttggccgcagccagagccgcgccgcaggtgccgcgatgtcgtcctggccggggcgcgaggatgcgagggctgggggcgcgtggtggccgcgggagccgctggatcaggaactgcagcgggcccgggagcagaagcggcggcggcacgacgcccagcagctgcagcagctcaagcgcctggagtccttgtgagtctcgagcagccgtctgggccgcagtccgcgcgccgcccgttttctgggaacaggggcgcccggcgccgtgttgggcgctgggctgggtcctccaagcccccaggacccaggcaggggtgcgggcctgtgaggaacctagtgcctgcgacgggacttctagtcctcactgggtggggagcgaggcccgcccggccacggaggggccctggaggccgcggcgcgggtgggcgggggcctcggcccggggaggcggcagcggcttgcgctcctcgcccccgctttggtgtgggcgtcgcctcttttggggaagccaagagttattggcgcttgctcggcatttgtggaccgaacaggcaagttcaaccgagcacgctgcccccgcgctccacctctgagttccctgggccactgcgacatggagaaaccccgttcttttcatcctctgctacggagaagggacgaggacacgggtcctgcagtgttggtgtggcgaggcccggaagaagagagaatggg

SEQ ID NO: 37966 - DNA, 2300 bp, Homo sapien
caggctgaaataaaagaacactaggctaggcaccgtggctcatgcttgtattcccagcactttggaaggccgaggcaggtggatcacttgaggtcaggagtttgagaacagcctggccaacatggtgaaaccccgtctctactaaaaacacaaaaattagctgggcgtggtggcatatgcctgtaattccagctatttgggaggctgaggcacaagaatcgcttgaaccctgggggcggaggttgcagtgagccaagattgagccactgcattccaacctgggtgacagagtgagattttcttggaaaaatgagacaaaaataaatttaaaaaaagaagaaataaaagaacactagacagtaagcagaagctatatgaagaaataaggatctcaataaagataaatagtcgggtaattataaaacctagtattgtaacaatggtttgtaactgtagttattgccttttttttctttctttcttttgttttttagatggagtttcactcttgttgctcaggctggagtgcaatgacgcaatcttggctcactgcaacctccgcctcccgagttcaagcgattctcctacctcagcctcccgagtggctgggaattacaggcatgtgccactacgcccggctaattttttgcatttttagtggagatggggtttctccatgttggtcaggctggtctcgaactcctgacctcaggtgatctgcccgcctcagcctcccaaagtgctgggattacaggcatgagccactttagcaagtctctaaaaataaataaaaaataaaatttaccaccaaagaaaagctctggacctaattgcttcactggtgaattctaccaaacatttaaagaactaacaccagtttggccgagtgcagtggctcatgcctgtaatcccagcactttgggaggctgaggcaggcggatcacaaggtcaggagatcgagaccatggtgaatcccgtctctactaaaaatacaaaaaattggctgggtgcagtggcgggcgcctgtggtctcagctacttgggaggctgaggcaagagaatggcgtgaaccccggggggcagagcttgcagtgagccgagatcacgccactgcactccagcctgggcaacagagcaagactctgtcttaaaaaaaaaaaaaaaaaaaagaactaacaccaattcttttcaatcatttccaaaaaaattaaagagaaaggaaaacttcctatctcatattgaggctagcattaccctgatacaaagccagacaaagacattataagaaaactacacccccaaatcacttatcaacattaatgcaaaaattctcaacaaaatggtaggaaaacaggttgaataccttattaacagggtaatgcactatgaccaaatggaattgattcctggaatacaaggatggttcaacacacacaaatcaataaatgtaatatgccacattaacctacttgcacctacttgctgcaaaacaagtaagaggcccagggtaaggtgtccgtttagattccatatgaattttaggattggttttcctatttctgtaaaaaaaaaagtcagtgggattttgccagggattgcactgaatgtgtagatcactataagggtggtaataacacaagtttaagattaaagacattcttattaagggtttagctgattggtacataacaagtgctgtgtatggtagcttttattttcatctccagaacctataccttgctaaatacaatatacattgactatgttttaagcatggatcatatgatctgaaaattggagaatttatatgcagagtattgctttcttccaaaaatggctgaatcctattgctatgtaatgagcagctcccgtgggtctggtcactagggatctacaaacctgacttgcacaagaccccttgcctcggtcgggaacctcaaaggggcagggagatgagtgtggcctggcgggaaccctgaagctcctggaagcttccccaggctcccaaccagggccccgccccgcctcggctccagccgccgccagcgggcgctccccgcccaccggcggctgggctctggggctctgcgcactgacttggggccggccgcgggcaggcgggcatctggcggccgaggccgggacttcggggcccctcccgggcgagtcgcggggcggcggcgggaaggggcgccgcacggaggaagtgccctcttggccgcagccagagccgcgccgcaggtgccgcgatgtcgtcctggccggggcgcgaggatgcgagggctgggggcgcgtggtgg

SEQ ID NO: 37967 - DNA, 2300 bp, Homo sapien
agagacggggtttcaccaggttgcccaggctggtctcaaactcctgagatcaagcaatctgccccccttggcctcccaaagtgctgggattacaggggtgagtaatttttgtattttttcgtagaggtggggttttgccatgttgcccaggctggtctcaaactcctgggctcaagtgatactcctgcctcggccttctaaagtgccaggattacagaagtgagccaccaggccctctgtttgttttcaaaatcagaggtagatgttgaattttatctcatgccgttttgagtctatggccacatgatcttagagctttttttcccttcttctgtcctataattttattaataggtgttctatttctagaataagctctaagatgaacaatgaacatttttcttgttattcatgtagtttctcattcgatccctgaaacctaagattatagtaatcttataatgattgttttatcttcatcttacagagaacactgacattttgttaatttacagaagctcacctaggtagcccatgtaatggtatatttttcctttaacataccgttttttaaattttttatttattttttttttgaggcagagtctcactctgtcgcctgggctggagtgcagtggtgcaatttagtggcacaatctcggctcattgcaaccttcgactcccaggttccagcaatttttctgcctcagcctcccaagtagctgggactacaggccgtgccaccacaccctgctaatttttgtatttttagtagagccagggtttcaccatgttggacaggctggtcttgaactcctgacttcaggtgatccaaccacctcggcctcccaaagtgctagggttacaggtgtgagccactgcgcctggcctaatatgcggttgaatccgattttattacgttttattcagtatttttgcatttatatttataaattagatcgtgccctgttttttcagttttatttttcttttttgttgctctctttgccaggttttggtatcagaattgtgtttgcttccaaaacgagttgagaaagagttggtgatttgctttcattattccaaaattttaataaattataacacccaattccaattccaagtgcatctgattactctaatggattcctgtggcttctgggtctctatgatgaagtcctccctggcataggctcgtatatgggagcttgtaggatgtctgcaagtatcagctcacagtgcggccgctgatggcttggaggaccctcacggtgccttaaaacttttgcctagacaagtgtcacgggagcctctcgcaatacatgcctcccttttctttttttggagacagtgtctcgtactgtcgccagggctggtgtgcagtggcgcgatctcggctcgctgcaacctccgcctcccgggttccagcgattctcctacctcagcctcccgagtagctgggactacaggcacgcgccaccaagcctggctaatttttttgtatttttagtagagacggggtttcatcatgttggccaggatggtctccatctcctgacctcgtgatccgcctgccttggcctcccaaagcgttgggattacaggcgtgagccacggcgcccggccttccttttcctttaagcagtattaaaaaaaaaaaaaaaaagtcctgaaggatggtttcggtctctttcaaggtagaccatacccttgtaactaagcttaaaaaattaaaatctaattttccctccctctccaaagcagcaagggaaaattggatccacggccacgtaggagcccctcacggcaccaaacccggtgtctccagggacgggcggagaccagcgggtgggcttgggcagtacgcgcttttctcttccgactttgggccaaagccttgtccggagatcacagtgtctcgctcggggacacgccctctctaggcccagacttggtccccactggagttcccagcccccctccccgctgcggcacgcacattcccaatgccgggcggggcagggcgcagcaggcccgccctcggcgcgcggccaggctgggctcctcccctggagctgcggccgggagggcgggcggccggggagacggggtggcggctgcagcccgggtagggccaggagacccggtccacgtttgcaaacgcagccgaacgcccaggccgacccgtgccgcccgagcgccgcgctgcgtccgcgccactcttctcgccgccccgatggcgttccggggctggaggcccccgccgccaccgctgctcctgctgctgctctgggtgaccg

SEQ ID NO: 37968 - DNA, 2300 bp, Homo sapien
cctgcaggtgggaacctcgggagggtgagccctgctctggctgaaggatgctgggagccgacacggtcctcctcttccctgctgtgttcccctccaggccttcctggccagtgcaccaggaggaggattggagctgctcagcgtggggtgctgttctcagtgggtgggaagggggactcacagcctcgtctgggagtttatgtggacaatctcctgcttcctgggtgaggagagacatctgttgtgattctttcttcgtgccccatgactttgtggtctttgaggggtattgagaagggagaacccccacagctctgcctgtgtatcggcctggccctgctcggcagtccttcttctccggggcatcatgccctggctttgaggtgagggaatggcaggaccgactggctctttcaggacaggctttctgcctcatcggcaccaggtggtgtggggaaggggtgcaggtcacgtggtccagtttgatagtggacttgtggcatatgaagttttattattttattctggaatcattatgctgtggggaattgattcctctttttaccaaactcatggtaatagaatcactcagtagtttacacacaggctggatctctccactgagtggacttggggctcctgccaggagcacttggaaaacccaagtattcaccagggtggcggggtgagcaggggtgatagtgggggccttttgtcgggctgtggtggagagtgcggaattcattactctcagtgtgtatgctgctttcctggcgatcggaatcttcatgtcaggctgggtgctgtggctcaagcctgtaattccacactttcggaggccagggcaggcagatcgcttgagcccaggagttcgagaccaacctgggcaacgtggtgaaaccccatctttactaaaaatacaaaaatgagccaggcatggtattgcatgctgtagccccagccacttgaggggctgaggtggaaggatcacttgagcccaggaggttgaggctgcagtgagctgagaccagaccacttcactccagcctgggagacagagcaagaccctgtctccaaaaaaaaaaaaaattaaaaagtaattagaaaataaaaacagaatattcatgtcccacatatgcagatattttctctttagatattggagacattatccttgtgacacattcgtagtttctgataagggctacgttcgattctgtcttttgttttcaagacagggtctcattctgtcacccaggctggagtgcagtgttgtgatcttggctcactgcaacctcaacctctccggcacaagcagtcctctgacttcagcctcctgagtagctgggactataggtgtgtgccaccacatccagctaagttttgtaattttgtggtgacagagttttgccatgttgcccaggctggttgagagcttgattgttttcattaacttgacatggttatagagtgtacaggctgggcacggtggctcatacctgtcaacccagcactttgggaggccaagtcaggaggatcacttgatccaggagctcaagaccaggctgagcaacatagtgggaccccatctctacaaaaaaaaaaaagtattagctaggtgtggtagcatgtgcttgtagtctcagctacttgggaggctgaggtgggaggattgcttgagcctgggaggttgaggctgcagtgagctgtctatgatggtgccactgcacaccagcctgggtgacagagtgagaccttgcctcagaaaaagaaagtatagtgttcaatttacattagctccatttctgtgtggtgcttctcataacccacactgcattcataacctgatgaaactggagggccacatggcgtgtccctacaggtggctgttcacatgctgtgtgggggttcttatttacccttccaggggagcatgtttcctggctgtgtcgtcagatactgtggtttacgctgttccggagtctggaggcctctgtgtgcctttgcatctctttcccaactaatttgcacagctgctgtggaggccctcatgaatgacctctttctttcctttcttcttttctagctactctcggaaccgcacgtttgacacgtacattgggcagggctacgtgattcctgggatggatgaaggtctacttggtgtttgcattggagaaaagcgaaggattgtggtcccgcctcacctggggtatggagaggaaggaagaggtgagcatcagcatcacctgccttcctcactagctgtggctgcttccacattgcttgaaacagggctt

SEQ ID NO: 37969 - DNA, 2300 bp, Homo sapien
gtatattaaccaggtaacataaccattacctctacctaattccagcacagtttcatcactccaaaaagtaacccataaccattagcggtcactctccgtaccctgtcctcatccatccacttcccccacgctggcaacaggtagtctatttcttgtctgtatggatttgcttatgctggatgtttccatatccctggaatcctacagtatgtggccttttgtgtctggcttctttcacttagcataatgttttcgggttcattcccaggtgatttttaacaggttaccaaggttgaggaaccatagatctgcctctgcagacacccaccctgtccatgtgtgttagcttcccacacagagccatccgtggcctggctttgagcagccttctggccaatggcaggctgtacttcctggttcctgtgggaaggagcctgcaccccactccacccacaccagcagcccctgttttgagtgagtagcaggcacctgtgttctgctattaaagcacacgcttctcaaattattacctttaactttggccagccccaaaatttgtacctccattttctcaggattttaatgagaattaaacaatacatgtttaatttagaagaatgcctggtactcaataaacgcctattaaatatgagcgtgagtgtgtttctattagagataggagagagaccaatcaagaagcagacacagaaaagtacgtgttgggacaggaggtaaggagggactgttggagtttgtgtatctctatctgaattttgtcattagctgtgttattctcttgaataagtaatatcatgtctgaatttttcatttctttctttctttcttttttgaggacggagtctcactctgttgcccaggctagagtacagtggtgcaatcctaactcactgtagccttgacctcctggcctcaagcaatcctcctgcctcaacctcccgagtatctgggactacaagtgctcaccaccacgcccagctaatttttttgtagagacatttggctgtgttgcctaggctggtctcaaacccctggcctcaagtgatcctcccacctcagcctcccagagttgagattataggcatgagccaccaccatacctaacctgagttggtttttttatatgtaaaatgctgatgataataaaatatgtccttgactctaggtaacatgattttaaaatattttacatttaaacttctctgaaatgatttgggctgggggatgtattacaactgatgcatatgtttaagtgtcccccacgcccctgggaagctgtcgttaaattcctggggttatggccatgcctaccccataaggttgctgcagggatttaaagggaaaatgtaggtgaaaaatactttggcaaactgtaaaacattattcagatgtgagctactgtcttcaaaattggaaattatggaaaagttaataaataatttagtatagaacaaataggatgtattctaaaagcaccttgtgactgttaggtgtatgatcataaggggccaattttgggggagaggtgtttttttctttatgaagtttatgttatgtttttcttgagcagtggtaggacattggagtgatttcactctacggctgattttctcaccccacctcttacttccagtgggcaaggggcaagtattaatttggctgggtttgagtttcctcatctgtgatcaacttagccactcatctttcaggctcaacgattccatggggcaatagtccatagtcttgaattttagtccaaactgtgctcattacaggctgtgagacccacggcaaatctgtgcctccgtttatccacctgtaaaatgaggatgaggttacatctaacagccctttcagcgtcagtcttggagtcctcctagggttctgtatctgggtgcccgttttcctcacttggagggccttgaggacatacctggtgacactggggaggcccatgtgctgcagcctgcaggggtcattcattaattccccgtgtctgtcctttagggaatatccccggctcggctgtgctggtgtttgacatccatgtgatcgacttccacaacccttcggactccatcagcatcacctcccactacaaaccccctgactgctcagtgctgagtaagaagggagattacctcaaatatcactacaatgcctcacttctggatgggaccctgctggactccacgtaagggcaaccagaatggtgtgggagtgagcctggagggtgacagttgcatgctcccaccatcctcctctcttgggtagatgctggt

SEQ ID NO: 37970 - DNA, 2300 bp, Homo sapien
gagactcaatttatggaattggttagaagaggccttagagagtgcatgttcttatggcattcattatatagggaggtgactgaacctgtactcttagtaaggggctgagccatgaccagaatgtagatcatgacttcagtgttctttagatttacagcatgcaatatacttactcatggaagcatattataaacacctttgggaaacagccaatataagctctgattgcaatacaggggtaaagagctatcattgaatcagattcccaactgttttttctatgtgcaaaagtcctgcaggtaattctgatactcccatgccatgctatctgctttaatgcaagaagttattttcagtttgattttagaaacacttaggcagggtctagtctgccttttgccattgcatttttgtttcattgtttatttattgagatgaggtcttgctctgtcacccaggctggagtacaggggcatgatctcagctcactgcaagcattggccccccgggctctagcaatcctcctaccttagcctcctgagtacctggaaccacaggtgcgcaccatcatgcctggctaattttttgtatttttagtagagactgagtcctgccatgttgcccaggctggtcttgaactccgccttggcctcccagaatgctgggattacagatgtgagccactgcacctggcctcattatttttatgcttttttgagataagttcttgctctgttgaccagcctggagtgcagtggtgcaatcacagctcactgcagcctcaacctccccaggctcaggtgattctcccacctcagcctcctgtgtagctgggactacaggtgcatcaccatgcctggctaattttttgtagagactggggtctccctatgttgcccaggctgatctcaaacatctaggctcaagcgatccactcgccttggcctcccaaagtgctgggattacaggtgtgagcctccgtgcctggcctgcttcattgcttatgatgatgaaaaggagtggtgggggaggataaggatgggcattcccaggacaaaaaggtttcctaacatgtgaccttgccttccagccacatctgactgaactagagactgctgctcacactggatggccagaatgaatcagatcatgctttgtgtgtatcatagctcaggtgcttatataagcaaaccaattaggtgttcataggatctggaattaagggtaagaatcacggtcaaattgatcacaatggcaggtctaaatcctgaagatgaatgatgaggcagagccagagatgtggagtgggtagctggactgtacagagagatgctggctcctaatgtcgcagtgctgctcagattcagtcaccacgagacccagctccactgcttcctgtctcggcttctgaaacttgcagacttgtaccttttactgatgttttaaatgggagaaaataattttcagaggtctcagtattttctgaagggcagacaaaattttccctgaaatatctttagacttaaataatttctgaaaatattcaatctaaatagccactatgacaaggactttagaatttatatatcacaaaagacaggcagacggagagaaagaaacaagaagaaaacaaaaaaccatggtaggtgctcaataaatatttgttgactcagtaaagatagttttgaccatagaattaaaaaggttttgcatttcatatttattatcagtgcttcaatatagaatgttttgtaatgattagcaacattgtaaacaccaccaggtttttccaacactaactgctagtcttttccagtaaatattttttccccagacaaaataaccaaacctaacacaatttcaagagatggtgataccatcagcataataacccaaattacaaaaatggcaatacttaaaatcatgcatattatttcaccatttcataaaacttattttaaaatttctacaaactttcccagtgtaaaagactcctcaaaagctgcatgataacattaaactacaaaattcactttggaaaagtagggagttatttttctaattttagcttttttttttttttaaatgggttaaaagatacggtgaggagtgtgttgagagaggtggagaaaaggagcttccagtcaatgcattcaccatatctgaaaatacttcagttatacaaagggaacacttcgagagtaaggatatattataaataagtctctcagcaagatgaacggatgaacagttcaattgcacccacaggagagaggtcttcttggagaatgcttgtttat

SEQ ID NO: 37971 - DNA, 2300 bp, Homo sapien
tttctatttttgaacacgtcttctacacttgatgtgttttttccagcaactcttctcttgaagcatctgcaacagatgaccattggcaaagtaagccagaactttatataccaggtataggtttacaagcctattggtttaaaaatactctgccctaattttcagtgtcttccttagaatagtgccagaatgctgacattttacacctgagtctttacactttttaaatgataagaccttagagtaatttttgtataaggactgcagtatcactttatgtgagattatctttgaacaaagataaattctggtcagattgctagtgaggactggcaagaatgaaagatctttagttgaaatttgcatagtattcatgaattgttggtatacttaccaaaaaaaaaaaaaaggtcctaaagttggccatcaaatttcttatcactctttgtttttatttgatgagaccatgagaaagatgatcattcttttaccaacttatactgacttttttcccctttaaactcaaaatgtatgttccaaaaagagccatacttcagaggtagagaataaagaggatttctactacctgaatgtgtaacaaaaagatcttagattcctagatattaaaatgtgtttaattcttcactgtgtgaattgtttgcccttgggcttttcaaatgtttcacagattatgcggtatttttgtaaactctacagtacttttccacagtctccacactattcctttttttcaagctaatgagatagttttatttaaatagtgctctttgagaaatctagactgcttttcacatattaaacatcaaagaaaagctgtaagcatttaataattaggctttgattgctatgaatgaagaaatagacttgcatgcagcttctataatatcttgtttgttaaaaatctggatgactgtgacagaaaaaagttagaccaaggaaagtctacttaaacttgactataatcatctaagctaaagactactaatccccaaactaccattatattttgagggtggtgatcaaatgttttatgagttatatagtgtatgtgtgtatatatatagctgtacaaagatatatacacatacacatctttatatcgatatatatacacacactcatactgcagatacattctttttcagatgtgaaaaattgcaagttatcatcttactgtttggaaatcgtgtttactcaattctaagatgccgtcaattatgagactatcaacttactagcaggctttctgagagagggagaaaaagacattttgtaatttcatggacttaaaatggaagggagtagggaccgaattttagaatttgagaaaatttgatatatctgctataacaccttttaattataaagaacacagatctaatgtccaacttatattactagagtttaagaaaaagtcagatatgttctcgctttcaactaagttgccatttttaaatagtgctttaattataaaattttacttatctgaaataaagtaaaagtaaagtcattatggaacaaacatagcttagtaattttccctaagatttatactaccaacacagcaacaaccaaaaatcttagaataatgatgagagatgttttaaaaactggttccttttgtttgatgaacagatatatttaaacttcacccagaccctaaaaggttcattcagttgataaacactctcacatacctattttgtgctagacacaatgctcgattcaaatacagctcatgtcttagtcatatcatattaaaaaattaaagattttaggccgggcgcagtggctcatgcctgtaatcccagcactttgggaggcagaggcgggtggatcacgaggtcaggagatcgaggccatcctggccaacatggtgaaaccccatctctactaaaaatacaaaaattaaccaggcgtggcggcatgcgcctgtaatcccagctacttgggaggctgaggcaggagaatcacttgaacccgggaatcagaggttgcagtgagctgagatcatgccactgcactccagcctggcaacagagcaagactgcatctcaaaaaaaataaaaataaaaaataaaaaaataaaaataaaattttaatgtaagaaaattgaaggaaaaaatggacttttgtgttatgtcttcccttactttgttctgtctgtatattcctatattgattcggtagtagcaatgcataattttcccacaaacttcatccttacatgtagagaaagtgttgataaaatattcttgcaataaagtgctctttgcaaa

SEQ ID NO: 37972 - DNA, 2300 bp, Homo sapien
gaggcatctggcacatagtaaacacaatacattttagctattcataataatcatttttaagagcagtataattttatattttctgtatgtatcacagcttattcacctcttctgtattagtgaacatttgaatattggccatttaggttgtttcaagtttcccagaattataaaacaaatttgcagtatacgtcctggcagctaaagttttgtgtactgcctaatttctttaggaaaaatttctagacacaaaattgatgtgtcaaagggaatgtatatttctaatgcttttaatagtatttctaaattgcactccaaaaagattgtagaactatcatttcaatattcttggttgttgaaagtgatctgtgaatcatctttcaaagtgatgtattttaaattcttaccattgtcaactctaataatattaaagtacatttaagtcatcattttcatacataatacagaaatattttagaaatggagccctttgtggcccttgagtcttcattactgattagagataataggctgtcctcttagaggagtgtttcattatgaattttattattttatttaaataagatagcagtgtcaaaggtttcacgtttggtagatacaaatttggatagttttgttttttgtttttttggggtttttttgttttttgttttttttgagacagttttgctcttgttgcctgggctggagtgcagtggcgcaatctcagctcactgcaacctccgcctcctgggttcaagtgattctcctaccctgagtagctgggattacaggtgcctgccaccaggcccggctaattttttgtatttttggtagagatggggtttcatcatgttagccaggttggtctcgaactcctgacctcaggtgatccacccgcctaggcttcccaaagtgcagggattacaggcatgagccaccacacccagcctggatagttttttaacaccatttttaacagcaatttaaaatttttttcatgttgtttttaatagagaacgatacttcacaaaatttgattactgaaatattactagactagatttctctgaggacagtagagagaaagccgataataaaaatttatttacataagtgtagtgtagccatgttccctaatgataaaggttcccacagcccatggcataacttatctatcaggtcctgacacatggtattagcatattgccaccctactactcaggttaaaagcaagactagttctcttttaaaaaaaaaaatttttttttcttcatgacagttggactgctcttatttttaacaggcaggaactttttccccccatttttaaaaacagaaattaatttttattttcagattttatggctggtcttattaaaagtataagaaaatataaaaattactttaaatcccactgccctttgataaagactattaacagttttttgaccacatttgcatatatcatgtctttttgtttatggactttaagtgagctaatcttttttttaatagtggtaaaatatacataatataaatcgtaccatttaaaccatttttaagcatttcatttggtggcattaagtacatctacactaccgtgcaaccataaccactgtccactccagaactcttttcatcttctaaaactgaaactctatccattgagcaataattccccatcctcctcctccagccctggcaacagcaacctaatctttttaactttgtattaaaatagaatatacagaaaagttcacatatcagaagtacactgacaaaccactgacaaaccaggtggaaaggaatgtttttaagtgttagtgtagaggttcctcttttctttccagagccagttgccagttctaatagtacagatttaccttctctttaatcgtcacataacttcaattgataatgttatgtagattgacttgtgactagctcagagctagcgaggctgtaaccaagagcatatataaagtactgtgcagcagtgcgtcacaaggtttttgcatagggcttagtcaaggcttttggaaccgccctcagttgcaccttgtgctatattagtacttctcagacaggaagaattttcttttgctggtgtagctcgtccggttaccttcagggtaagtgtgtacggttcatgtaaatgagtttctcttgtctaactttatgtgattcttatttgattctataacttactgaaattttgggcattttgaaatacaaacttaggaaataaaataatgttccagtataatgcaaaacttctttataatttgtgaagaaat

SEQ ID NO: 37973 - DNA, 2300 bp, Homo sapien
tccaaagtgctgagattacaggcaccagccacctcacctggcctgatttctttcatcagtattttgtagttctccgtgtagagatctgtactagtctgttttcaggctgctgataaagacataccccagactgcgcaatttacaaaagaaagaggtttaattggacttccagttccacgtggctggggaagcctcacaatcatagtggaaggcagggagcaagtcccatcttacatggatgggagcagacaaagagagaatgaggaagacgcaaaagcgaaaaccctgataaaaccatcagatctcctgatacttaagtcactaccacgaaaacagtatggaagaaaacaccccaatgattcaattatctcccaccaggtccctcccacaacacatgggaattatgggagtataattcaaaataagatgtgggtgaggatacagggtcaaaccatatcaagatcttccatgtctttcaacaagaataattaatatgttaattcacatagaagctgaaatagtctccaaacatggccaaccctcttagattcagaaacacaaggtttacacttataaaaaacatatggacccctttcctcctggaaatttactaccagggtttgtagtctaattgactatactcctacagctttaacatctcatatagatgataatcagacctatgatatagtataactagttaaaatagaaatcatatttcagagtacccacattcttcccatgtgcagttgacgggccatattacaaaaacaaaatttggaactccatttctgttttagattgtccacagcttcaagacgaatgttatcgtctacaaaatgtttaaaatcctgaaattatagaaacgtggctttagtctctacccattcaaaataatatgtaatatatggaaaatgtttttgttgaggaagaaagataaatgagactgtgaccatcttaggcctcacaatcagacaacatttaagtcatattggtatttggtgcaaaactggattcataaaaaattactttggcgacaaaatgacacagtagtctagatattgatactcaaatattctgggtattaaaactcagtcttcttcaggttatactcccagctaacttactttgggacacgttctcggtctatactgagtctgtgttcccaggcttaagtcctcaaacttggccgagtaataaaactaaccatgatttctttaagttttagtacctgttatttcacctttcggtcgacaaatcgtttttctcatgttcctctgtcttacatcaatttaatttgtagaccagccaaatgacctaaaaggctagaaggaaacaatttttcctcccctacaactatttcctctagtcctccggctgaaagttgttccacgtcctgggcagagagagccccaccaggcagcaccaccagctccacagagttggagcgattcccccaagaagctcccctgcgcccctcctcacccccagagaccagcagaagaaatggcatctatcccttggaagacactaggcaggagagaacaactgcaagcccttctgctcacacagaaaaaaggatggcggaggtggcgaatgggatgtagcagaaaccccgcggctgcggcggaagggacaccgcccctctccagcctaactctgagccatcttccccctgttgttatagcacttagaacggacgccactgcgcaggtcacaccgtgccgcgcagccttctgggggtcggagtccagaggggctgaggcgcgaaggcggagaccgacttcttagcgggccgcagttggaattagatttctactggggcggggctcgagcgaaccacggcctaatcctcattagcagagaaggataattaccgcaatactctgccctgccctgacagcagctcgtgagaccctgagtctgctgaaggccgcctccagcctgggctccgggcacaggccacacccctcccgccgcgtcctggcctctcccatcgatggcgtgtgggtggggcttcgtgggggcggagctgcgcggggcggggcgtcgctgcgcggggcggggcgtcgcgggctcgtccgtgatgctctgggatcccgcgcttccgagactcgcagtctacgcgagctgcctgtttttttcctgcttggacgcgcatgagggccccgtccatggaccgcgcggccgtggcgagggtgggcgcggtagcgagcgccagcgtgtgcgccctggtggcgggggtggtgctggctcagtacatattcaccttgaagaggaagacggggcggaagaccaag

SEQ ID NO: 37974 - DNA, 2300 bp, Homo sapien
ctcactgtagcctccacctcctgggttcatgcaatcctcccacctaagctccacaaatacctaggacaacaggcacaagccaccatgcctggccctagaagtaattttaacagctgtttttagtgcatgaccaaagggattctcatgtttctactgcgctgcagaagaccatagacatgcacgcctgagggtccacttcaccatgagagttccttgaagacttgtattttgggtaggaaaaaaagaaagattttgcattgtactctctaatctagccatgtgatctttcccttctcctacttttttcctctcctcatctccccagtggggaaaggtcactggtaagataagagcttgtaaaaatacaccttagcagcaaaacaatggtgtcaagattacactgtgaagggtgatcaatacaagcaggagaaaatctattctttttttagttgctccattctgaaaggtttaaaacctgtccagtagcacagactaaggaccaactgcagctgccccaccagtgggccaacaccaaggctgcttgactggcctcaagaatgaatctctggtgtcttaggagggggcagaagaataaaatgaaaaacagaggggttcatggacaggagggtacaacagaaagaaagcacaaagagaagtcagagaatatcaaatcacaaaataatttcatagtcaggtgcagtgattcccacctgtaatcccagtgttttgggaggctatggcaggaggattgcttgaggccaggagttcaaggccagcctaagcagcatagcgagaccccgtctctacaaaataaaaaactttaaaaagttaaaaagaattttggaaagagcagtatcacatagaaaattaatgagactgtatcatcgaggagagccatgtcctaaaagaaaaaaaaaaaagctattcatcatgatgcaagacttcaaaatatgttaatcatcataaaagttgggcagttcatgtggacaatcgccatgcaattgcccataatctatccctgcaatacactttttctatgttgaattttctttttagtttgctttcgtttttctattttctcttttagctttttcattattgtaaattgtcagcattatgttttacaattcactatgctatgtattacatcttaacatcatttctaatactggaggcatcaactatataaagacttttagagagttcaaatttgttttatgcattttttgcaaatatgactcaatcaaagctcattattacaatggtgactgtgtaagcattctacatatatgcaaaaatgtagaaatttcctcgataaataaataagtgtcttttctgtacatctgcatttgtgaaagatgaaatttctcaggatcttggctcctcgggtgactggcacagtggtgacgtcatggtgacccatcctgtcaaaagagttaggttgtctctcatggtatatcagatgaccgcagttataaagctgggtgcacactattaccgaacataattatatgtttatacatttcactttttgaacacttttttttttttttttctgagagacaatctcgctttttcgcccagactggagtgcaggggcaccatctcggctcactgcaacctctgcctcctgggttcaagcaattctcctgcctcagccacccaagtagctgggactactggcgcccgccaccacgcctggctaatttgaacatttttttatgaatacatttcatctgctcatccctatgtgactgttgctagtatacctgaggtgggtgtggccgggcgggaacctccaggctcccaactagcgcctcgccccgcttcggctccagctaggcggcgctccccacccacccgcagcagcccgcctggcggctgggcccgagacccggagcccctgacttggggcccgacgcggggaggcggggatcgggtggccgaggctgagacttcggggccgccggggtgagttgcggggcggcggcgggagggggcgctgcgaagccccgcgaccgccgcgcggaggaagtgctctcttggctgccgccgccgccgccgccgccgccggagccgcgccgcgggggttgcccgagcggcgctgcgggggctgacatgtcgtcccggcctgggcgcgaggacgtgggggctgcgggcgcgcggcggccgcgtgagccgccggagcaggagctgcagcgacgtcgggagcagaagcggcggcgacacgacgcgcagcagctgcagcagctcaagcacctggagtccttgtgagtcccgagctgccgtccgcgcgcggc

SEQ ID NO: 37975 - DNA, 2300 bp, Homo sapien
attttaagtttttgtcatccatattattgttttgaattcttttttaaaaaacagactcctggaaaatattctaacaagtactcttttatttttatttatttatttttgagacaatcttgctctgatgcccaggctggggtgcagtggcacgatcctggttcattgcaacctctgcctccctggttccagtgattctcatgcctcagcctcctgagtagctgggattacaggcatgcgctaccacgctgggttaattttttgtatttttagtagagatggggtttcactatattggccaggcttttctccaactcctggcctcaaatgatcctcccgccttggcctcccaaattgctgggattaccggcatgaaccattgtgcctggccctaaaatatactcttagatttgggtttctaacaacttgaagatcaatggacaatataacaatttccagaactgtaataaaaaagtgggttcatgaaactattaatcaagatcaggcagaacaagaattaattacgtgagtttaactaatgaagacaatgtttttatgatattatttcaaatgttgttggttctttactcaaatagttttttccagatttaagaaaatcttgtcttttaagctatttataatttacagcaatttgatagagtatacttgtgtaaaaaaagataaaaactttttttctctttacttgattcctccataattagaaaaccatttgtgagtcttcttatggtaatatggtcatttcaataagtctaataaaaatctgctctctctgtatagcagaatacaattggaaactggttatattaccaaggctttgactgaaaggtcatttttaaaaatattgaggccggacgcggtggctcacgccagcaatcccagcactttgggggactgaggtgggtggatcgtttgaacccaggagttcgagagcaacctggacatggcgaaactccatctctacaaaaaatacaaaaattagccaggtgtggtggtctgtgcctgtagtcccagcttactaggaaggctaaggtgggagaatcgtttgagcccgggaggctgaggcttcagtgcttcagtgagcagtgatcctgtcactgcactccagtctaggcgaccctgtcagggagacccagtctcagttaaaaaaaaaaaaaaaacccaaaacccaaaaaactaaaactagaatggtattttctactgggaatgtggatttgtggattgatggtgaaatactggaaatttaaagcctacactagaatccattgaaaaaagcaaacaagaaaaacttcaaggttggctacattgaatttgaatgtaaagattaaaaaaaaataagtaaaaaacaaaagaagacatagatccaatcccatataccaggaaatgcactctaaggtatatacggaaaatatatttaacacatgtgtatcaggacgcaggcacaagtaacttcaaagcagcgctgtttcaaatagtaaaaaaaggaaaaactggaaactgttcaaaagcttcatcatctcgatgatcttggtcttccgcctcgccttcttctccaaggtgaatatgtactgggccagcaccacccccgccaccagggcgcacacgctggcgctcgctaccgcgaccaccctcgccacggtcgcgcggtgcatggacggggccctcatgagtgtcccggcaggaaaaaaacaccgcgattgggactctcagaagcgcaggatcccagagcaccatggacaagccagtgacgccccgcccccactaggccccacccacacgcaccgaggggagagggcggtcacgcggccgggggggcgtggcctgcccccggagcccaggcaggaggagggtcttccttaaggaactgctgccaggacagggcagaggattgcagtaattatcactctctgctaatgaggaccaggccgtggttcactcgagccccgccccagtagcaatctaattccaaccgcggccctctcagaagtcggtccccgcctttgcgcctcagcctctctggactccagcccccagaagtcggcgcggcacggcgtgacctgcgcagtggcgtccgttgtaagtgctatgacaacagggcgaagatggctcagagttaggctggagaggggaggtgtcccttccgctgcggccgtcgggtttctgctacatcccattcaccgcctcctccatcctttcctcctcggtgtgagcagcaggacttgcatttgttctcgcctgcctagtgtcttccaagggatagatgccgtttcctctgctggtctctg

SEQ ID NO: 37976 - DNA, 2300 bp, Homo sapien
ccaatttcttggccaactttgtataaaaacaaatgaccttggtttctatgattagctcatgtggaatgcttactttaagaggcaggttggtctacattttaaaaaagtagagctgatcctcattattggcagactctgtatcatttgtgaatttgcctacttgctaaaatttatttgtaacccccaaatcagtgcttgcgatgcttttgtggtcatttgtgatcaagtgcaaaggagtaaaaattgagtcacctgatgcacatgttcccagctgatgttaaacaatggctttcttgtttcagttctcataccgtaaacaagtgtcctttcatggtctacagtatttagtgtcatgttttctcccacattttcgtaggttgtttttggagggggatgtggtgttttcactgtttaaaatggtctgcaaatgtaatactgaagtgctgtctaatgttcctaaaagcaagaaggctgtgatgtatcttgtggagaacagacagatggtccctgacttaccatggtttgacttatgatttttcaactttaggatgttgtgagagtgatacacattcaatagaaaccatacttcaaattttgaattttgattttttccctggtatattaaatgtgtttttgacttaaaatattttcaatttatgatggatctattgagatgtaatcccatcataaattgaaaagcatctgtacatgaaattagataaggttagttcagcctgagttctagtgctggtgggcatgattcccatagtaatgaatcagcaatacatattaaataaggtatctttaaatagaaacacacaaaaaactacattatgtattgattggttgaagaaaatgttgttactagaagcttgcaggaatctgtctaaccctgtgtttctcctaggagcaatggttcagtatttgctaattcattgtttatggcggccttatacagaataactttcgtgaataaggagaattgactgcacttcgtagctaccatttaaatcggtgtaacatgaaggaaaacctcatttatgttaaataaatgaactgttgtagagtcccagggcatgtgatgctgtgttgtaattcaaaaggtccaagtgctttcacatctgccatatcagcaactcagtggtaggtagggctggtatatgctcattctagataagaaatcaaagtaaggagaggttgtttgggttgcccaaggacacacggatagttagtggtataaatggtcctgcagcccaattttcctgcttcttttttggtgtgaatttccctcttctatcttgcctttctataactaacatagcaagaggaagtgaatgctttttgagtacctatagcataccagttccagggctagtcactaatgcatttgatctcatttgtctcagcaactctttgtaataggagatggagttggccctccgtgtccccgggtttcacatccatggattcaaccaactgcagattgaaacctgtggatatggaagactgactgtactaggtatactaggtcattatatataataagggacttgagcatctggggatttttcatctgtggggtcttggaaccaatcttccacaggtacaaagggccaactctagtgcagtctcgccaatgactagactgaaaggaagttaggtatttcactgaagacttacatgttaaatagtgctgatggaatttgaatcttgatcctccaaagaatctgttcttttgttattttctgcagttctctcctaaatgttttagaagagagaattagcacaacataaatgtataatttctcagcccaatttactaacggtgttgcaaaatatctgattaatgcttccagccatttggatttgtggtttcaaatatgtgtacaaaatattaaaaagttaatatagaaatgtccttctcagatctgtccaagtttaatttgctatgccttaagacataattattagttcatagtgtgaagtagattattataaatgttttctttttagtgtgaaagaaaatgtctttatttaaagcccgtgattggtggtctactattctgggagataaagaagaatttgatcaaggctgtttgtgtctggctaatgttgacaatagtggaaatggacaaggtaagcaacttacaaccatacatcttggatgaaagttttaaagagatcaaataagactgggcacggtggccgactgctgtaatctcagttcttttgggaggccgacgtgggcagatcacgaggtcaggagtacgagaccagcctggccaacatggtgaaacact

SEQ ID NO: 37977 - DNA, 2300 bp, Homo sapien
tgttgtggcatgtaaatgaaataatgcacataaatttgttagcatggttccatggatatagaaaattgctaatggtttttatcattaatgttattcataatgtatttcatttcttttattgctgaacaatatttcattgtatgaatatgtcacattttgtttattcattcatcatgatgggaatttggattatttctgctttttggctattagcatattgttgctgtgaacatttgtgtataagattttgggtggacctatgttttcgtttctcttggtatagaattgtgaagttatatgttaaatttatgtttaacctttgaagaaactgccaaacttttcttagagtagctgtaccaatttacattttcactggcaatatatgagggttctagtttctccacatcattgctaacacatgttattgtctgtcctttcgattatagccattttattgggtacgtagtagtatctcattgtggtttttagtttgtatctccttcataactaaggatattgagcatctttgcatgtacatattgccaatctttattcttttgagtaaagtctgtttagcttttgtgcacagtttctacttgatagaatattttaatctattacttactgtattatgttttgtgactactcattttttcctcaggtaatattttctaattatttgctagttatgtttaagtagttacgatagtctatcagtttgaataaaatgtaattttctattgataacaatttctgtttccttaggtcacactgcagaacagagtgatattgcaaaaagccaaattatcagtctacgtgcaaccaccattagaattgacttgtgatcagttcacctttgaatttatgagtaagttttttgttttggctgaaagtctaccatggtgtgaattttttaaaaatactagtttgttcatttaatggctattatttcatgtctgaatggtgagattgggatcgtcccaaaatcaatgattgtgttgttttgcttatattttccctcttagcatcagcatgaacgttcaatcaatgattgttgggtcaaattaatcttttacgattacagatttctaggtgcttttctgaacttgttggacctataattgtttttgatttatttatttatttttgagacagggtctcattctcattggcccagactggagtgcagtggcaccatcatggctcactgcagcttcgacttcctgggctcaagtgatcctcccacctcagcctcctgagtagctgggactacaggaaaacaccacctgactaattttttgtatttttagtagagacggggtttcgccatgttatccaggctggtcttgaactcctgggctcaagcaatttgcctatctcggcctcccagagtactaagattacaagcgtgagccaccactcctggcctgtttttagatactaaaatttagaaggctttctttattggtgtttctttagtgatctatttattgaatcggtaatgtttgaagaattaatatggactttggagtttggcctgagtttgaatccagctctaacactcacttgatgtgtaaccttaggcaaaaactacattagtaatcacttggagcctcatttattttaatctgcaaaaagggggtaatgatatttgttttacaaggttgttttgaggatttgattaaaaagtaaatctataaaagatatccataataatgcttaaaatagtagacatgtcattaatggcaactcttagtaaggtttctttgtatagaatctcttactcccaaccatttatatccaaattgtcattagtcctgttaagataatctgaactacctttcaagtcttttttctttttttagtttactatagcttttctgctaaggcttctatctcttattcacgaagtcaagaacatatctttctttttttgcctccacataaccaacccatagctgagtgcctgccgttagtaggaattcaacaaatctttgcagaatgaatgaataaacgattgagtgaagtaacctcataggtgatacccagccattgaacttttgcttgcatttctgattttgtataacacttccaatttgtctttctaaaatacattctaaataatttattttttccatttattatggctctctaatacaggttgggggccagatatgttaacatagatgagcacgcacaatctgttaagtggctactgtgtaacactcctcatccattttctccttcagtctatgttctacccatgataaattgctattttcctcccaaattctcttgcc

SEQ ID NO: 37978 - DNA, 2300 bp, Homo sapien
ttgtcttatattgtgagagtaaaagaaaatcttaatttgggaaatatagcactaaaaatttctggaagggaattgggcatgtgctcttcagtgagaaatgatttttgttatagtcctcaaatccacaatttgctgtaaattccaggttgacctgtgtatggcttttagaaaacaacagcggtgggggagtgggaggcaactggggaagggaaggggatgggagaggaggggagggaagggaagggagaaggtgttagttaaatgtgcatgttacactactttatcttttccacagcccttgtcgttattggaaattaacttatccattgggttttgtggggattttttggtttactttgtctagtctagcattgataactgggttttcctttgtttccagaccttggctttacccaagtcctctaccagagcccctgccttaggagcctgctgaaagtgtcactccttgatagatagctgcctagcttctgcaagatccctccaaggaaccggactcaggggccgaggccctgcctgctacctgacttctccaatgccaagttgcctgctgtatgcatcccccaacatggctgcccagtcccctgtttccacatcttaccagcctgtgcagaggctcctacagtccatgctggtcccagatgcctttgtgtaccagtgtgattgctggtgtgccctttttctgtgagccagctctttaaattcaaggacctggccttgcctagtctgctcctcctgactgaattcagctgagctatgcttcttgctatccagagaccagagagccacagctgaatttctgactgctttgctttactaccctgctagtctccactggtcaataggcctaaataccagatcaagcaagtggcttattagaaacagtaagaagcagaaagtttgaccacacttgtaaagttaatttcctagggtatcgaccaaagtaaccaaagcacaaaataaactaagaaagtattcccatgccacctgtgaatcaaaacagttgagttgatgatagctgtcccgaggctcctgagttctgacttaacctcactcacctcatctgccccttcactgtgtgagcttagataactcatttaatctctctagggtacacgtgaggtctccacaaaacagcaataacactattcattatgccaaacttatataagtggtacggcactctgaaatcttaagtggaagagactatgaaatgagaaaatatattcaatcctacttttttttaaaatcagaaaatagaagtatgtaattgaaatctaaatttccaagtaatatccttaaactttttttcaaacaaattataaactcctacaaacctatgtttataatagaaacactaccacatccttaactacagtggtatagggaaaaaccacaaaatgccacagtaacatttattaccaaatgtgtacacagttaaacctaagagagagagaaaaggttaaaaaacaaaaacaaacaaacaaaaaaccacgagacctgttaaaagaacaaatggagattttgtggcaggagtccagatttcaagtgaaaagagaagactctcagaaatggcccatgttgcattgcatatatgaaggcgaaacaaccttcatatcatattcatttatcttaataacaaactgtattaaagggaaaaaaatttcctcttcaatagatgtaaaggatgcaaaatgaaaagtgtttggtatttataattgatccacagaagattatggttattactttgtatcatattgtatggaattgtattacattatatctaaatacttattagattatatctaaatattatatctaaagctaatcgtataatgggttattgtaaaccccagaacaaataaaacttggtactttagttctaaattaaatatcttggaaagtacagggccttttcaggaaacatctaggttcagattatttccaaatattatttgcttgactgtaatcagtgaaatccccttgtcatgcaaagagggctcaaaatgttgagcaattcacctttgaaaaataaaacagcccgagaggaggagccaagatggccaaatagaaacagctccggtctacagctcccagcgtgagcgacgcagaagacgggtgatttctgcatttccatctgaggtacctggttcatctcactagggagtgccagacagtgggcgcaggtcagtgggtgtgcgcaccgtgcgcgagccgaagcagggcgaggcattgcctcacttgggaagcgcaaggggtcagggagttccctttccgagtca

SEQ ID NO: 37979 - DNA, 2300 bp, Homo sapien
atgtgaattctacattaactatagggcataagaaatttcatgtttcttttattactttaagctaaatttgatatgccactgtagccatcctgccaggatggtaggaaattcagttgcagactttcctgaaatgccccttcctctcagttcctgtggccactcgcccagatcgtttggatagagtcctctggtcttcggtccacaggggtgactactgatgtgctcatctgctaagtcctcatgctcctgggaggctggtggctccaccattccttggcagagctttgccattgctacgatttctccctgaggccctgtcacctcccgagggttgccagagaaggagagcctccacacctgggatcacagctcccttcccttccagtcccggggagacactagaatcctttgaaggttcccttttctatcaggactgtctccttctccaccttttggagaagatgaagggtaatctcccttgagagagcctgtggagacacaatgatggcctctgttctttaggaatggggaaaagataagttatctaggttaactgggattaactaattctgttactgagctgggtgacaagatgggattggggaatttgtttggggactcagtgaggacatgcaggagacagattcaaagaatcacatgtgaaatggacagggctctgatccctctaaaatatctgttgctttccttcttccacttcgacccctatcccccataattcttctgtctttttttggagacagaatcttgttctgtcaccagcctggagtgcagtggagcgatcttggctcactgcaacctctgtctcctgggttcaagagattctcctgcctcagcctcccgaatagctgggactacaggtgtgtgccaccacgcccagctaatttttgtatttttagtagagacggggtttcaccaggttggccaggatggtctcgatctgtggacctcgtgatctgcctgcctcagcctcccaaagtgctgggattacaggcgtgagccactgctcccagccaattcttctatctttaaaaggtaacccaggttgggagggaaggctgggagcacagcagaagacagaactgctttgttgagccccagaaccggcagcggatactccctgccaatcacatggcactcacctctttgtgtaaatttagaaggtgcttgcccaggaacaatctggcttgactgtcacagccatcctgcaaggtaagtggggcagtcgttaaccccattttccagataaggaagctgaggctcacattgattaaaagacttgcccaaagtaaccaagctgttgaggggcaaagcagcaggacatagcatccaggtctcttgacttttgcttcaagagcccacagccacactcggtgcttagatgaggctttggcttatcagtgatttgtgatgtttgccttttgccaaagagggggatggctgaagagctagtgccctgacattctggactcttgccagtagattttgtctgactcttgctctgatgctattctttgttattttcaggaaggggagctagatgtagaatacatttctttttcttggtaacgtgaacagcaagaagcaagtagagtacatttcttatgagagaatatgctcgggactttgattcatatctggtgggtcccaaaagaccagggtactgcagatttaagaccatgttgcaaattcggcatgcattcaataggactaccttagtgaggggagtaattttataaaattatcaattcagtctcaaagaataatagcaggaaatgtatttctgactatttagaagtgactcattgtgggactgtttgaaaactatattatttttatcagtaaatagaattgcctatagtcaatgttatctcttcacatccagggattctaagatccggttacccatttccctcaaaacagcagatagcaaagccagggaaatgaaaacccaccaaaccttctgcaaggctgacaccacccctaaaccccactgcaaactgataacaccacaccctcctctgcaaaataacagaggggcagataagatgaaaattttcattccaattagcaatcatttccagtcagtgaaacggcagaatcagaagaggttccacaaccagaaaatcttggctggaatttcaccatcaggaataaaacagaaaaactaaaagagtgccccagatagcctttcttaggggcctgtgtcaggtaagtgcttttgaatatttaaaacaaaggatggctaagagttctgcagtcattttccagttaaatatcag

SEQ ID NO: 37980 - DNA, 2300 bp, Homo sapien
acacaaatgaatgctgattgctgcaggcagccatcttataaccaagaggcaaaacagccttgggacagaggctctgttgagagtcagaagagaaggaccaaagctgtgagcccagagcttggcctatagtcagcgttcagtccacgtaatctaagcagcagcctgggttctgttgatttggagaggaaccttcctttggatttgtaccaaaaggattctggcatgttggccagtgagaattggaagggctactctatttcccgtagattgtgtaagaaaagaggatttttatcacgtgaccagccctaaatgattgttccccttaaaaccaaaactcaaatacaatcgagacattggcctttgtattcaatgcctgtagccataattcattttctgtcaaaatacagggtttttttcctgccaaaccgttgaaatcacaattttcaaaagtttggcaaggaccattttcccatcagagatagcatatttttatggtgatttttgcccattacattgtaaaacaataatagccaaagtcttgcttctggtcattgcgtactctgagtatttgctagcaccaccacaaagtgacacttctatttcaagccctgttttgaggatgtgataacaaagtggaaaaatgttgctactggctataatttggcagattagacttaagcttccaaggattcttctcaatacagttttgccaaaattcagacacacacacatgcacacacacatacacacacacacacacacagagcttgtttttttttttaagaaaataaaacaaacaaaaaactgcatgaagaagaaagaagaaaacccttctacaaagtgctgaagtcttgctttcttctagtctctcataagcaataacctggctttaagatatgagacaagacagggagttcatccaaagtgatgccctccccctgccttttttgatggagttttgaaataaggagactaattggcaaatatttaaagttgaggaaaatggcaaaatttgtatgcttttgaaatagagtcataggattcatcattgtgtgatctttatggtgatttgttttatctcccaatgagaagagaacccatgcttattcaggcttgcccatttgggcaggtctttgcatgtcctggtagtatccaggtgaatctccatggtccaatgtcagcttggtttctgcactagcatctagtccctctatgatcatcagtgtctgagaagtctgagtcccagttaaggttaactgtaaaatcctgtctgttggtacaattcattaaaagacaatttacctataatagctacttaatgtgtctgcagtatattttcaccatagacagaatcaatagagatgatcaataaaaagaattatcacaaatttcctgacaactccatggtggcagcagctgggaagccacagcaaaggggtgggcctgttggtcgggctgcacggggtgagagtttgtctctcagcccttggaagacagtctagactggttatcttgtagtgccagccttgtggctctctaagagagctgcccacagttccttttctggtttatccacaagacccattaccttgatctcctcctacttcctcccctggctctcagcccttccctgagtagagacgggatggggtgaggctttgagcctggtctgttttgattttcattcttgttaaccccaaccaggaaactcttcacaacaagggcagccagctgcccattcacacacagtgaggttgccctgtggagttatagcagaacaaacatatgctttcattcctgagttcctcatattgtttatttacttgtgtttacctacgttatccatgcacaaaagatttgagccatcttactatcatgacaacacatcctacactgtacaaatggaatcagaattcaaggtcctggaccagaacacatgggactgtttagtggctacaacagagttgcacaaaaggagataatgattgcagacagactcccgaagcctttgaatgctgagtctacctaccatgagactactttcttgggacttatggttatgtgagtgaatgaatgcttatattatttttaaatattggaaattatgtttattgcagccaaccatgttctactggtacagatagtcccactggcacagattatctctattgtatgggtgaaggcaattgaggtttgacaagttgactcagcaaatgagtggcagtatctgggctttttcctcctgtctgacccagagtaattttttaactttccctggagtcctgataaaaaacgcagat

SEQ ID NO: 37981 - DNA, 2300 bp, Homo sapien
gaaggcagatctgtgtgcttttcagtgcaggcattcttttttctttttgaccctggaatatctccgttttgtgtagacagagaccagttgtcagctgatagactatcacttgaggggtgatggcagcagtagatgcatgggaaaacatcttgataaggccttggagaaaaggctgctctttcggaagcagggcccatttgccaagaaggcagcaagggaaatcgctggtggcagaggcttataacaaacaggaagaagagacaggtttgccaaaggcttctgtgcatttttccccttcgcaaactttcagacagatgaaaatgtttttaaggtggtttttgggtttgcacctacagggagagttccagtgcattccaaagcaccatgctgcacattatggaaatgccacacacagctagattctatcataaagaaatttgtcatgcaaattctgaggatgtttggctggtgtcagggagggaaggcatatcaaagtaactcaggcacacccttcaaatgtcttgcaatttcatagcatgcatttatccaaatttatggctaaggcaacaaaaggtctcccagcttccttattcttcagctttccataattaaattatgataaacaactttatctaaaagcctcatccagggacaatctttttagatagaggagatagtggttccaactgattgtacttatctgcagcaataaaggtttctatttatttaatttttaattttaattttatttattttttaatgagtccctgggaagtaaggctggatttagagatttttctctttttgcatattatctttatgattagtaaatacataaacacactggtttccgagaagctgcctggccatggctttatttgggtggggggagggagggaaggaatcacacatcagccttctctttcaatttaaattttacggtaagaatctattttgggagggaaatggagcatgctaagctaatgacagttttcccttctcttatttttcccacgtcacagcaacgtgctcgcatcagctcctcggtgtgtcgcgatgttggcaatgttgcactaattaagtgaagtctccaaatcactcgaaaaaacgaataaacagtcaacgaggcagggaagggttaaggtgaagctagattaaacctgtcagcaaacagactcatttattttcaaagctgtagtttccacaatggaaacaacccactttgcctggagacccttaggtccgttccgtggggacccggtttcaactcttggacagaggaagtcggtagtccaccgtgagctcaaggacagctagctgatcgtcaggtcccaacacttgccaagcgtccctcactcccacctcgcgccttcgtactttggttacaaaaatcatctctctgcgattgcaccccttttgagtagagggtgccactgcgtggggaggaggcggcgattcagcagggggatcacaggagctgactccccgacacccagtgctgcagaggcgagagggcgcagccgggctgagagagcgacggagctccgagctgcagaggccgccgcgcggcggcccccgccagagatgagcggtggggcgggggttcctccctcttttcgggtgaatgaatgattagtcaaacaccacctccccgccccggtccgcccgagattggaagggaggagtctcggagcgactgttcattttttaaggacgaaaggcgtttgcctcggtacgtttttaaatcgaccttgtgtgtgtttcaacttcggtcatccctagtgtcaggacgcgcagacagctaagcacagaacacatctctaaggccacttgcccctctgtccgctcagccccctgagttcgctgtcgcgcccccgccagagggaagcaaagcagggcatgaaaagttgcgggggccctactgccccgggtgtgtcgctccttcccaaaggtggggcacccgggagcgagcagggtggtggggcgcccctgcgtcccgtttgctgctccctcgctggattggggcacccgggcctgagcgctagtgctgcggcatccccggggctcccccaagaaagggaggaggagccgcgctcgcccggacagtggagacgcgccttctcggctctggtccgcgccctggggccctggcctccctggaggggctggggaactggaagctgggccgagagagttcccgctgcagctatcgcgcagtccctcctgcgcccgggcgcccccagcgggttccgggaggcgcccggtgagcccacgtctgttgcggcggagcgagcgcgctc

SEQ ID NO: 37982 - DNA, 2300 bp, Homo sapien
aactttatctaaaagcctcatccagggacaatctttttagatagaggagatagtggttccaactgattgtacttatctgcagcaataaaggtttctatttatttaatttttaattttaattttatttattttttaatgagtccctgggaagtaaggctggatttagagatttttctctttttgcatattatctttatgattagtaaatacataaacacactggtttccgagaagctgcctggccatggctttatttgggtggggggagggagggaaggaatcacacatcagccttctctttcaatttaaattttacggtaagaatctattttgggagggaaatggagcatgctaagctaatgacagttttcccttctcttatttttcccacgtcacagcaacgtgctcgcatcagctcctcggtgtgtcgcgatgttggcaatgttgcactaattaagtgaagtctccaaatcactcgaaaaaacgaataaacagtcaacgaggcagggaagggttaaggtgaagctagattaaacctgtcagcaaacagactcatttattttcaaagctgtagtttccacaatggaaacaacccactttgcctggagacccttaggtccgttccgtggggacccggtttcaactcttggacagaggaagtcggtagtccaccgtgagctcaaggacagctagctgatcgtcaggtcccaacacttgccaagcgtccctcactcccacctcgcgccttcgtactttggttacaaaaatcatctctctgcgattgcaccccttttgagtagagggtgccactgcgtggggaggaggcggcgattcagcagggggatcacaggagctgactccccgacacccagtgctgcagaggcgagagggcgcagccgggctgagagagcgacggagctccgagctgcagaggccgccgcgcggcggcccccgccagagatgagcggtggggcgggggttcctccctcttttcgggtgaatgaatgattagtcaaacaccacctccccgccccggtccgcccgagattggaagggaggagtctcggagcgactgttcattttttaaggacgaaaggcgtttgcctcggtacgtttttaaatcgaccttgtgtgtgtttcaacttcggtcatccctagtgtcaggacgcgcagacagctaagcacagaacacatctctaaggccacttgcccctctgtccgctcagccccctgagttcgctgtcgcgcccccgccagagggaagcaaagcagggcatgaaaagttgcgggggccctactgccccgggtgtgtcgctccttcccaaaggtggggcacccgggagcgagcagggtggtggggcgcccctgcgtcccgtttgctgctccctcgctggattggggcacccgggcctgagcgctagtgctgcggcatccccggggctcccccaagaaagggaggaggagccgcgctcgcccggacagtggagacgcgccttctcggctctggtccgcgccctggggccctggcctccctggaggggctggggaactggaagctgggccgagagagttcccgctgcagctatcgcgcagtccctcctgcgcccgggcgcccccagcgggttccgggaggcgcccggtgagcccacgtctgttgcggcggagcgagcgcgctccgggagggccgagagccggcggggctggcaggaggtgaggagtgcgggagtggaggacgctgcggcagcgacagcgacagcccccgaaacagtagcggcagcccgggcggcggctgagcggcagtgcgcagtcggcagcgccgcagctcctctcagtctatctccggctgccgcaacaccccttcctcctggccccctctccggcgctgaggggctgactgctaagccactgcaagcaactccctcaggaaaaaaaaaaaaaaagccgcatcggaggagcctggccgcaggacccctcctccccgggcgcccccacaccttggtctctccccccgccctccctcacacccccccgccccccagctctcgggcgcccgcctccctccttcgcggacggtctcccgacacgccggctgagagcccttttcgactgtgagctgcggcagctgagcagaggcggcggcgcgggacctgcagtcgccagggattccctccaggtgacgatgctctggttctccggcgtcggggctctggctgagcgttactgccgccgctcgcctgggattacgtgctgcgtcttgctgctactcaattgctcgggggtccccatgtctctggcttcct

SEQ ID NO: 37983 - DNA, 2300 bp, Homo sapien
atgttatttttggctacagatcattttcttattgctatatagtatttcattgtgtgactacatgaaaatttattcatccagttgatggacatttgggtggtttccagtttgggatgattcattgattttgacatcatgaatatttaggttgcttctgatacgtttctttaatactttgcgaaggcatcattttgcatgactgcttgtatagatacataaatgtttctcttgggtggccacaggttaaacaatggtctatctggatcatgaatggagagaaaaggaaacaaccagaaagctctctctccccacctattctctgtccatggcatctgccactttctctcactctgcccctaccacactgtgacctaaccagcttctaccttctcccaggagttcctcacagattttgtcttataaacattttcttgaagtaaaacatacctacagaaaagtgcatatgttttaagtatgtagtgcaaagaatttatgtgaattgagcatatgtaagtaacccagatagagatgaaaaattattagcatctagaaatggaacaatgcattagaggatatgtaattccagctttactaaatactgctgaattgcttttcaaaaattaccacatcaactaactctcaccagaagtaaagatgtacacccgtttcccttcaatcttgtcagcacttggggatagccacacgctagctttcactataataataggtaaacattcttactggttttagttattttccttaatttttaatatggttgagcctatcttcatactcatttgttagttggaatatgctgcacttgttttgctattgagttgttgtcctgttttgaacctttccttaagagtccacagcttatccagttttctacacaactcacttctgtttgctgcccttcattatagactcaatgccttctcattgctagagcactgtgccctccttggggctcgatggtttataataaagcttccccaggagatctcatgggggccaggttctttagtggtggccactaaagctactacctcttattccaggtgccataaaccagtggctggacctggttggttcacagagtgttctcaatgtgaggaatcaggtattgtgcttggttgtcatataagcagcttagttcccattgttttatacctggcctgctaccctcattcatgttaccttcatgccccatagacatttgagatttgatgcaaaccagtctgttacagtaaaagcaccactgtctaggaagttctggagatgggttatcagctcatttacatcagcagctgcgggatcttgggcaagtcatttcacctattggagccactctctgctagcataaaggagaacataaagataccttccctgcctatctcacaaggttgtttgggaaactgaatgaaagaacgtgtaaatgtgctttgcaggttttttgtgaaacaggaatagctgttagtattctcgcctagccctgtctgtggtgcccaggatgctgcattacctcctttctaccctcgccctgagtattggtcctaggtagaagctgaggtgaatatactgaaagcagtaagaatcttcaccaggcccctcccagtcatatcacaaggtgttgtagcttattgacaaacacagacctcatgtttctctgagaaccgccctgtgaacacctagatagaactaagggtgtgaaatacaaacgtactatttgcctacacttacggaaataagagcacatgacacagtagatggcaaggtgaggctttaagtcagaaagcaacctcagctgaaacaaatgcataattataatttgatttcagaagtggaaacatgacccgaattcatgcacctactgattagtccaaattcctttattgttgaagctggagcagaagtgggggtccaccgtggaagtaaggaaaagcaaaacagaacaggggtctcatccagggagccatgtcgatggctatggggagctccaccttgctcttggggtggggccctggccctgggtgggactgtggggtgatgagggttgtgctatgctggctacctggtggtaattgccaaggagagagcagcacgtagatcctccctgtcatcaggcagagctcttcagtgaggtgggctcagggagggctctgtgcctccgttcagcagagctgcagctgctgcccagctctcaggaggcaagctggactccctcactcagctgcaggagcaaggacagtgaggctcaaccccgcctgagccatgccagccaacttcacagagggcag

SEQ ID NO: 37984 - DNA, 2300 bp, Homo sapien
gttaaatgagatagtttatgtaaaatgtttagtaaaatgcttgccctataaaacctgggtagctgttgttggtgctgatgcaatgaatagggccaataactagacagagagctgcaagaactggggatgagatggtgtgtcttaacataagtcctagactccttgccaacttgctagaataatgttttctgcaaaaattgacacataagaagtagaggctttctttaaactagatctaaaatgaagactggctattttatttgctataatgcatgccagctaatccaatatatttgattaacacacttgatcagtctaatatattagattctcactatggaaacagtggtgattaaattaactgatggcggataaggtgaaaagaactaagccaatccttgagagactagaacacaagatagattagttcagggattgggccactatttattaacaggattgctacttatggggcaattctgtgttaggatagatggtcctgtgcaggaaatttggcatgcctgggctgtgcttactaaatgccagaagtaacccctgctgccccagtctttgtgataactccaaatatcccaccatttccaaatgccccaggactgcttcctgtgaagaactattgaggtgtggaaggacatctagtggtagattgggaatatgacccagcatttctaggtcagtttcagtttatacccgccatgattatgcctgtggccctttctcttaaatatgccatggttttacttggctcattggagatggctgattcctggcctggggctgggaaaaggacaagataagcctggaacatcatgttgtgctggcaagtgaggacatgcccaaaaatgctgagaaacatgtcaacagaaacacgcaccaaattgtagggctcttgctgaccccagtcagcaatctaggcataaaaagaaataactatggcaacaaattataacccacagaataaaagaagaacctatgatgtaaatttaaaaatgggagagaagggaaatttcttccttaaagtagagagactgctaataagtatagaagaaataatgaaattagaaaatcatcatttggaaacctttatagcattgattcagacaggaatctacactgtatggtaagtgctgtgagtgaaagtttaaggagtatcaggatggctatgtactcttaaaatacttgtcagttgcaaaaggaaaaatagtatctttacagtggagaaatctgacaataacatcactagtaatgggacaaattgatatactgtgtctgctgatactatatactaagaggaacatagcatcattcctggtgtataactctcaaaagcacataaccttaatctattcagaaggaaacatcacacaaacccaaagtgagagaaactccacaaaatatctaacctatgctatttaaaaatgttgatgtcataagatacaaagaaagaccaaggaactgttctaagttaaagaacactaaacgtacatggcaactgaatacaatacatgattcggggttttttgtgctaaaaaggatgttcttgggataattggtgacatttaaagcaggtttgctgattacctgggacatttttagatggatggataggtagataggtaggtattatagatagactgatagaggaaatgataaagcaaatatgaaaaatattaacatttcaggaatatgtgtacagggtacatgggggtatttgtactactcttgaagattttctgtaaacctgaaattatgtcaaaacaagaagctaaaaatgaaaaatgtcctggttgggaagacacatatggttgctcaacccataggggaagagctggcagaatatgatggctgtgacctctgcacggtactgaagatatgggcaacatgttgagcaagggctgctgttatattgagaagtgagctttagaattgttcagcaagtttcttcttgttcagaccagtataggctttcctggtaagctactgtgcaatgtatttgttaattattagctcagagagagattcagcaagtgggcttacatctgttcccatgaaacaccatgaacttcacactctctggggaggtctaggactcagaaatatagatgttagtaagagcaaacagacataacagataacacatacaaagtgcctaccacatgctaaccactgctgcaggcactttctatagaagaactaatttaatcatcaccataaccctatggggtagatgatatttttacaacctccattttacagatgaagaaactgaagcatagacctgg

SEQ ID NO: 37985 - DNA, 2300 bp, Homo sapien
tcacattctaaattcctgaggtttcctttggcatttctgttctgttggatttccctgtccatataattctctttcaatgattttagtattataattatagtacttactgcatttatttgatatctgatagaggaaggatgtcttcatccaattttttttttggacaaatattctaacttttaaccaaagccaactgcactgaatagaatgaattcacttgtgtttattctctctgattgcttttgctcttccagaaaaaccagggtgtggagactgcaccagtggaagggaagcactaggatctgcatgggggctggaattagccccaagctgaatgactgggtcttcgtgggttgaaaatttccaagcagcctaagcacatctcttggttacactggtcagtcagtgtgaaggtcagccacctatgactctgtgtctcactggaccagattgtcaaacctggttgaacattaaaaatgcctgaagagcttttccgaaataataaaatccatgccccactccagatggagtgaatcagaatctctcagggaatggtgtctgggtttcggtgcattgtaaaacctccccaggcgattctactgtgtagccagggccaagacccaaggccctagactgtaagctgcctatagtcaggaaccatgctattcattctttgtcatttccagtccctgtaccactcctgacatgcagaagagtacagaagaattgaactgaattcaggtgaagaacccagacttatgtatctccactcatacttctagggaaagagacacaagttatcagtgcccgataatacttgtgcatcctcttggtggcctcacagtcttattggaaaaagtagctttaagagggagaaaacaagctctgtcttggtccaacaaaagtttagctcacagtctgaaaagaggagggcttagggagaatccagtctatccccttattttaacctcttggagcccagggattagataactttgccaggtggcacagctcttagtggtacatctggaacagaaagtagctcttcttattccagatatttgtggtatagcttgttgtccttgtgtgagtgcatataagtgtgagtatgcattgttagtgtgtgtgagactgagtgtgtgaaggtgtgtgtatttgtgtatatgagcctacattgtgtgtatgtgtgtgcacaaggaatgggaggggtgtggaagctgagcggagccagtcttcttctgcagacctatcacattatagcaacagaaaactagaagccctttcttcttttggccccttggtttgctgtgttttctccaggttgaccttggtcaggtccagtaatgttttcctgggaagcagggtaggcttccagggctcagagtctattgcatacgagaggctctgcattcaggtttactgagaaggaatgtggggaagagttgtagtaggtggtcttaggcttcatctggtttgaattggtgtgtcagttgggaaagcatggactaccgtgcctttactggctaagggtccaagattgttctatggacagatggcagctttatgtatctgaaaattcaagccaatcagaaaagcctatgctcatctttgctgaaggtgtgatgtcctccttggacagtctgtcttttcttatctgtgtcctccaaggtgcttctttgctagatctgaggctggggtaacccttggatcctaggtcaaaggctaactctctgctggcatagcttgaccaggtccaaagtgcccccttccttctcctagatttcagggaggtcacatgggggaagacagagcccgcctgtgacagcctttggtgggtctggtctgccggctgggtcctgatatgatcctgtatgcttgtgtatcaaggagtccctagctcacatttgctagaagaaaacctctggagaagcaaattagccaagaattgggccatgcagagtagagacttacctgagcagttggaaatcactgtttcgtaggttttgcttttaatccaaatagttcggatcacaatgccatacatgatgctgcagaaagaaccaaaggtagtattaaagtgactggtggatccctactgtgaggacacagagaagaccactcccacctccccgagtgcaaggtgtgaagggacagatcttttaaccatgcctgcccccttatacttgctgttcatagaattgcaactgaaagtgaccatgaggatccactggatggagttacttctttcttaagtgaggaggctaagacctggtaaagttatgcagtttcctcaaggtagc

SEQ ID NO: 37986 - DNA, 2300 bp, Homo sapien
tcatgaatggcttagccctatctgcttgttgaagagtgagttcttgctctggtagttcatgtgagatctggttgtttaaaagagtgtgatacctccacctctctcttgctcctgctctgaccatgtgacacattggctcctccttcacctttcaccatggtgtaagctccctgaggcctccccagaggtgggtgccagcaccatgcttcatgtaaagcctgcagaatcatgagccaattaaagctttttttctctataaattagccagcctcaggtacttttttttatagcagtgtaagaatggcataacacaaaattagtactgaggagttgggcattgctaaaaaggtacctaaaaatgtggatccagcattggaactgggtaatgggcagagattggaagaatttggaggtttcagaagaagacaggaagatgaaggaaagtttgcaacttgtagactggctaaatggttgtgaccaaaatgctgatagagatattgaagtccaggctgatgaggtctcagatggaaatgaagttattaggaactggagtaaagtcacccatgttatgctttaatgaagagcttggctgcattttgtccaggccctaaggctctatagaagtttgaacttaagagtgatggcctagggtatctggcagtagaaatttctaagcagcaaagtgttcaagaagtggcctagttgcttcaaacagccagtgtttatatgtgcaagcaaagaaatgacctgaaactggaacttatatttaaaagggaagcacagcataaaaatttggaaaattttcatgctagctgatatggttaggctgtgtcctcacccaaatctcatcttgaattcccatgtgttgtgggagagacctagtgtgagataattgaatcatggggggaagtatttcctgtgctgttcttgtgatagtgaataagtctcatgagacctgatcgttttataaagaggagttctctctctctttgcctgctaccatccatgtaagacataatttgcttctccttgccttccaccatgattgtgaggcctccccagccatgtggaactgtaagtccattaaaccctttttcctgaatagatcacccagtcttgggtatgtctctatcagcagcatgaaaatggactaataaacaggccatgtagcaggaaagaaaatcattttcaggagagaagttcaagcacgctgtggagcaaccacttgctaggcaaattagcctgacctaaggggagccaattgttaatacctgagagaatgggaaaaaggccttgaaggcactttagaagtcttggggtggtcccttccatcataggtccaaaggcctaggagaaaagtggcttagggggccaggcctacggccttgcttccctgtgctgccacactgctccctgcatcctggccactctggcttcaggcatgactcaaaggggccaaggtacagcttgggctgcagctctagagggtgcaagccatgccttggcagttgtcacgtgatgttaagtcttcagatgctcagaatgtaagcatgaatgaggcttccacctagatttcagatgattatggaagagcttggtgcccaggcagaagcctgttgcagggtggagccccaacagagaaactctactagggcaatggcagggggaaatgtgggattggagcctctacacagagtccccactgggacactgcctagtggagctatgggaagggggccactgccttccagatgccaacatggtagattggcagcttgcaaactctgcctggaaaagccacaagtactccactccaactcttgagaacagccatgtgtactgcaccctgcaaagccacaggggtgggtctgcccaaggccttgggagcccacccatcataccagggtgcgggacatgaagtctaaggggattattttggagctttaaaacgtgatgactgtccttcttggttttagacttgtgtggtgcctactgcccctttcttttggtgaatttctttcttttggaatgggaatgtttacccaatgcttgtgccaccattgtatcttggaagcaaataacttgtctttgattttacaggctgatggtggaaggagaatgagtctctgatgactttggacttgatgctggaaagacttaagactttgggggactactggaaaggtatgattgtattttgtaatgtgagaaggacatgatatttgggggccagaggtgaaatgatatggcttagatgtctgtcccctccaaatctcatgttgaaatgtaatccccaatgt

SEQ ID NO: 37987 - DNA, 2300 bp, Homo sapien
gtgctttttaaaatttagtttaagccttccttggtggtttgctgcttatttttcctggatagctgcctccttgttctgtattcacagatttatgcttctccatagtgtcacctttccatcagtcaaccagcctaggtacaacagcagcacctcccttagacgtagcagatagtcactaagcacctacactgcgcactctagggatggaggagagagtagtagacagaaaagtcaaaagccagtgtttataagccctcaagaaacttgaaatctagctctgtagacatgtggagaaagatcaagagaacaaagtgttgttatggagtgtggactatttggatgtggaaaaaattagccagccttgaggttcccaatcagtatgttgtattatgttagaaaggcactactttctacctttctgaccccttcaggctggcacaggaaaggaggctggttggaagcctttaatcttgagtcttatcccacagcatgactgatgatataggttggtgcaaaagtaattgtggattttgtcgttaaaaatagcaaaacccgcaattacttttgcaccaacctaatagaaagtgtcacccagggcaggttttccaagtgtggggttcctgctggtcacacaggacctcacattcaggaccctgaacttgattgaatgtttgctgctgctgttttgaacgtcttaattttttaacaagagaccccacatttttgttttgtactgggccttgtaaattggttgtggctttacttgaatctgggagtagtgaaagcaggttgagaaaagagcttcctacattgtgttccacttatatgaggctgatggtagaatccttttgatcccaaagattattattttggggctttttctttaggataattaatcctttatttgggactctagcagaggccttattcttctctgggaagaagttttgcataacagatgcatactacttatactaacaattaccaatgtattcttaatttggtttcagctatttggatggctcttttgcaaagtacatcctggtgctattgtgtttgctatattagcagcaatgtcaatacaaggttcagcaaatctgcaaacccagtggaatattgtaggggagttcagcaatttgccccaagaagaacttatagaatggatcaaatatagtactaaaccaggtaaaaaaaaaaaaaagaaaaaaaaagtcatattatttagctgtttttcccacaattttatataccactgcaaactcttaaaccctagttacttccactgatctcactctttctatgcaatgttgcttttagaatatctaaaacaaaggagatatcaatcctgtttaaatggtttgcaggggaaatgttatacatatgttcttagtaatttattctgccattttttatagattttaattttttcaaaatttattcacagtcataaatgccacatttaaaataatttttcctgtgcttattttcttaatgaatttttaatattagtccttcacattccttcttgaaataaactcatggaatgtgacattttattcatgtgtggaaagggagactttgttgtcatctgagtatcaaatgattgaatactaaatcatcttccagaactccttgttactgtaaagctttcctagtccatttgatacttcttttttagattcaggaaagatttctaagattttttctttaaagaaagaaagaaatctttaatgatgagatgatgaagctctgttttccaaggaaaatagtttacccaggcctggctgccaactgctactttatcagccatctgacttcatgctagttctgccattgaatcttgaagtcatgaacctgctgggcttccgctctgttacctgtgaaataattgatttacacttgaaggagacaccttctcgccttcactgagtgtcttcctgagacattcctcttgccttccagatgcagtgtttgcgggtgccatgcccacgatggcaagtgttaagctctctgcacttcggcccattgtgaatcatccacattatgaagacgcaggcttgaggtcagtgcacagtcttgcatcatcaaaacaaacctcccatgcaaacagacagtgagtggaggacaccagcaaagtaataaggaatgtttcaaaaggatatgatgaactgaggcttatcgagtcagggagcagaaagctgaaataagaccgctaagctctaaacaaatccgttaaagcttcacagggcaggaaagtgacaactttgggggctctcttctctaccaggcatataaacgaa

SEQ ID NO: 37988 - DNA, 2300 bp, Homo sapien
ctgtagtatgcaactctggaagaggaaggtggaacttctcacagaaacaaagctgtcccttcaagagtaataactcacctatagaagtaattataggaaaccattgagcttcatggagttgtcagttcaaataggatcagagctcttttttggaagaggagtggcatgttgacattttattttgcatagctaccaaagccagtgtaaaaaggagaagagtaggacataaattttaactatcaaagacatgaatgccaatattctctttactcaaagacccaggaagtaaagtgggatagagacagcatgatgtagtaaaaagtatattggctctgaagtcagtcagaatatagtcctggctgccacttactagctctgtgattcctttccttggctgtaaattggggtaataaatggttgtaggattagagttaatggaatgtactaagcatattaacattgtaagtactcaacaaatggtaactgatagtttttacttggtgtgaaagaagaataaagaactgtttcatctccttcactagccccttatgtgtcctgagtttgctaatatatcagtctttttgaggctagattctcaaattagattatatgctacctggattaacagtttattgatacacttgttcattcattaaaaatgttgagctctaagtgtcaggtattactctaggtcttgggaacatatcagtgcttaagaaagagaaggtgtgtgttgtcaactcacacatttctgtctctgacccagacttctcccttgaactcagatttacacatataaccacgtatttgttatctctacttggttgcctagtgaaaatctcaaaggtttttttcattccatgctttgctggggtatcaccagtgagggagctgggacaccaccgtgtgcctttgttgtcctaataaatacccatgtagtcaaataggatataatacaacattgtcattcttcataaattttcttaaaatagtatagcaccagttttggcatgtgacttttagttattttgatttgcctgtgtgtgtcctgagagaatgttatagaagttgtaaaactcctgtttgcaagatgaaaatgcaaatatatgacgtaagtgcttcaataatgaattgatggcaatatatttttttctgttccagaaaacaccagtttgatcatggagaggtaaagacttaatatgactataattttacttatcttaaagttgcatgcatttggactttcctttctagttccagtttctaactttgttggcaattgtcagcaatcatcttgaaaatagcctgttatgtgtttttatgagaatgctatatgcagattcactgactattcatttgttaaaattaactaggaaactcatatgttctgctctgatcatctttacactaatggcagttgatttctggagcccatttagacatatgtatgaggtgtctattgcatgattggaaatcactttcctctctgctcaccttgcttgaggcctcagagatgtgattggttactgctcccatctcctagttgtccagtctggttttgagggcagttccaaggtggagccctcagatcttgaggcagcagtcatttcttttaccactgtcttttcttggtctgatggtagcatcaaggttgattaaaaaatgtgggctttattaaccacaggtttgactctgagaatcacagaaacacttgccttaatgactttataattttagccttccactaaaatggaacagtttgaaagtgaattttaagaattgttttcgaagtttcagaaaccttagtagtattttttgttactaaggagaacgtacccctttctgcatattgccagtttagtattcttaaacttcacaaacagtaggagtaaaaaacattttcttctttctttcagctggtttaccatgcattgcaattgttagcatatacagcccttggtattttaattatgagactaaaactcttcttgacaccacacatgtgtgttatggcatcactgatctgctcaagacaggtaacatgttatgttggagtatagctactatgataattttagcctttattattgagtggccctaaaataatgaattacaaagtcttttaagtgattatagttaaagctcttcatggttttgtacttatctttcttaaagggtaagggccaaagctgatcattttctatctttctaaagatttaaaatagttgttggtgtacaactaataccgatttagtacagactgagttcatgagtgattactgcaggtgctgatagaaagc

SEQ ID NO: 37989 - DNA, 2300 bp, Homo sapien
gcagagcagctgtgagggctgctggttgattgtttttaaggttatctcttcatcatatgataaacaagaggtggattattcatgagtattttgggaacagggaggggaattcctggaactgaggattcctccctctttcagaccatacagggtaacttccagaggttgctatggcatatgtaaactgtcatgctgctggtgggagtttcctttagtatgctaatgtattataatgagcactaaggatgaccagaaatcactttagttgccatcttggttttggcaggttttggctggcttcttcaccgcatcctgtgttatcagcagggtctttgtgacctgtaacttgtgaaaccagtcctgccaagttcctgggctccattttaaccttaggatatagtccactagggatatacagtaaaattacagtatcttaatgttacttgaaatcttcttccaagttgataaatagttaattcctttctttcatttttattttgatatttagggatttttaaatttttgttttataattaaacatatgtttccaaaatcaaacctacaaaagaaggaaggtatagtttcctagggctgtcataaagaagtgcaacaagctaggtggcttaaaacagcagaaatatattctctcacagttccagagattagcagtgggacattaaggtgttgacgggcatcttgtctctgaaggctggaggggagagtccttccttgtctcttctcagcctctggtggttgctggccatccttggaattccttggcatgctgatgcctcaccccagtctctgacccctcttcacatggccttttcccctgtgtgcctgtagctttgaggccaaatattcctctttatgtaggtacatcagttgtgttgggtttagagtccaccttaatccaatatgacctcatcttaacttgatcacgtctgcaagaatcccatttccaaataagatcactccacagggtctggtggacatgaaattttaggggacactatccaaatcagtacacaaggaaacataattttaaaaatagtggtatcagagtcgatacatcagagtatcaagaccatttttttctttttcaataagtttctggataggcatatctcttttgtatttgtgagtcttaaacccagtttaaactttggcagctactggtactggctaccagggcagctccagggaaaactgaagatgcaaatacaagacgtagatttatcttgtgtttctgtcttccctcatactgccacttagactctccgttaggcttctagtattttcttgttttttttttgtctcacatattatttcacccttgctatctttccaaagtagtgtgccaagctaaaaactgtctcttttcttcaaaagaggaccactccccacccttatccccagtcgcacagggttcttaccttatgctgacttgataggagggaaaataatctgtaaaattaggtggcacccgagtgaaattcatatgtaataatacatcagtgtgtagccttctcaacacatttgcatttttgcatgtaaatccggaggaaaaatgactgatagtgtcattttggggattaaaataagcagttagaggagtatttttggcttgagatttcttggttcatgataaattttagttccataataaaccactcactctattcataagatagcattttctaagagtgatattagtataagtaataggattttctaagttgaagtatgctgagtcgtattattttttaaatgctgaaactttttgaagctattttgcattcagttatttcaattaagatgcatttatgtgaaaatacatagttttttcacaactttaggatttatcagtgatcagaaacctgtgaaattcattgtattaatagctattacttaattgctttgtttttcaaaaacagtgtatttacttagaagtggcatcataattatgtaccttttgttattttaattgagcatatctttatttcagggactatattattcctatttcaagactattgtggaagcaccctcatttttgaatggagtatggatgattatgaatgataaactgactgaatacccccttgtcattaatacattaaaaagattcaatctttaccctgaggtaaggtactttttccaattgtgatttttcacttttgtaaaaacttttttgtattaaacgctgattctaaatctaagatataattcaatatattaaattgtatttaattttttaaaagaaaatatgtatcttgtggaggaatatgtaaaaaaga

SEQ ID NO: 37990 - DNA, 2300 bp, Homo sapien
acccatagagtgacagctgaatgagaaatccatgacatttatttgtcatttccttgaactaggtcacttgatcactgtattggaaaagtgtcctagggtcaagttctagaatctgacatttgtcttgctaagcagttgctcattccaagagaggaacctgcataattccagcacacttcttggaaacctaaaatgggtgcaacaaaatatgtctgtaacattctactttccaaagctccagcattaacttgacactatattataatatattcttttagtctgatgagaacaaatgtaaattgctactctattgctcttcacattttatcttctgtctttcctggagctgaccttgtaatttaaactgttcatgctccaatgagtgttcctgaggaactcagagttcattattaggtctagttatagtgcatcatcaagaaccactctgttgcagagaggcatgtctctttagaatgtaattcctgttgttgagggcttactgtgtctttagtagatattagagacacttaaaattcatatactaaatccccatccccaagggcttacagtttcattggacaggcagggtaagctagaaaaacatatatagcaaaatatgtgattcagagaataagtactaaaagatttccaaagggaagagatgatggccaacgtgatttagttttcagggaataggtgaaatttggtctaggccatgctggaaggctagattttgttttaatagaagggaacatggcaaaggaagtgtaatcagggagctatatatttctaaaaacccttgctcagtgcctggcacacagtcggtgctaatatgaacactttaagcctcttcagatgaggaaggaagggaagaaacaactaatgtacgttttaggaataagtgaatggattaaagagtgaatgaatgaggtaactaatgagtggaacaagaaatgcctagactaccccatctgaagcctggctttcagagttccccaaatctaattgggccagagcaggcttctcccccaagggtacttagttccccctactatgaaggtggctttaggaatactgggaggcaaaaattctacctctggcctcctctttgggccagaacttgctttcctccagcttgcttctgttgactccttttcagaggcctgaaccttcctctcacctgcccccagacacaggaagatttgggaccaattcagttggacaccgtttggtcaatctcctacctccattatctagggtgggaacctggatgtatcacacaatgtatcctctgactcctaagctgttccctctactcaaccttgccttatgcttcctggggtcagcgatctgttcctgatacactcagctcttctctgtagcttccaccccttcccagaagacccttctcctatgacaggttcattctcccacagctccactccctccctccccaagccctctttctccctcctggaaaactcctctgaactcctttttatctctgctctttgtcactagtgtcttgtgcagactgcccattagctcccccttgacctcaccagcattggccccagtccttccagctcctaccagtgctaggaatgacttcaacactgagcctctcagccccttgacatcctcatctccagggacctgcactcccacttcatgtcattgaccaatacttacggtctcaccttgcaccatatcatcaccccagtctggctttgcctctgcattttaaaattcaaacatccaatcctctactgtctccaagtctgtttggtattctgtcttcatcccagggcctgtcactgcaactccctctgccgggatctttccttgcttggtccgtctgtctcatccacgtggcagaatgttactatccaactttggatccgtacccatgctatttactggagtgctggagaaatcccacaacatagaaggcaggaaccctatggattcatagtttccattagcaactggatcccacatactgccttctacattctcctagttccattctcccaagaagatacagcaaatgtccactagtctcttaaacctgctaccatgttacccactcccactcccctaaacatggccttgcctcctactcaatggagaaactgggcaccatcagaaggagctgccacataccctcagactcaccaaacagtctgcttcttaccccagtgtaagcactgaacaggcaggtgggtgtatgggtctgagactgaggagagctggcctgtagacacaggtttggaaatcttcaacaaaaagacaataat

SEQ ID NO: 37991 - DNA, 2300 bp, Homo sapien
attctgtagagaaaaggaaatattgtacttgttgagttgaatcatattatgcacattatctgatttattcccactaaactttttttgtgggtggtggtagcctcaccatacaagttatgaaatttgaatttagagaaagttaagttacttatccacattccacatttactacatgatgaaactggatttcccattctatgtctgtctgcctctaaaacctcacatatatattaatttatattttataaattataaaattatagttatattttataaaaacttatatattatatatataacatatatattcaacttttttattgtggtcagaataagtaacatatgatctgccctcttaacagatttttaagtgtacaatatagtattaacacaaagttgtatagcagatctccagaacttattcatcttgcctaactgaaactttgtatacattgcactccccttaacaacaatgaaagaggcctcaggcctgacagcagggatacagttaagacactgccacctgctccctcactgctttctgttacatcatgctgtctgttcagtaatgcaaaatgctgaattcaaaatagacattaacttactaattcagcccaatgaaacatagtccacctaaaaaagagctcatagaagcttatttcaaatacaatggattcattcaacaaattattgagtacatagcatgtccatgctctgctagatgctgaggatatggcaatgaaaaagagagagattctgactactagctcttgggagcaaaacatttaatatgttataacacaggttacatagggtagaagtacttttttttttttcaagatggagtcttgctctgtcacccaggctggagtgcagtggcgctatctcagctcactgcaacctctgtctcccaggttcaagcaattctcctgcctcagcctcctgagtagctggcattacaggcatgtgccaccatgctcagctaaatttttgtatttttagtagagatggagtttcaccatgttggccaggctggtctcaaactcctgacctcatgatccacccaccttggcctcccaaagtactggggattacaggcgtgagccaccacgcccagccagggtagaagtacttttatccattgcttttgggttaatttttaaaaatcagttaggtaaaggaatcataaaaattatacataaaagccttatatatattattttaaagcaaacaaatgcattgtcactcaacaatgtgctgtcataaagacaaaggtttttctctgagtgttccagacaactgttggtataagttgactttcttatatgtatcataattcctcttccaacatttacaattttggtatcttggaagagaagcaataacttttaagactcttgcaaaataataagagttcacattctttctagaatttcagaatttttgatggaaaatttttccaatactctgacccatatgtcttagaagtaattttaaagtttgtatgaaaatttaatactttcattacatgcatcacatttgtagttcccaaatacttctagttgtttttaaaatatatacttaaccttttttaaggtacattttacaaattctgaggcaatcatagctattcgaagtgtgtatttatattcattcatacttgttatgtagaaactctctcagtgcttgcaaatgacctaggtgacatttgtttagctatttgtcttggcatgcatatatcccaaagcctgggatgccaagaatcatatgccaggatcatactgcggggctgggctgtggatctagttggtcagtcccagaattctcacaactcttatacgtacaatcttatttgtcccttgggtttccttttgctcggtctgatatatctgttgctggtttctggacatggtagttaattgctctctacataatggcctcatgagttaagagagcttcaaaaactgagaagctatgccagacactcagaaatgggatctagtgagcctagtattaaaattactaaaacaaactcacccctggttttttaatatgtttgttgtagtaaacaggatgtaaagtgggcattttgttgattgcaggccacccgtgtgatgtggacaccacctctccatgaaagtttttcctatcctttccttgtacttcagatgtatattttaactttgattctcaggtaactttgatttgtaaaacaaaggcaaataaattataatttaagtttcttaaaatatacttcaattcagcactttgggaggctgaggtgggtggatcacttgagg

SEQ ID NO: 37992 - DNA, 2300 bp, Homo sapien
gaggccacttctattttttaacgatataaataatagcacaatgaacattcttataaaaagattaattttttaaatgataaaaatgaccagatttgtactttcatgggctagaccatgggtaagagcattttgtatcccaccaggacaccaagtgatgcaaaaggcaattggaaactccagaaaaaacaaactgaccaaaaagaaaaacaatagctccacttcacttattgttccaaaaaacattaaaacagtcatattttaaaataaggtgctttattttgagtttgcctagccattcaagaatatattctcatcaaccacagtaaatactttgtattttaaatgcagtattggacagatagaatttattagctgttaaaacttgggcaaataactacatcctgatgcttgatttaaaatttgcatacagttattgcatgaattgagaaaacattttgagcaccaaacacaatgccaggaatgtagaaatgctccttgaaaaaaatctcccaaaacaaaaaatgagcagtagtagcacttactgaatttaactgagtgacaagataaatagtactgtcggttaagtgctctagaccttcagaaaaagcataattaatatgggctggagaaatgggctggggcttggaaggtgacagctttcagatgggcagggagaaaaggatgtaaaagccaagggatggcttttccacatgaataaaggaattcagcagttatgatgtctcaggctgtggacttcacctgaaatgactgagatggaagattttgtgcccgaggaagtgggaaattaaagttgaaaaggtatattgggcaaatattgaaggcattggtgagcaagcctaggacttgatttgtgggccacgaacatttttgtgctgtgttgcatcaggaaaaattaacctggccacaatgagccatgctttagactggtgagttaggatatgggagttcaatgtgatccatcatcaaacagatggcaagtgaagcggtgtgggctccagcatgtggcccgtgacagaggacatggaaaatgtcagtggccccagtgcatctgtgccagccgctttggcctcttgtagggctgcgcggtgactgggaggtaagcgctcccctcttagttggtcctggctggtgctgaaagcgcttgagcacaccgctcctagggccgatgacttctgaggaacctcattggaaaagcattttgctctaagattcagtaaacgctgttccgtgccaaggaagtggcgtcaacctgaggctctgggatcagacccaccggactcacgccggctctgccacgtgttgcccgcagtctccgcccgttccctccgcgttggcaacgggcactgactgcccgatacctcagcgatcgtagagactttcctaatgccgggcgcaccaccggcgggccagcggttccgttggcttccctgacacacttcctacagtcatttctttcagctgagatcttcccctttaatacctcgttaattaacgtgtaaccttttggttaaaatgtcagagctaagactaaacctgaagaaaagaatgaaaccacaggaagttcttcagacttagtcgccagcaaggttatggcccgaagcggtgcaggggcggcgcgccgggaagctactggcagagctgtgcgcactggggggtgctgcaagcgctggggagagtgtggagaggctgcgtggagctgcgcgctcggggtgggagctgcactcccaatgaagcgcgtgaagggcaagcggtgatgggttctgcgccagtggggctgggagcgtgttgggggctgtacgtggggctgcgcgcaaggtgagaactgcgcatgtgggcttggggactgcgcgcaccgaaggctgcaggcgctggggagggtgttgggggctgtgcgtggggctgccctcaccggaagctgcacgctcggggaagcgcagaggcggggtgctgcgcgcgctggggagcacgtggggggacacgcagggggacacgcagggactgcccgcgcgaatggcttcgaacgcatgcgctccaccctacatttcacagtcgccatgacgaccgggaggtccgctcgtcaacggctagtcaacggctgcggggacaagtccgttgaggctgccaggcgagtcaggcctttctggacctcgcctgactcggatgggctgtgcctgaaattgacccagctccactagggattatgaagaaacaaggagtaaacccaaagccgctgcaatcttcccgccccagcccgtctaagcggccgtacggggcctccc

SEQ ID NO: 37993 - DNA, 2300 bp, Homo sapien
atgcatcctgcggtttaatctgaaagccctctgcttgccagccgtcgttaactctactctggctcttcagctaacagcccagccacagctgcagggccaggggctgatgagggtcggggcccggagtgtgagtcctgcccttccgtctgcttctagccgctgaggtggactggggggagatgcgcgctctgccacgtcgggccctgtttttctctctcaaacgcacatggagaccggctagaagacagcgtaaattccttccagcaccaaagtctatggttttacgaatttcctcaaacatttataaatcgacacttcgaacttcgatagtgatatgagaatgcattttttagtcaccttcatccagcaccttgttaaaaactattgacacacgatgaccaagacaggctgaaatcacgactcttccagatgtcatcattttgttcacacaaacgttttcgacagctattttaacttgccgttttccctcacaaatttatttcaggagtagggggtggtgcagtgaaaagttggagttttaaaaattattattattattttaattttaagacccacgaagaggcttctaatagccagaccgactggctggaaaagagaacaaatatttacatatacagcttgagtgtgtatgtcagcctgagtttacacggctccaagcgaagcggattaccctgcgaattcggagaatttgagttattcaggctgagcagggctaacaggacgccctccaacaaggccgtgggaagtcctcgtcacagccgcctttgtaaaaccagaggggtctgtgtccgcttagtccgggcgctaccataaggttcgcactctcccactacgcgtcgcgtggttaccgtagagctccgcgccctgaccttcgccttctcttcggcagccgtcccattttccagggtccctctagggaaaataggagccccaggctagagacgcactggtgaggagcagaagccacggttctgagagcagcatcctttgccaaatgcccgcagctctcgctaagcttatctttttcagggctgcatttgctcagccccactgtcaaagagatcaaatttgggaccatcgaatgagagtcccagccctgggatctgccccgagtatggacctggccagttggcgccggctcagaggcgccggattctactgagcgcttccctactttcttttggaactttgagcgcaggtaagaaaaagaatggaaaaagcgagaactcccgaggcttccactggtctggtcatagcttccccaactgggccatgcccggatctcgggcgttaggccgcggtgatgtgtcctctcccgacagcgcgcaccgccctcccgcccggggctgtgagaccaggtggggatgtccatggctgctgcgtcagcctagtggtggcacccttttccctgaacctgtgctggggtaccgaacagccggggcgacaggccacgcgggcgccgcaccctgggcgcgccctccgcgcccggcccgcggccccgcccccggcggcggaatcaggaagcggtgacgtgagacggcgctgactggctgcgggcctccgggatcgccgccgccagcaaattaaggcgcagggcagcgagcgccagggctcactgtccgtagttccgcgccgcgctccccacgccagcgtcctagcagccgcgctcggctggtggccacctcagcctgggacatcccggctgtccccagccccagagggaggaaggacgcggaggggatgctccaggaccccaggactttgtgcagttgatgctcgtttccgccttcgggctgtgcagactgtcgtcctgccgagcgccccggggcgtgcgcacccgccgtagtgctcggtgggccctctcctctccggctgccttcgaagtctctgcggctctggggctttgcggtggggaatagaggccagtgtgcagctctggagtcgttggagctgacacttctggagtccctggccccgctgtgactgctctcggaaactttgagctgtgtttcgggtctttgtctcccttggggaatctggacggcagttcggacgaccccgtccctggccaggaccgcgtgctggggaccatggagttcacggcgtcccccaagccccaactctcctctcgggccaacgccttctccattgccgcgctcatgtcgagcggcggctctaaggagaaggaggcgacggagaacacaatcaaacccctgggtaagttgggctacccggctgtccgccgaggactggggatgctgcgcatccgtctgtgcccc

SEQ ID NO: 37994 - DNA, 2300 bp, Homo sapien
aaaatataaaattataatataattatatataatataatatattttatatataaaatatattatattataattttatattttatatatagtatacatattatatatcgtaaaatatatattatatataatatattatatatgtgttatatattatatataatatataattatacattatatataatataaatatataatatataattatatattatatattttatataagatataatatattctttatatattatatatcaaatttatacatacatatcaaaattatacataactatgttatgtttaaacctccacttcttttcctgtaaacttcagttttattttaatgtgttttataaagactttataaatgaaaagaatcatttttagcaataacatgtctaggtgcaagtcgttgttattccatccattttgtattttcaatttgaaattcacttctccctttagctctgggaaatgtctttggttgtttctttgacaattgtctcctctgaattcatttggcatctttcattttgcacttctgttggttgggtgttggacttcctggtttgatgctcctgttatctcttatttttattgctcatagtttttaatcccttcaactttttgcttttatgctctgagaggttttctagatctctgctccccaactcttctattaaaatatttatttcagcaatcatatttttaatttccaaaactaatgtcttatgtacactagtcatttctttgattgtttcctattcttgatctatggattaaatagctctttaaatcccagtgtgcctactaattagattttgttcttaaaaacaaatcacggccgggcacggtggctcacgcctgtaatcccagcactttgggaggccgaggcgggcggatcacgaggtcaggagatcgagaccatcccggctaaaacggtgaaaccccgtctctactaaaaatacaaaaaattagccgggcgtagtggcgggcgcctgtagtcccagctacttgggaggctgaggcaggagaatggcgtgaacccgggaggcggagcttgcagtgagccgagatcccgccactgcactccagcctgggcgacagagcgagactccgtctcaaaaaaaaacaaacaaacaaacaaaaaaaaaacaaatcactgaacttgaatgatgctcctattcagtttctcttgggcttcctctttcaaactgctatttttcctgaactgtcgggatgcctttgagtgtttataggtatttaagaatgggaaatgggaaggctaatgaagaactctctgggtttggcctgttgaactggcaggcatctttttaaggtgagcagatgaggagctaatcaccatgttgatggcctccctaaagccagaatgaggactgcattacttctaggtgctaacatctatgggagctgccttaattcaccttaggtattgtcttagaatgtttttgctgctgtaacagaatgccacagaagtttatttggctcttgaatctggaggcagagaagttcaagatggaggggccacgtctgatgaagttcttctcgttgcatcttaatggggctggaggaatctcatggcaaggaggcatccagaggagacagaagacgaaatagggctgaactcatccttttattgggagtccacttccatgataactaaccactcccgcagtaaccgtttaactccattcatgagggtgaagacctcataaccgaatcacctcttaatatcgatgcattggggattaagctttcaacacatgaacttcgagggccacattcaaaccacagcagtatcctgtggttattctcttttttttttctttttttcttttttttctttttttttttttttttttttagaaaaatgcccttgtgttttggctgggaataaatgcctgttggcctgagctttgtgcaagagtggaggtgtttactatttcgttgacagtcctctcactctccctggtttttggccctgctccttgtttccattcttgagtgcattgactctgtgtccaggggttacatggttctgctgctttcaaattcctgcagctttttcaaggctgctctttcttctgttctgctgcaagccactaatgcttctccatttacttcctgtcttctgaaaattcattaaaacttcttgtatgttggtgagtatcctcccattctcttggctgctacatgcttatgtctttattgatttttaatcatcttaggactcaagagatacagagtctaacgtggggactttgtctgtaatctta

SEQ ID NO: 37995 - DNA, 2300 bp, Homo sapien
tctaacttattagggaaaaagggaagaatacttggggaggttatttatttattttggcaacatattttcaacaatcaccttatattctccatatgttttgggcagcatgcaggagggtgacatgggaagctataactttttaaaaaagtaatggttagtggcttttctcccttgagctttaaaaacagtgacaaactccagccttcccattttacagttgaagtaacagacttgtttgacattcttattaatgatagagattggtggagatttactttcaaggggatgggttttttcataatgggaaatactaataaaatttaaaatatacatctagatacagcatattgctgtaatacttgatttaggtagttttatagatttgctcagagatgcatcagctccctggtgtaaatgctgagttgtacaaaacaaatgtttttaaaatacttctctgcctcagtggtatggctttctctccagagttgctcactaactgacatctttttaaaggaataactgggttgaggtttgctttttttgaggtggggaggtgctgtgtcatctgttgtcctgtgtccaagagagctgaagttttttcccccttatataggaccctatatgaaggaaatatatataaaatattaggagattgaagggtcttttgaggatgggaccctatgtggctgccactgctccatcaagaataaggaaagttcaggtaatatgtggggaaggtgatgccttacctagcaccacgtttctttaagtatagcctgttgataaggcttagctccccaggctcttctaagttaggtttctataatcaattattaccaattgtatgtgtaaacagtctttagaatataaaattatagctaatgaatttattcttgtctcactctggatagaccaaactagtatcagctaaagataaaaatcaagtaatgtgaagaagagttagcaaattcacaaagaattgtgcattttcttacctgtttatctctgtagttgtcttgatatatgtgattttctacaaatctcacattatacactttggcatcatgttcggtgttggaatgggggagagtaaaaataaaactagctaacatttcatgaatacaggataagaatcctgtgaggaagattctattattagatccattttagaagtgaggaaactgaagtatggagaagttaaatgtgaccttccacaagttttactgaattaatagaatttggccaggcgcagtggctcatgtctgtaatcctgccactctgggagtccaaggcgggcggatcacctgaggtcaggagttcgagaccagcctggccaacacagtgaaaccctgtctctactaaaaatacaaaaaaaaaattagccaggtgtggtggcgcgtgcctgtagtcccagctacttgggagactgaggcaggagaattgcttgaatccaggaggcagaggtttcactgagccgagatcacgccactgcactccagcctgggcgaaagagcgagattccgtctcaaaaaaaaaaaaagaaataaaattttaacctactttaagaatgtatatgtgaacatgttctactaatcttgtctctttacagaatattttacaggtttttgtaatgttcttttttattttacagctcatagctgctatattttaataatagtttattactaatataaaatatcatttgtctatttcaccattccccaaaatattttgtcatgaaatttattttagggctttgtttcttaaggaaaatgtacttaaaatgaaggtatttttggcttcatgtaatgaaatgggaagataataaatgtttagattggatgtacattttgtggtgtttctctttgttttccctttaaaactggactgaaatgttagttattctatatagttgggccctgggtcaacttatgtaagacatattgtcttatttgaagaatcgttgaaagtaagtatttttcttttcagtgagatttaaatatattctgtcaatggttgacttggggttcagaaatgaaaatttagaataatacttttagctgctagagcattaaaagagctcattatttatttcttgcagaaatgtagacaaccaatttcctgggcaagctgctccacctggattcccagtgtatcccgcgtttagcccactgcagatgctatggtggcaacagatgtatgctcatcagtattatatgcagtagtaagttaatctgagttcattttttaagttactcagtgtgttatttgctttattttctttttatcctaagtaagtt

SEQ ID NO: 37996 - DNA, 2300 bp, Homo sapien
tccttgattaccaaccacggcctttcaaatctgactttggggacagatggagctgtactgtctatattttatttattatctctgcaatatccagttatgattcagaatggaacacagaatggaaaagccatatgagagggatgcaccaaatggtggtggggtggagggcagttctcttttaaactaatgtccatgtatcctctacaggagaaaaatgttgaaaggggttgtggtgaaaacgaatctacaacttataattctttggtccttgaaacatatatagtaaccttgaaagtataatttttataggggacacatacttatttctaagaaaaaaaaatcttcaatttctgtttaagtttctgggccaagtgttgaaagtaaaatggaattttagtgtaataagcaataaaagctctgatacgggttgtagtgctttatcttttttttttttaagaaaggatatatctctcactcgcatattaggttgatgactttaagtccaaagaaagtagtcccttttccatgcctgccaattctttgagacagagtctcactgtgccactcaggctggagggcagtggtgcgatcttggctcactgcaacctccgcctcccgggttcaagcgattctcctgcctcagcctcctgagtagctgggattacaagcatgcgccaccacgcccagctaatttttgtattttcagtagacatagggtttcaccatgttggtaaggctggtctcgaactcctgacctcgtgatccgcccgccttggcctcccaaagtgctgggattacaggtgtgagccaccgcgcccggtctttgcctgccaattcttaagtcccttgatatttctgcttcctcttactaattaactgaacctcatcaggaaaatattaatgatggttcgaacactcaggagacacaacctcagaactcaaaatacctcgcggtctaccaaaagagacctatttgattcaagactggaggggagaagcaggaaaaaggagggtacacggcacgaaaagctgctggtcagagcagctgcccccagcttttacacacttactggtttgctagggtaaacgttagatagatgcgtttttagtttccccacggtccagttcaagaagcagctaatagtctggtcactgtatttctgattcggtgctttaatgatgagggtcacaggaatctccatcccactttggtccatggtgcccccaaagtcagacagagtccagaggagcggcagttaagcccaaaagagccgagatggtcaccgccggcgcgactgggatgaggacagaagtgagttcttagtattccgtgtccaagtcagttacaagtgcactggaggatacgaagcccattgccggtaccaaggatggactgaggtggtggcgactgcgacggtggggtctgggtgcccggccgtggaggcagctctccccgccaggtccgggctccgccgggctccggactgtggaggccgtcgtgaggagaaaggaagctatacgaaggaagggtgggagggatgagggcacaacggccggcccggggtcactgccccgccccaccgcgacccccaagctggaacgcaacaaggcccctacgccacggccccgcggtgcggatcggggaagcagctgggccgctcagggcggtcagcgggcactggggtacctgagagaaggccgcggggcccgccaccgccgccctccgcgcccaggcagggccgccagccacaccgtccggccaggcgttttccgtggcagccgctcccttcctgctgcgcggcgaccggcacggcccagccccgggtctcgcgaggaggcgcgggtgaaagggagagaagctgaccgaaggcgcggcccggctctccgcctgacccctcagtctggacagcgcagggtggcggcaaggcagggctgggccgggggcggcccaggcgactacaggtagcaggagggcggggacgagagccgttgcgccaccgctggcgcgccggttttgttgttattgcgaggattgtctggggcccctttaagccggaacaggcagggcggaagtgcgtcaccggcggcacgcccctgcacatggacctcccccgtccccgccatccctgccgatcctgttgctgccgccttcccgccgtgctcgggctgcccgggactctagccgccaggcttcgcgtcgcccagcggcagatcgggctcctgggagcctctcccctggccgtttgctcggcctcggccccagctgccctggggcctagccactagctcccctggcgcta

SEQ ID NO: 37997 - DNA, 2300 bp, Homo sapien
agagtcagctacagaaggccagtatcatagcaagttgttgctccatgactggaaacaaagaagacttcactctttacttcagatgcgcagttgatagagtacagctaagatatggtacgtgttctaccatgaagagcaagagcaaggtgagggagggtacggtgtaagagatcctgctgcattagctgttgagaggaagaatttcctcctggtcactatgttactgggggtccttgctccccaagttcccaagatggtggcaggtcgcttccaagatggtgacgggccacttccgagatggtggcaagtcttgtgttctctgacctggggttcttggcctcatggattccaaggaatggaatcttgggccaagcggcgagtgttatagctctattagaagctgtgggtcatggaagagaatcgtggaacccagtgactagtgtttagctagattaggacgaacctgggcacttagccctgcaggaacaagggcaagcctttagcccgatcaggagcagcaatgggcgcctcgctggatccagagggatggaagtcagctgtgggtctgtgacagcggcagacagcagtggtggacggtgagcgaaagctcagcttgagctgtgacacacacgtaccagaaaagtgtgcaattgcaagatttaatagagtgaaaacagagcttccatacaaagggaggggacccaaagagggtagccaccgctggcttgaatgcctgggtttatatcctgatcattgtccctcctgttgtgctctcaggcgatagatgattggctacttctttacctcctgtttttccctaattagcattttagtgagctctctttactacctgattggtcgggtgtgagctaaattgcaagccccgtgtttaaaggtggacgtggtcaatttcccagctaggcttagggattcttagccagcctaggaaatccaactagtcctgtctctcagtaccccctctcaacaggaaaacccaagtgctattggggaggtttgaccaccgctctaactgcttcctgctgaattggggcacagtaggggttgtgcagttgagatttcctccgtaggggtgccttgtctctcaactaattcagtggtggctacctcgaagcccttctgaagctaagagggaaagagaccagctcgcaaagtcccctatgttatctactcctaagtggaagctgggagctgtgaaaatgcacatctaacaacccttaacttactataccgacttctaaaccacagtagaaaatgaagaaaagttcggctatgggcaatagactcaaccttttgttctatgtctaacctataaaatagaaaaataatactgtcatccctcatctcccaccatactgaacacgcattaggtgctcaatgaatacttgtccattttagtgaagattaagaggaatgagacggaaactgacacttgagaggctggcacacgccagaactgcaccacactttgcactcatagctcatttactcatcagcttgtggtcaggtaggcattaccgtccccattagagaagtcaacggaggctcagcaaggacggccagggtcccccagaaagtagaggaggacttcaggtttaaccaaaagcctgtactctttacacatgtaccccatgccttctccaccaaagctcctggcaccgtgctttgcagacagacgacgctcaacacattttgagcagaagcgtggttcagcaccaggaaggacaccaacttttgcagagacgactcttgggatggagaaagacttcccaaatcttcagggtgcggtcaagacagggtaggctagcgccaggggagctagtggctaggccccagggcagctggggccgaggccgagcaaacggccaggggagaggctcccaggagcccgatctgccgctgggcgacgcgaagcctggcggctagagtcccgggcagcccgagcacggcgggaaggcggcagcaacaggatcggcagggatggcggggacgggggaggtccatgtgcaggggcgtgccgccggtgacgcacttccgccctgcctgttccggcttaaaggggccccagacaatcctcgcaataacaacaaaaccggcgcgccagcggtggcgcaacggctctcgtccccgccctcctgctacctgtagtcgcctgggccgcccccggcccagccctgccttgccgccaccctgcgctgtccagactgaggggtcaggcggagagccgggccgcgccttcggtcagcttctctccctttcacccgcgcctcctcgcgagaccc

SEQ ID NO: 37998 - DNA, 2300 bp, Homo sapien
tgttgggattacaggtgtgagccatcgcacccagctggggctatctttagtagcagatggtaactgagctgggcaattgttctttgacatttccagttcttatctgttaacatggacagtgatttaaataggcagctgcatggacggcctctccctaactgctgctatcttgtatctcctcattggtaattatttttcctagcccaaattccacgtcaaacactatcaatattctggggaccaccctttcatacactgctctgtacacatacctgtttatacatattttaacaaaagtggaatatttacatactgttgttatcatagccaagctcaacagcatcaaaagcatttttaggtacttaattcaagtggctgtaaaatttaaaaaaaatcattttttctgatactatatcatctttgtacccgtatatttcaatttcttgaatgttcattacaattttatttttactttttattctttcttgagacagagtctcactctatcacccaggctggagtgcatggtatggtctcagctcactgcaacctctaccttctgggttcaagcaatcctcccacctcagccttcagagtagctgggaacacaggcgtgcaccaccacgcccggcttatttttgaatttttttgtagagacggggtttctccgtgttgcccagtctggtcttaaagtcctgagctcaagcaatctgcctgcctcggcctcctgaagtgctgggattagaggcaagccactgcgcccagcctttattacaattttaaatgtttttctctgtgttagcgaacctttgatggactgttttaaagagtgttaaagagtgtttaaatcactgtgaaatgcacattctgtcttaatatttataattattagggtaccttcattaatagtgtacattgcatagtgccaaacgagatcaccacatcacttctaaaggattcctggaagtctgagtcacaagcatgagacaacagctgcaggactgggtggtgaaggttgtgaaaacttcctggcttaaacaggaatttgacccaaaacaagaagtcttagggaagatagcttagggcttgtctggtggcaccacaatgccatcaaatgcccagcctctttacagttttctgctctgccatccttggaatgcaggccattgttctcctgtttgttgtttcatgactgaactatgagtgctgtagctcttcacgttcctcctggaagacaggtgtagggcaaagatgagctctgattcgcagagcccttccatctatatgctttcttagaagcctcagcaataagttcaacattcaactcattggcttgaagtgtgtcaaatggctgccccttgcttcaaaggagtctgagaaaataactttagctagaattaaagttccattagagtgcctgggtagacaaagaagagtcagctacagaaggccagtatcatagcaagttgttgctccatgactggaaacaaagaagacttcactctttacttcagatgcgcagttgatagagtacagctaagatatggtacgtgttctaccatgaagagcaagagcaaggtgagggagggtacggtgtaagagatcctgctgcattagctgttgagaggaagaatttcctcctggtcactatgttactgggggtccttgctccccaagttcccaagatggtggcaggtcgcttccaagatggtgacgggccacttccgagatggtggcaagtcttgtgttctctgacctggggttcttggcctcatggattccaaggaatggaatcttgggccaagcggcgagtgttatagctctattagaagctgtgggtcatggaagagaatcgtggaacccagtgactagtgtttagctagattaggacgaacctgggcacttagccctgcaggaacaagggcaagcctttagcccgatcaggagcagcaatgggcgcctcgctggatccagagggatggaagtcagctgtgggtctgtgacagcggcagacagcagtggtggacggtgagcgaaagctcagcttgagctgtgacacacacgtaccagaaaagtgtgcaattgcaagatttaatagagtgaaaacagagcttccatacaaagggaggggacccaaagagggtagccaccgctggcttgaatgcctgggtttatatcctgatcattgtccctcctgttgtgctctcaggcgatagatgattggctacttctttacctcctgtttttccctaattagcattttagtgagctctctttactacctgattggtcgggtgtga

SEQ ID NO: 37999 - DNA, 2300 bp, Homo sapien
tttagattctctcatctgacctttcccacacctcttgccccacagtaagttttattttcccctcttaacactaatcacatctactctgatttgtagacatttttcacctaaagcccagcaaaggaaacactgtcaacctgtcaaaaaaaagtgctgcaattgtggaggacagataaacaggtggtaacaaaagcattctagtgaatctgagccaggctgggaacctgctgggctggcctgactcagaggtggtaagagaaggcaacaggaggcaggaggcagccccatcactgtccgttcccagagcaggaatgaggagggtgctccccaccccaaggcagcaagggggaaaattctctaaggaagagtcccagcaagatcaaatatcagtgccatgtccaaggggttagagaaataaccaaagtcagtgtggtagggccatgagtttaccttatggtttggctttatgtgggtatatggaagtgccagcagtgagctgagagctgccaagagaggcagaaagcaggtgtgtcagagatttggggcctcaatggaagtgaaatgtgatggcagaagaagacaccacaggagttgttgaggcattggttaggaagtgaacagcagaactggcagaggctgctgggcctgttggggtaccaggagtgacagagaagactggcagctgcagagcaggacagaccagattggccagtacaacagcagagggccatgttgggctttgactcaggaatcctggtggaggcaatgatgagagagaagagataaaacacactaggtaagccaaggtagttgtcaggatagaaggagacaggcaggccagatggctgttaaccgtgtggtgtgtcccaactttccagcatcaatttaatggccaaattaaaatgtaagtcaacttaagccaaggtcaattttaatcctatgctttgctggtgatacagaatcattaacggtatcaataatgcccacattcaactcattctacaatgggggcaattgtaattttggtctggatatgtttaacaaaatggaaaggaagaaggcaaaaccacggaactattttttttttttctttagacggagtcttgctctatctgtcacccaggctggagtacagtggtgcgatcttggctcactgcagcctccgcctcctgggttcaggcaattctactgcctcagcctcccgagcagctgggattacaggtgtgtgccgccacgccctgctaatttttgtatttttagtagagacggggttttaccatgttggccagatggtcttgatctcctgacctcaggtgatccgcccgcctcagcctcccaaagtgttggaattacaggcgtgagccaccattcccagctggaactatttttttaaactgatgcacattaataagatttagaaaatcttgagatttaatggacagtgttgagattcatataactttatgttgagaattctctttccaggaattatttatttcagttagtcacatttttatcttctactgaagtgtaaacttaatttagtgtaaataactaccatttgaatactaacataatctttttatttgtataaaaaatacaaaaagattgtttatgtgtgtgtacacatatgtgtcaagactaaaaattaagcacggggtaaagtctttggcaaaggacaaatagtcggcaagttcacagattagaatttagaattccatcatgaagtggactaaattgttagtttaaagaagactgtgagtgtcagcacataaaaaggtaatcctgtctcaattgtagctacagattgcaagtcctgtgtcaattcaaatttttgccagcagatactaatgacttcattgaaagcagatgtttagaaatgaaagtataaacacaaccccagttgattaatatgcttattgtatttccttgttgtgagtctagcgaatatttgattatctttaagttgatccatagtatattcaacagtctcatgagaacataatttttgttgatgatttgtccaaagtttctatcaatccatcttagcagcagagccaagtgttagagttattgctgcctgagttataacagctgccctgggaatcttgtctgaacaacaagttaactgctgttcccagttatatctggtctttcccacccccaaacatacacaaaagatttttgtcattcttggcactggacaacagaagtgataagacatgccagcagaactctaaaggcagaatgtccttccacctgttttatgctgtaagacaaacttccaagtgcgaggcagt

SEQ ID NO: 38000 - DNA, 2300 bp, Homo sapien
ttacttcctttagactattaggttatattaatataagtatttgctttaattttatattttaaaataatctatatttaggtaatatttactaagcattgactaagcaccgtgttcatgtattagtctatttaactcttatcaaaatcctgttagataagtattatctccgtttatagatgaggaaactggatcacaggaaagtttaagtaacttgttcttggttgcaagcctaataaatggagagctgggatttgaactcaggcagtctgactccggaggctatatacatttaccctccttggtacactgctttttttcaaaaatagaaattcaacaaaatttcccaaagtaaaagttcatttgaagtttcagaaacttaaaacaatgattgaacagataagttgcaacagacttcataagcagttcagtaaaaatgtagacttacgaaatggcatatatcaagatacaaaataagttgcttctataagtttcttttcttaaaaaaaattacttggaaatatttcaagtatatagaacagtaaaggaaataattacaagtgaacacccatgtgccctctacttagcttaatgttttgccacattttcaagatatttctggtagaaaacaaacgttatagatacaaatgaacccttcttgttacattcccttctgttcatctctggaagcaaccagtattctgaatttggtatctatcatttccttatacaatttttagtttgatcttacttttttgtaattattaaacttttatttatggtatgtcatatatatctttccgcaacctgtcttttcatttcttcctcaatattaggttaatgactctatccatatgaaaaatggtagctttagttcactgattttttggttcgtgttgtatgtcaatttgttcaacaatgacacttattcatccattctcctattagtagacatttattgtttcactaatataagctattttgctctgaactttcttgcacgtgcctataacttaaaaatacacatacttttttaaaacatgcagttaaacaggaacatacacatttctttaacatgtagttaaacaggaaaagtaacacatgtgcatgaagaatacaaccaagagagccatcacgttcaagaaaagaccacaggttattccgagtgaagtaaggctttcactagaaggcacttggggaacgttccaatgacagcgacattcatcgctacagtagaaactcacacaatcgcagccctttattagtattttgttacccagtagttcctgtgtccattcatttcctcaactggagtgtgagctccaagaggaccgaaccgggcaccgacaaggtgagccaatatgaatgtggcgagtccgcaatgggggctacagcggccgacctctggggctgtgccaggccactagagtgtgatggcgcgagggaagggtcggggaaacagggcctaacctcacttttcaccccgaaagtcaagatagccacggaaacagggatgaatggggagcacagacacctgcctcgaagtgtctcttcactttcactcacaaagccgtcgggtcagtaaccagaagccgaggggcggatgcggcccccgccctgtggcactttctcagtctggttcttccagccgcgcctctttgccttacgccaattccgtaaggaggcgctgaggccaactggccggctcccgcagctccaaaacttgacgtgaaattgcgcggggcagagctgactgcggccatctttaattcgggcaagaccccaccctcgcaccccacccactagtccttttcagcgttcccaggattttctccaacaaatgtaacgcggttaaccttagaagcagtgttgaagaaacacgcaaagaggcctgagtatccatgacctcagtggtgcgaaacccggccaacttaaacatggcggctaaacccgaacagcaaaacgttgctgacgccaatgaagtcatgctcgaaatggagcgaggcggcggagctggggaggcggtaatctcgcgagatggaagccagcctccgctaggcccggaagcctcgtctgagggggcgggggacggaggagggagcgggagtcgagcgagagcctgtggaggagtccgcctgctgtagcgtgcgtaagcaaggcagctacgccgggcggctacgctgcggaatcggcgtaggcgcctttggagaatcggcgggctgcgctccgctggggctggtcgcggagggggggaggggatgtcggtcagtgcgagatccgctgctgctgaggagaggagcgtc

SEQ ID NO: 38001 - DNA, 2300 bp, Homo sapien
cccccctagagttatttaaataataatttaggtggcaaaaatacttgctctttcccaaggataagataaacattttatagatgagttgtataagtaggaatagatatttctctctgatttctaatttaatatatttacaatcataattgttggaagttgcttaaatacacattcagttacttaaggttagcaatcacaaaattgtttttagattgtttcttttttagagactaaaaaagatttttggggtgttaggggacagtgggaattatagactctttgaaaatctaacaaaagctttggaccctttcaccggaagaatcctggcaaacacaaacacacatttggtatgctgtttcagggcagtcattgacactgtgtgtgctcaagagatcagaggcaactgtattaaaaacacctgccattaatatgaggagtatattattaagaagcatctcaacttttaacaaaaaaagatgatatttacacttgaaaatgtttttcagctgactccacttttaaaatgcaggttcttgttctaagttaatatgtctggttagtttcattttcagaacttttgattcattgtttaattggaaaaatatatgtcaggttagcatgtagaagttttcttttagtgaagaaatatccttgatttaaacaacattttattctaatttacgcaattgcgaaaacagatcatcttaattcatagcattatatcacatctttgttcttgcctttttgttaagaaaaactggtagccaatattctgtcctttttgttttgtttctaacattttctatctagctcttttgcctgcttccctgttagaaaagaaaattgctgtgatggtcagaaatatttagcctaataaggagaaaagtcaccataataagagtgtgtcaaatcagggttaaaatgactagccttaaagttacgggtgaaatccaaggtctggttttcgtttttaagccatgagttaattttttaaaaaaaattagcgtattacagtaaaatttacccatttaaaatataaacctcaatcaatggtcaaagcctgtttttatggaggcaaaacaagcatgctttattaacaaagccaaagaaggacctatctctttagtttgtcccagggtattgaataattttcagagattctcaaagcaaagagcccacttcctgctcctgggctgaaagcactaggtactttggcattctcttgtgtctctgtgtaagtatattagccttaacataaagcccacctgtaaatatatctcagtgtgaaaattttgaacacaattctacaaagagatttgagtccatggacttcaacgtcaacagagtgaacatttttttttttaatttaactatgcttatgtctatttttttggcatttaaaaataattattaacaaaatatttgcttctgattatctctgaagtatgtgtgtgtgttttaaatcactgaacatctttaaaacttaagacagtgaaatatttgagttaagtagaatgaattttcaagagcattgaagttatcataaggggcctagaaatattctgtatgcctaaatagtgctctaggtattgactagtagttgtttccaacgtatcagttcagttaccaaaataaataataatttttgtgttgttagtagctgtcttggaagagattgtaacacttgaaattctggtaaaactaaaaatattctacatatgttaacttcattactcattttctatttttcatggtaaaatgttgtttgaagaacaaaattaaattattttcttctaatgtttcattctgtgaatgtattttgggaatttttttcccattttccttctacagtttatttggtatgtcatccttaggtttgatatgcagtaggtttagagaacatctttgttttttagatttttttcataaataatcaagttttatatatgaaatatggaaagaagttctaggttataaatatattaatagtgacatatagcatctgatttgttttcatcagctgtttcatagttctgtattataatttttattcacagacatttaatgattacccttaatattcgtgacaggagccctctggcacaaatggaagaagaaagaagggagcatgtagctaaaatgaagaagatggagatggagatggagcaggtgtttgagatgaaggtcaaagaaaaagttcaaaaactgaaggactctgaagctgaggtaatcagtctaatatcccatctcttagcagacattgtgttcctttttaagtagtatcttcagtaaaatttata

SEQ ID NO: 38002 - DNA, 2300 bp, Homo sapien
catgcaccacatgaagtgagttctgattcctcttccttataaaagctcttaaactgtccaaagatggccattctgtccctttgagtcacttcatctgacacagaatctgcagtttctctacctgttcatgccccaggcaaagcttccagcactcagcacttcactggctaggctttcatgtttgcaagggtgctgacacatctcatctttctatgtcagtggaagaaaagagacggttcagagctggcctgcagtgacagaggaacaaggcctgtttgcggtggatatgattggatggccaggacaggaagccaggacctggaaggagagcaaacaaaatgagtttttcaaaaagctagatgacagtggaaccatgcagagatgaaaaacggtgcaacaggaaactaggaaagcagaaaacagaaatagtgtaatttcgtaacattaacagaggtaagtaacatgacattagtgatatttcacaggggatattggtcagtgcctgcagcaaaatgtttgaatgccttttaattgcaaaattaatgcttgcgtaagttttctttgttaaaaaatgaaaacaattcagataagtctaaaatgtccctggtccctactgtccttccttccctacccaattccagaagtgtgtgtgtatgagcaggtgcatgggtgaacatttgcatgtgtgtgtgtatatatatatatgtgtatgagcgatctgtgccttaagggcatgttcctgctgcagataactagccagacccacccctttatttcatatatgtatatgtgtgtatatatatgtacacatgtatacatgtgtatatgcatgtatatatacacatgtatacatgcacctgtgtacatacgcatatatacatatatgtacatgcatgcatctgtgtatatatacatatatacatatatgtacgtgcatgtatacatatatgtacacatacattatatgtgtacacacgcatgcatatgtgtacataaatatatgtaggtatgcatggatacgtgtgcatatacatatgtgcaaatacatatctatatacacatatctacgtgcacatacatatctatgtacacatatctatgtatacatatatttatgtatatatacacacacgtacatatctatatacttgtatgcatatatagagagagaatgaaagagagagaatagagatttattgtaaggaattggtaaggaataggtatgtatacataggtttatgtatatatacatatgtgtacataatctatatatatttatgtgtgtgtgtgtatatatatatatagagagagagagagagagagagggacagaaagagagaagagagagagatttattgtaaggaattgggtcacacaattgtggaagctggcaagtccaaaatatgcaggcagggtaactccagccatcagtgtggagacccagggaagaagtgatgttgcaccctgagtccaaagaaagcccggaggcataattccttcttccttgggggaggtcagccttatttcttttaaggccttcaactgattaagtgaggcccatcccactatggagagtaatctgttttattcaaagtacactgatctaaatgttaatcttacctaaataatacctttacaaaaacatctaagatagtattcagccatggcctagccatgagatatttaaaattaactgtcacaatatggaatgcatataaacattcctatataattaaaatatgctatattttgtgtgcattatttaaatgttattatagcatatgacctgcttttatcactcaaagttatgattagagttctttctttaataggaaataaaggaatacctcattctttctcaatgttatgcttagacgtatttccttaagaagaaataaaggaatacttcattctcgctttctacatagtattctgttctatggctatatcctgatttatttagccattactctaaaaattggcattatattattcccagctggtgagctgcttgatcgtgaattcaagcaaacttcttgaattcttttaaaatggcggtcaatattctgttcctgggcaggtgcagtggctcatgcctgtaatcccagcactctgggaggccaaggtgtaaggctcactttaggccaggagtttgagactggactaggcaatgtggtgaaatcctgttactacaaaaaatacaaaaattagttaggcatggtggcatgcatctgtagtcccagctactgggaggctgaggttggaggatcgcttgagctgaagaggtgaaggctgcagtg

SEQ ID NO: 38003 - DNA, 2300 bp, Homo sapien
acaaagggtggttctatgtattaagttactgtggttggcctggtacctgctcattcaatactcacactcatacgaccctgtgcggtaagtgtgattgtctccattttatagatgtctcacagatgtttaggtcactcacttttaaaacttggatttggccaggtgcggtggctcacgcctgtaatcctagtactttgggaggccaaggcaggcggatcacctgaggtcaggagttcaagaccagcctggccaacatggtaaaaccctgtctctactaaaaaacaaaaattagctgggcatgatggcgggtgcctgtaatcccagctacttgggagggtgaacctgggagacggtggttgcagtgagctgagattgctctactgcactccagcctgggcggctgagccagactctatcaataaacaaacaaacaaacaaacaaaacttggatttgcacccaggcctctctgacttgaaaaatttactttactacctcaatggtaccctaaattaaattaaatcttttctcaaggttgaaacctgtccgcgtccttgcccctctagaagtaagagccggggttgctgttggccctctacacatctgaccatgtctgggtggagggcacgtgtggctctgccccagtgctgccagcagatcggcctccaggagaacttaaaggagggccccaatctctagcaagaaattcttggcccagatgtgttttaggattcagagttttccagattttagacttatagaattatagtgcatataccatgtcatgcagaatacccagtagagtcgggggcagcaccttgaaatgaattacattcatatctccagagtgaaattgttaccaggagcaaatctgctcgggtctgcggcaatctctttcttctgcctcctcagaagaaagagtttgactgatggggatgaggcagaagagaccgaggcaagttttagagcaggagtgaaagtttattaaaaagctctagagcaggaatgaaaagaaagtagacttggaagagggccaaatgggcatctttgggacaagtgtggggtctgaacttttgacttggaattttatatggtggcatgtaaaattacttcttttatatggtggcatataaaattaccctgcttacttctagggtctggcgtcccttctccctgattcttcccttgggtgggctgtgtgcacaatggcctgctagcttttgggaggggagcatgagcagtgtgcttactggagttgtaggcatgctcacctgaggcggtcttcctattactggtggaatgtccctggaaggtcatataccagttcaatgccgccattttgtctttaaatgtgcatgcttgagaccactcacccacctcctgagatcttatcaggaagctgctgatcaccagcttcaggtgtttctctctctatagggagactgcctttctctggtgctggctgcaacctattattattttagagaggcagaaaattgcctgagtatcacctgatgggtgcctgactttcctggtggggtgcagggccctctcctgccctctttgtgtctgactagctacccactgtaacaaaatgttcacaccaagtgggataaagattataaagaatttcacgtcaattcagttcagctgttgctacaaaattagctatgccgagctttggacctttgaagcttttttccccccccaactttatttagaagaacaaatctaggtcccagtgccccccatgtcctccccaaacccccaccataatttaagtaatttagagttgaagggaggagaaagaaaggggagggatgaggaagaagagcccactgcagccctggcgatgggattctcggccaccccagggcccccggggaccagaggttcggtggaggaggctgcagctcctgggcccaccatgccccccagatctccacacatggttctccaagagcaggtagcctgacccctggttaagtgcagactccaggtggctcagccggcacctgatggtcagcagcacacatcagacacgcagctcaaccgtccagttcctccggatcttactgctggcacccatattgaggtggaaggaagcctttgggtggagcgatgtggaagtccttcctcatcaggagtttcacatggtacaggccccagggtcctcaaaggtgacctgcaggtctgcgagcacctccttgttgggaaagatctttaagtcatccagcaggttttgcagtcaatgtcgttacctccttgtgcaccaggccatcatggggagagcaggttcttc

SEQ ID NO: 38004 - DNA, 2300 bp, Homo sapien
gcaggccagacggggaccaatgatttcagtgtgctctgaagaaaggatggtgatgaatccatatgccagttttgtggacctgaggtgcagaaaatggagcatgggaacacactgcagtagtccaggtcccaagtggccataacaaagtctttgctgaggggtagagagaggggctttgatatggtttggatctgtatcaccacccaaatctcatgtgtaattgtaatcccagtgttgtagatggggcctggtgggaggggattgtatcatgggggtggatccttcatgaatggtttagtacaggggttcccaacccctaggccatggatgggtacttactgtgttaggaacctggccacacagcaggagatgagtagcaaatgagagagcattactgcctgagttccaccttctgttagatcagtggtggtgttagattctcacaggagcttgaagcctattgtgaactgtgcatgtgagggatctaggttgagaatctaatgcctgatgatctgaagtggaattgtttcatccggaaatcattccccgcccacccaccagtccgtgaaaaaattgtcttccacaaaactagtccctggtgccaaaaacgtcggggactgctggtttagtaccatccatttgatgctgttcttgtgatagagttctcacaagatctggttgtttaaaaatatgtagcacttcccctctctctctcttcctcctgctctagccatgtgagacatctggctccttcaccttctgccacggttgtaagtttcctgaggcctctccagaagcagaggctgccatgcttcctgtacagcctgcagaatcatgagcctagtaaacttttctttataaattaccctgtctccggtatttctttctttctttctttctttttattttgttttttaagacagtgtctcgctttgtcgcccagggtggagtgcagtggtgccatctcggctcactgcaagctccgcctcccagactcacaccattctcctgcctcagcctccctagtagctgggactacaggcacccgccaccacacctggttaattttttgcatttttagtagagatggggtttcaccatgttaaccaggatggtctcgatctcctgacctcatgatccgcctgcctcagcctcccaaagtgctgggattacaggcgaggtatttctttatagtaatgtgagaacagactaatatggggttcctcccatttggcaccaccatgtcagctggaggggaactggcacgaggtttgaacgatgtggcctctgtcaagctggctgtgtctagggagagcttccaagctgcatgcgtcaagaggaggcatgcatctgtgcctgcaagaagctggacggaggctccaaggcctgagtgactgtgtcctgcagaagttcgccccagttggcaggcccatttaggggggacatggagaagaaggtgccagcaggatgggttcagacgtcctggtgctctcgctgcaatggcttccatgcctggagcactcagaacagtcttggctgagcatttacagacatcgtctcatttcctcctcccaacccacacagaagccaggtgttttgggtccagaattgtatacaatttggggagccttttttgaaaaggaacacatatgagctaatacaaatagactgaaataagaggaaaaaaataaaataatttctttagaaaggaaaaggaacaccaacttaccaacatgaaattagatacaaaagcaggtctttagaagtgagggctacctaagctttagcttcattcactttgcagtacatttcgctctggggacaagtatcatcacccccattttaaaggtcaagaaattgaggcacagattggtgaagcgattcacccaatgtcagacagtgcgcaacgaattagctaggattgtatcccagatctgtttagtgtcacccaagttagtagtaacacccaatgacctctgatggcggtggtgatgggtgcctctgttctagaaagaatgtgtatctaatttgcatcataaagtgattgatgccatcagctgtgtttatgccatcagttagtctgtattgatccagggcgtattttgtgcagatggggaccctgggaagttagcagcaatggagaaaagcgtggaatgctctccaggtattaacaccactgccaccgccaccctggccatggaacactgcacagggagaaggcaacagagcaaaacaagcatattgcatttctccagctgctccggaagtccttgggacaggaaccatgtgtgtttaggaga

SEQ ID NO: 38005 - DNA, 2300 bp, Homo sapien
tagtggtgccatcttacacctccaccagcaatgtatgaccatttcaattgctctgcgtcctcaccaacattggatacaatcagtcgttttaaagttaaccatctcattgcatgtttttgtggggtgtatgtatgtgtgtttttaaatgcactttggtttggccaacgcttggtttcatttataccaaggggagcatttgctaggtttatggggaataaaaccagattatttctgttgttctaggatattattaatagagtcctctcttcacctccagagtgtcctggtttgtatgataaaatatgttttctctgcttccagcccaagtagccacgctccacggctgtgcttccacagccacgttgcgcatcaaggcattctgctcaacgaagagttttctctgttttcctgcttgtcttaaactgttttttccttaccgcaccaggatttcagtgcgtggcataatgtagcccagtgtttgggtgggagatgatggtaggtagcaaggcatttttgcgatcaagtgcaaatagcttgcctaaaaataaagccaataaagagaaccgtggagccagagatggaggcagtcctgccatgtcctaatgaccccatcatcacttgggtcggatgcaaccagacttgaggtaagattccttaccttaacttttcaacaaggaaccaaaaatttccccccgacctttttttttttttttttggtctaagctagtttgacttggttttctgaccaatatacatagcaggggaatgtgcctcagaaaggcagtagcattttccaaacttgggctgccgctaattttacaaccaaagtaccttccgcctgtgagaggtactatttttgctgacccagtccttggaattgaaaccagatgcactggtcacattggttggggatgaaacttcagagaacactaaacgtccagggtcaaagtattcaacgatatcaccgcatgatttgcttaatcgaatactctagctctaggtatccactataatgcagagggctctttaatctttaaccaaattgtcatttagcagtgtgatgcaaaaactcttctgggttttgggaagcagcccccatttccctccttcgtaatgattagacttaatattacaaaaacttatccttgtttactcacagcgctaaatgtgcaaaggagcaaacctgtatttgacctatgcgaacacacaggagggtggtgcgtgccctctgctaggagcacaatgcgtcgctggcgttattagaggacatctctctgagcggagcaaaggtaatacactggtggaagaaaagaaaaggccgaaagtggggacagaaattaagacgatcccattcagtctcctctggaacgttctgcaaaattccgtgagaccctggacctacagcgatgcactctcagggactgccccggccttcatccccacacctcaaagacagacgaaaagcagctgagcagatctcgcctcgggcaatcctaaacagcctctaccaggcacaaccagtcctaggccccgggcggcaaccatggtccgggggcagctgacttaggacagcctccctgtgacccgccctcgccggcacggcgccggctccgccccttaagccccctaagtcccgcctctgcgctcccggggcctacccccgcgctcatggccccgcccccgcttttcctaccccatcgcgccctggccccgctcccacactctatgaccccgcctctcgcactccaggcccgccccacgcgctccagggttctgctctccacccatttgtgccaggccacgcccccacacccatggctcctcctctcgcacgccagggcctcccctcgcgctctctggttcgttctccaccctcttgagccttgatgccgccccctcttccatggccccgcctctcccactccaggcccgcccttgcgctctcgggttcctctctccacccactggtgccaggcctcgccccgcgccagggcccctcccccacgtgccctcgggagtcccggggaggagttgccgcgcggaggaggcgtggccgcggtgcctgcggaggcgcgagcggcgcggcgcggcgcggccgggactttggctttgacaccgactgcgagcgggagccgtgcggctggtgctgggtctggactggctctggcggatccccgcccgagttgggcgcaggactttttgccggggtaaacgcaactgcggcggcgccgccgcaagccccggtgcagcctcggcggcgggtttcgccgccgctgccgccgcctccgagcagccctgcg

SEQ ID NO: 38006 - DNA, 2300 bp, Homo sapien
acttcagagaacactaaacgtccagggtcaaagtattcaacgatatcaccgcatgatttgcttaatcgaatactctagctctaggtatccactataatgcagagggctctttaatctttaaccaaattgtcatttagcagtgtgatgcaaaaactcttctgggttttgggaagcagcccccatttccctccttcgtaatgattagacttaatattacaaaaacttatccttgtttactcacagcgctaaatgtgcaaaggagcaaacctgtatttgacctatgcgaacacacaggagggtggtgcgtgccctctgctaggagcacaatgcgtcgctggcgttattagaggacatctctctgagcggagcaaaggtaatacactggtggaagaaaagaaaaggccgaaagtggggacagaaattaagacgatcccattcagtctcctctggaacgttctgcaaaattccgtgagaccctggacctacagcgatgcactctcagggactgccccggccttcatccccacacctcaaagacagacgaaaagcagctgagcagatctcgcctcgggcaatcctaaacagcctctaccaggcacaaccagtcctaggccccgggcggcaaccatggtccgggggcagctgacttaggacagcctccctgtgacccgccctcgccggcacggcgccggctccgccccttaagccccctaagtcccgcctctgcgctcccggggcctacccccgcgctcatggccccgcccccgcttttcctaccccatcgcgccctggccccgctcccacactctatgaccccgcctctcgcactccaggcccgccccacgcgctccagggttctgctctccacccatttgtgccaggccacgcccccacacccatggctcctcctctcgcacgccagggcctcccctcgcgctctctggttcgttctccaccctcttgagccttgatgccgccccctcttccatggccccgcctctcccactccaggcccgcccttgcgctctcgggttcctctctccacccactggtgccaggcctcgccccgcgccagggcccctcccccacgtgccctcgggagtcccggggaggagttgccgcgcggaggaggcgtggccgcggtgcctgcggaggcgcgagcggcgcggcgcggcgcggccgggactttggctttgacaccgactgcgagcgggagccgtgcggctggtgctgggtctggactggctctggcggatccccgcccgagttgggcgcaggactttttgccggggtaaacgcaactgcggcggcgccgccgcaagccccggtgcagcctcggcggcgggtttcgccgccgctgccgccgcctccgagcagccctgcggcttctattcactctgggagagcgatgctaagtttctcccatagaaagagccgggacacgcagaccgaagcggcgtagtcggcttccagggcctgaccagtgacccacacccgcgcggacgcctaggctggaggcagggggcccgtgctgtcccgggctgggctcaggcttccgagccgcaggtggaagaggaaccggcgccccgcagagcggccgagaggtggggcgcggggacccgcggcaggtcgggtggggggtcgataagccccttctcagtgcccgctccggggagcacggacttcccaggttgcaggtagcgctgtgtcagatgcggagcgtgggggaggtggagtggccaccccgtctgcgcgagcccaagtgtgggtgacccaagtgtcagagttgagagaggcctggaggagaggcatgaggctgatggggataggtctcttcccaagagaagcggctcgtagcctttttggactccagtgtgataaaacccggacgtccctagaggagaatccacatgggcctagcctcattgtgcctgcgtttttaggggttcacgggcagccaccagtccccgactcctggttactaactctagcactaggtagggggtgctaatgcaaatttcttaattcaatgggtttctatgtttattgatttattttctaggcggccaagtgaaaggtaattttggacacgccaggcatggaagattcggtgtttgtctatagtaacctcttcagtccctgaatcctgcaccttccgtttttctgtgcttgtacggcctactgggcttcctccctagccagagagctcttctgcagtggtgcggccttcccgggagcctgatcctggcggaccatggggagcaccctgggctgccaccgctccatccccagggacccct

SEQ ID NO: 38007 - DNA, 2300 bp, Homo sapien
actcaggaggctgaggcaggaggattgcttgaacccgagaggcagaggttgcagtgagccgagatccaccactgcactccagcctgggtgacacagcaagactctgtctcaaaaagaaaaaaagaaaaaatatgtatatacagcatgatcttggagcatcttgtcgtgtcagaaggaagtgctcaaacaagcaaacaaaaaaaacctgctgggtggatgtcaaaaggacgcatgagccaactgaaagagctctcagtgaccaaagctggaaatatttcaggaacaaagtcaatgacatagtactggatataactcaaggtatacctgacttatacctcataagtatccatgagtccgtactgatctaagtaaatggttgaaaaaattaataaatgggaagaagagatccatcccttgtgcagcagaattccagataacatgtgtagatactctagcctaaaggagggggagcacaacttcattttctacaaatggaagacatcattttcacatatcaaatgaatgttttgatgagggatgcagtgagaggaatttccttaggttgctggggagggttgaaaccagagcagccttggaaagcaggctggcagtatttatccagagccttaacaatggccatagtttttcatgaggactctctatagttctaagaacagaaagctgccaggtgtggtggctcacgcctataatcccagcactttgggagggagaggcggacggatcacttgaggtcaggagttcgagatcagcctggccaacatggttaagccctgtctctactaaaaatacaaaagttagcaaggcgtggtggtgggtgcctgtagtcccagctactcaggaggctgaggcaggagaatcgcttgaacccaggaggcagaggttgtagtgagccgagattgtgccactgcactccagcccggccaacagagtgagactgtctcacaaaaaaaaaaaaaaaaaaaaaaaaatgagatgctcacttcagcattatttatagcagtggctactgggaacagccttaaaagtgaccagcagcaggaaaatggtacattatgtgcatcaacatgatggatggatggatactgtgggctgcccattgaatgccaggaagacccaggcttttcccttggtctcttgatctgaatttgaccctcaagcagacagagtacagttcccaatcgaggagtggctgctgcttatatctccaacctcatctttaacatctggcttcttgataccttgtcctagagaagtagccaactgaacctcaggtacccaccccacccctgggaagccaggctgtttcttagctccctggccttgcataggttccctctcatccatgttgacccaagcacttctgtgcatcctctgagacccaagtcaggcattgtctcctccgggaagccttccctgaccacctttccctgtgctgtgttggtttcagtatgtgtgtttgtttttgcacctactctgtgctcttgtctgttttctagtctgtctctcagagcaggagttgcattttattcatctctggatttcctgcatagtaagtgcccagtagtatgttgagtttttgttaaatatttgggtaagacccttaggtctttttttttttttttttttttttgtgataagatttggaacccataggcttcaacaagggtgatttttgtgtcacgctgcccctgatttccaaacgtgttgctgacttactcttaatattggtggcagggtgatatgcacatgaaatgtggaagagtgaggagagtgagaaccatgccacagtactaaccccatgggagtcaagtcagagaatctcaatcccgtttcaaagggccacggtcagtgttgggttttacttcccaacaactcttaaactcattttcttccttccacttccaggagaaaaggatgtcattatcttaggggattttggccaagggccagacagcaatgactatgatatcctgaggaaagaaaagttccaccacctgatccccgcgcacaccttcaccaacatcagcaccaagaaccctcaaggctcgaagtctctggacaacatctggatcagtaaaagcttaaagaaggttttcacaggtgaggcagaactcacttgtcctttctcctgttcaggaatggagtgagagaaacatgtctgaactgacagaagtcatctcacctcctctgaggcatacataggattgtggtttacgtgactgtataactgtcatttaatcagagacagaatccaggaatccaggcccctgtcagtcccg

SEQ ID NO: 38008 - DNA, 2300 bp, Homo sapien
cgcctcctgggttcaagtgattctcctgcctcagcctccctagtagctgggattacaggcaccagccaccacacccagctaatttttgtatttttagtagagacagtgtttttgccgtgttggccaggctggtctcgaactcctgacctcaggtcatccgcctgccttggcctcccagagtgctgggattacaggcatgagccactgcacccagcctagtcgtagttcttttctgtagattttgttttcccaactattttactcattaaattagtcgcccagatttcttactcaatactgttaagttcctgttgcattgaattgttttgatgtgttcagtgtctttttgtttttcttactgccatttctgtataacttgtgggattagatgaattactttatgaaaattgctaatgaagagatttgcccgagaagcctctcttattagtcttcttagtggtcagtctcaaagccttggtgctgccaatgagctggattctggcacctgtatcttcttctgcatcagtttagtcagggagcgtatttacgacacctcagaggtacagttttaagtccttcgtgtcttcctcagcacagccatctactttcccttaaactcatggaaggttcttgagttcccaaagggtcaaaattagaagggtcacaggtggtttggctgcacattccttcttggtttctgggagatttaaggtggttataaacaaaaaacagtgttaatttacaggcccattgttttctgtgaaagcttctccccttacctttatgttttgttttatgtctgtgtactttttctcttgccccttagattgtagttcatctcactgaggacctgctttcccgagcgtcaatgacagtagtaaatggatgtccgactctgactatcaatgtgtccactgcacgtgagcattggctggagggaatgctgaggcatgaaataggtaggggcaatcctttccatttgtttatttgtaatatcaggaattagctctaaagaaatgttcttttagaaggggttttttcttagtagtatttattttattttcttagtagaagaaaatttagcaagaagtcatgagcttcacttggactgaagctaatgtatttatgtctcatttcaaactagattttttaagggaagtgtttaggtgtattgaacctggaaagtcatttagctgctctggatttcccctacattaaactgagggggttgaattaaggtatctttgaggttcttttcaaatattaagtctgtgattcttctctttaaaaaagtaaattgttataaaggttatacctcctctcttgagacatgtgatccttttgaaggcagtgtactccttcacacccaagagatgttaggatcaggtcattttctactttgttttgatttgtaggcacacatcaatttggctttagaattttttttttttttttttttttttttttttgagatgggatctcggtctgtcgcccattcttgggcacagtggcaggatctcagctcactgcaacctctgcctcccaggcttaagtgatcctcttcacctcagcctcctgagtagctgggaccccaggtgcacaccaccacacccagctaattttttgtatttctggtagacatgtttcaccatgttgcccaggctggtctccaactcctgaactcaagtgatccgcatgcctcggccttccaaagtgctgggattacaggcatgagccaccgcgcctggctggttttaggattgttgatggaatctaactttgggggaagaattaaaacaagaatggcatttctttttcttcatgtaacttttcttctccataggtacacattattttcgaggtattaacaacctccagcagccatggaacagttggactggacgtaaaaaacatgagctaaagccaaataatcccacagaggaaggactagcaagcattcacagtgttctgtttagaaaagacccttttttatggagggctgccctcctctactacactgtttatcaagccagccaaatgtctttttgtgaactctttaaagatattggcaggtttgtcaaggaccccaatacaagatgggattattgtgtacgggccaagaggggatggactgatacttcccaaccaggtgggtgtcccttaactctaggttttctgacttactgactagttgtctagtgattttgtttatatcctaatccctgaatcacaaaattcacttacttaaaaaaatgaaatctttgttacctgaggtcagaactggttttcccaaaccacat

SEQ ID NO: 38009 - DNA, 2300 bp, Homo sapien
gttaagtgctaagtaaaaaaaataaagcagagaagggctataggaaatatgaaggagtagaattttaaatagagtggccagggaagggctcacgaagaggtgacatttggattaagtcctgaggaagtaagggagctagtcctgcggatatctgagggaagaacattccacgcagggaggattccaagttgcaaaggccttgaggtgaaatagtgcctggaattgaggaatatcaaagaggccagtgtatccatcggggaggaagtagttggggatgagatcaaagaggtgacaggaggctaggtcataaaggacttcacaggaaaggaagccactgaagattttgaacagagtgacatgatctgattttttcacaggttcactctggccaatgagttttgagaacagtgtgaaagagggtagggtgggaatacagagactgtctagaagactgccataatccagacaagaggtggtggtggcttgaaccagagtggtagcaagtggctagattctggatgtatttcgaaaacagtagtcacaggatttgaagacagaatatgaagtgaggttatccagtttttgtgatatagttacatttccattgttctctcctaagtgatgaaaaagacacaatttctcacaagttgcctgtcattctcagggtgtgacggtcctgatattcaactttcttttgttcctgagtttgaaaacacaccccaattatttccatgtcttagccttgaggatgaagagaaaatttaactgtctgaagactgacagttgccagcactatctcagctcctcctaaactgtaagctccgctaggcttatttcatttcccttgatatcctcaaagcctgcctcagaaccttgcacacgttagggtctcaaaaaatgtttgttgaatggtttagtctacatttcccattcccaccgtactttttttttttttttagtctcactttgtcacccaggctggagtgcagtggcgcgatcatggctcactacattctcacctctcggactcaagcaatcctcccacctcggcctcccgagtagctgggactacagaagtgtgccaccacgatttgttcactttttgtgtttttagtagagatgggttttcgccatgtggcccaggctggtctccaactcctggcctcaagcgatccacccgccttggtctcccaaagtgcgaggattacaggcatgagccaccgtggcccgcctcccatggttattgtaaaagattaaattttcatacttgctaatgtgaaaatgaataataaactgaaaataacattcagcccctatcaattgcacaatcacaagctaaaatgtgaatttcagcattaaggatagtatgctgaggtaccgtcaagtggtcattgagcctcctgcactttccactcttactagctcatcctaaacgtgttttagcttccccgcacctcgtaaggggaaggacgggtagactggctttgctatttgcagctagggccgagtgtcacagcgcaccatggagttaagtcacctttgaacgggtacaaacgtctctgaaagatcagtcaatatgcgttacccactggctggagaccccagcgcgctcgcgggcacagccacaagccccggaggcactggcccgcgctgtgcacgccgggagttgtagttcctcccactctctctcgccgcccgcgggccttcgtcgcacgagcgcccccagcggcgcgcaggctccgtgaagcgcagcgcgcgcggaccccgggggcagtttcctagcaaccggcggagcggctacgtcacggtggcaggttctaagcgctgctgggcaccgtaaggccgccgtgtgtaccttccagtagctacgggctggtggaagcgctgctcacagtcagtgtcggtacgtcttcgtccgcccttaccctccttatcctgctccaggtagcggagagccgcctcccgccgcgcccccgccaccgaggcccgggtcagaggctagaggccgcccgcccctgcgcggccctttcccctgagcccgcggagcccgccgccccgggcctcggggcgacgatgctggagtccattcgcgtgacgggtgagtgccgggaagggctggccgcggcgggggtgcggggcggaccggggtcccgccgcccggggctcaggtaatggtagccaccggctgggcgcgccgctcgggactccaccctgcgccccgaccccttcggggcgcgcaggaggcgctcgcgaaaaacctgtggagggaagagagaaatcggccccttatcctttcgtca

SEQ ID NO: 38010 - DNA, 2300 bp, Homo sapien
ccatttgatataattctatattattttagttatcattgaaaatgcacacactttctgttgtctacttattcattaattcacaaatatttattaaggacctactacatgccagccactcttcttggtgtgggaatatagcagtgaacaaacaaaaatcactgcacttgtggaaattttattctagggatggagacagacaacagtcatgataaatcaataaaatatataataaattagataatgttaagtgctaagtaaaaaaaataaagcagagaagggctataggaaatatgaaggagtagaattttaaatagagtggccagggaagggctcacgaagaggtgacatttggattaagtcctgaggaagtaagggagctagtcctgcggatatctgagggaagaacattccacgcagggaggattccaagttgcaaaggccttgaggtgaaatagtgcctggaattgaggaatatcaaagaggccagtgtatccatcggggaggaagtagttggggatgagatcaaagaggtgacaggaggctaggtcataaaggacttcacaggaaaggaagccactgaagattttgaacagagtgacatgatctgattttttcacaggttcactctggccaatgagttttgagaacagtgtgaaagagggtagggtgggaatacagagactgtctagaagactgccataatccagacaagaggtggtggtggcttgaaccagagtggtagcaagtggctagattctggatgtatttcgaaaacagtagtcacaggatttgaagacagaatatgaagtgaggttatccagtttttgtgatatagttacatttccattgttctctcctaagtgatgaaaaagacacaatttctcacaagttgcctgtcattctcagggtgtgacggtcctgatattcaactttcttttgttcctgagtttgaaaacacaccccaattatttccatgtcttagccttgaggatgaagagaaaatttaactgtctgaagactgacagttgccagcactatctcagctcctcctaaactgtaagctccgctaggcttatttcatttcccttgatatcctcaaagcctgcctcagaaccttgcacacgttagggtctcaaaaaatgtttgttgaatggtttagtctacatttcccattcccaccgtactttttttttttttttagtctcactttgtcacccaggctggagtgcagtggcgcgatcatggctcactacattctcacctctcggactcaagcaatcctcccacctcggcctcccgagtagctgggactacagaagtgtgccaccacgatttgttcactttttgtgtttttagtagagatgggttttcgccatgtggcccaggctggtctccaactcctggcctcaagcgatccacccgccttggtctcccaaagtgcgaggattacaggcatgagccaccgtggcccgcctcccatggttattgtaaaagattaaattttcatacttgctaatgtgaaaatgaataataaactgaaaataacattcagcccctatcaattgcacaatcacaagctaaaatgtgaatttcagcattaaggatagtatgctgaggtaccgtcaagtggtcattgagcctcctgcactttccactcttactagctcatcctaaacgtgttttagcttccccgcacctcgtaaggggaaggacgggtagactggctttgctatttgcagctagggccgagtgtcacagcgcaccatggagttaagtcacctttgaacgggtacaaacgtctctgaaagatcagtcaatatgcgttacccactggctggagaccccagcgcgctcgcgggcacagccacaagccccggaggcactggcccgcgctgtgcacgccgggagttgtagttcctcccactctctctcgccgcccgcgggccttcgtcgcacgagcgcccccagcggcgcgcaggctccgtgaagcgcagcgcgcgcggaccccgggggcagtttcctagcaaccggcggagcggctacgtcacggtggcaggttctaagcgctgctgggcaccgtaaggccgccgtgtgtaccttccagtagctacgggctggtggaagcgctgctcacagtcagtgtcggtacgtcttcgtccgcccttaccctccttatcctgctccaggtagcggagagccgcctcccgccgcgcccccgccaccgaggcccgggtcagaggctagaggccgcccgcccctgcgcggccctttcccctgagcccgcggagcccgccgccccg

SEQ ID NO: 38011 - DNA, 2300 bp, Homo sapien
gtgagtagctatcttatgctaggtgctttacctcttttagtcttaactagaatctagttgaggtagatacaaagaaactaaggctcatagaagtgatagccagaaggcacaacggctacataaatttctaatgactcattttccaacgttgtttaaaacacgcatacacacacagacacgccccaaatacatacacacctttcttgtcacacttgaaaaaaatggaagtatctttttcctttgttcataagtaacacattctgggttaaatattaataattccatatactacacactcggacagtgtcttattacttattatgaaatatttttggattatgtctctccatttttcatctgcccctcctaacaactctgaggaaatcagggcagatgattattcctgttacacagataagtaaactaaaatacaaacaggctaaatcagaagttcttgtcctggtgtccatgaacttcacaaaatcctgttaaatagtttatgattaaatggtcatttttctaggtagagggtcagttttaacatatttccaaaggagtccatgactccccacaaaggttaaaaaaaaaaaaaacccatgggttaaccgatttggctaactgggtggagccctgaccccaagcaatatttcccttacctcttgccgtgatttcagtcacgtacaatttatcatacaaaaattcaaattaaaaatattagtaaattctttttgtaatgttgattgactgctaagatggacatattattaaacatattgaaaccactcagttgggaggaatagttctgttttgttcagctcatggacagtcactcttaacttttcagatgaacaaatcaagaactgtcatctttacctgcacagacttgttatagaagaaatgaatctgatacagaaattatgtaacctatcttacaatttggagtactctacaaagaataagcaggagacacagccttagctagtgtggaaaacgggtcatgagctgagaacagggttttcatttctttggaccagtttctttaacgttttcgggtgtcccttctctcggcagtaaaaggaaggattgaactagatagagggcttgtcagaattcctcccgctctaacactgtacacagttggatggaatttaaaataaaaaattgtgcatgaacgcttcacacagtctgttaattttagctttatttcattggcttagagtgtcggggacccaccggaactggcttttctgagggccaggcctgcagtcccccttttggggactaggagttgggtgtgacctaggaaacaaagctactgaaggccaacgggctagcagcacctgaaacacaagggctctttgtctggctctgtagcccaggctggaatgcagtggtgtgatctctgctcactgcaacctccacctcccgggtcccagttcaagcaattctcctgcctcagcctcccgagtagctgggattagaggcacgcgccaccatgcctatctaatttttttgtatttttagtagagacggggtttcaccatgttggcaaggctggtcttgaactcctgacctcgtgatctgcccgcctcggcctcccacagtgctgggattatgtcctgccaacacaagggctcttaatcctttttttttcttttttgaggcagggtctcactctgccgcccaggctggagtgcagtagtgagatcgcagctcactgcagccatgacctcctgggctcaagcgatcctccagcctcagcctccccaaatgctgggattataagcatgcgccactactcccggccttaatactttatttaggaatgaaggaaggcgggaacacccaaacgcggttggtgtgaagcaatcgccttaaagctgaggggaatgtgtggttgttgggggtggagccaggaacccgacgccgttggagagcaggaagcgccccgctgcccgcctccaccccgcggcgagggctgggagggggccgggaaggaggcggggccgcccctgggaaccacccggcccggcgcggccacgtgaccgagcgcaggggcggggagagggcgccccggctccgcccagcgcgcatgctcgcggctcggcgctgaaattcaaatttgaacggctgcagaggccgagtccgtcactggaagccgagaggagaggacagctggttgtgggagagttcccccgcctcagactcctggttttttccaggagacacactgagctgagactcacttttctcttcctgaatttgaaccaccgtttccatcgtctcgtagtccgacgcct

SEQ ID NO: 38012 - DNA, 2300 bp, Homo sapien
tctaaagcgtctacaataaaatatgcttctgtgaagtattttaattatagctttttctcttttaaggtttttataaagaaagttctggattggtacacttcactctgggtttctttgtagtattcttgtactgggatgactatcacctgtgagtagagcttcaaactcttgacgttatgagtagtgagtttatggttttgtcacctgggcgacactgcgagactccgtcttaaaaaaaaaaagagtgccagaacagtatcagcgaccacagggaggaagaccaatgcagaacagtcttgtttgaggaaaagagagtttaccatgattgtaacctttctcaactggagttaccaaaataattaagccctaatacgctggcgttaatatgatagacttatttcctatgtttgtagggtggcattgaattatccttgggagaattgagaaaatagtctctcaattttcctgtgtaccatggttctgagaggaaaccctggttgagagagtcattttatactgactttcagttgatagacaactgtaccagtagctcatttcactgtgcaaatgttatgaatgctataattaagcacccaagagttggaatcaattcaagtagttcattcattacctattaaggaaaagacgtctaagctgtttttccaactgcaagtgatctaacttttcataatataaaccatacatatttctgagcacatcctaaaacgatctaaacaggtaaagtttctttcagttgagatttgtactaccttcagaatgacatttttaagtaaaatgaagtgcaattttcagccaacttaaaaatgctttgttcctgtctgttacttaggaagacacatagggctaatgttttaaggaatcgtattctagtttagataaaataaatacacgcttttcgacctcagtgtaagtgaaagatacttggtgcatgaccagccctattttaaggctaatacaaaaataggctctagatttttctattagaacctttaaggaaggtgaaaaaaattgatgtatttgtcccaagatgattaagaatttgaaacagaaaaatagattatgtcatgcttgaatataagtaaactctaattgctgaaatctgtaattaatatctcatacataacttatagaattataattacatctccccgaaagaattaccactcttcacagcatttaagtttttgaatcagtgtaaacagttttaggtccactttgcaacactcaaaaactaacagtttgaaatttgcacaacagcctaaagaaagaggaactgtcctggaataaaagagagtggacaactggcaacaaaacactcctgaatgtgacaacgcacattctccacaaaagctaaaactagagaaatcgacacaataaccatgtaacccatatgcaatctcaaaggaacaaaagatgaaataagtactgtaatgatatgccccagaaacaccgaaaagtttatttctttgctctaaaatcgtgagctgatagttttgctcggtacacttgcattgtttcaattaaaatggtcagtcccgggtatgaacttcttcgttagttagctgaacaatgggatctcaaggaactactggctttttatgaacgaatgcagtggtttctagcacctgcttattttaacgttttgctgtcatttcattagcatctcccctgcgggctgcgtgaactccgcaaatcacacatcctactgcctttcccggcggcagccgcactgagtcaccggccccggaccccgccctgcagggcattccagctgcttccagcaggacccgttccgcaggcctgcgcctcactcttgctgcgccaggactgcagagggacatggtaaaaacgggggctgaaagacctctcgcaacagccttttaggacagactcaaagccttcctccctgagttttatctgtaggaccgaaacaacaaaatctcagaggaacccaccaaccacagcaggccgcagccgcggcgaccccggcccgcacacactgcgcacgcgcgcacacacgcgccctccgcccggtgggggttcgcccagaggttgacagaggaaggtgggtgggggcctagagcggtgggtcatggctggctgcacccgcaaactcactcacctccgtaaacggatccatcgccccaggcgtcggactacgagacgatggaaacggtggttcaaattcaggaagagaaaagtgagtctcagctcagtgtgtctcctggaaaaaaccaggagtctgaggcgggggaactctcccacaaccagctgtcctc

SEQ ID NO: 38013 - DNA, 2300 bp, Homo sapien
ctcattagtcacaagtggctaatggttactgtattgaacaatcaaacattctgttgtacagcaatggtctaatccatttttaaaacaaaaagtttctgtgagatacataatcttaaattgtgcaatgttatatataccaccattaattcattctaaaaatataacctatcttattcatgatccattgaaaaatggaaaaaatagatctaatagtttttttttaatttcggatttaatatcatttgatttaaaaagatattgtcaaatttaaataacttggaagtttcatgcatgctagaacttttcactggttcttaaacctattaatctcatttaaaaattcagcatagagtgatcctggtattatacgtaagcattactcttaaacatggtttttaactcttttctgaaaacattttcagatgacattcctgaaagctcactcttctcaccaatgccatcagaggaaaaggctgcttcccctcccagacctctgctttcaaatgcctcggcaactccagttggcagaaggggccgtctggccaatcttgctgcaactatttgctcctgggaagatgatgtaaatcactcatttgcaaaacaaaacagtgtacaagaacagcctggtaccgcttgtttatccaaattttcctctgcaagtggagcatctgctaggatcaatagcagcagtgttaagcaggaagctacattctgttcccaaagggatggcgatgcctctttgaataaagccctatcctcaagtgctgatgatgcgtctttggttaatgcctcaatttccagctctgtggtaagtcagtatcattttggtctttggaagccttttcttttttcgttatgagtggtataatacatctgtgtgtatgtgcaggtggatgggtggatatatgttttataatagatgcatagtgagtttatatgtatttgtaagatatcggtttcttagaaagtgaaaatcgttaagttgggtacccatcccaagatcaattagcagttgacagctgaagttatactaatttgatgcaaatccagagtctataatggaatgatagagcctcttcttagtcattaaggagagcactgaaaattaagtcctctgttataatgctttaaatatatatatgagaaatttatataaatttatcaaatatttctgaaaagatatataacaaaatagtagctatagttgcctccaggaaggcaaattgccaaacagggtgtgatactttcactgtatatccttttgaaatgtttgaaacttttactttgtgcatgtgttacctcaacagttttcaaaaaacaatcttaaataaaaaggaaaaataatttcgtgtttctgaccattgtcttttagtgtagagctaggctttagaattagacctgcattgaatcccagctgtactacataattagaagtttggctttggacaaggtgcttaatattgcagggctttatttttctatgtgtaaaataggaaaaaaaggttatttggagggctaaataagagtcataaagcacttagcatagtacctggctatgtataagtagttaatctattaactatgaagtacatgatactattttgttaaatttttattgacttaattaaaatgtaatttggtctaatatagttaaaaatttgataaaggtactagtgcaataatatgaataaaactttttttttaaataaagagtgatcatactgctaatacttcattacccatgagtatattatgcagactaacccacatattatgatttaaatcatagcattttttaagttggttttttttcccaaatctttcaaatttgtttgatctattagagagcaaaatcatttcattttcataaatcttacataaaggctatcaagtaaataggacttgaattgttttgttataggactatttttagatattgtgaatgttgtttaccctaagtgttttcatgtttcagaaagctacttctccagtgaaatctactacatctatcactgatgctaaaagttgtgagggacaaaatcctgagctacttccaaaaactcctattagtcctctgaaaacgggggtatcgaaaccaattgtgaagtcaactttatcccagacagttccatccaagggagaattaagtagagaaatttgtctgcaatctcaatctaaagacaaatctacgacaccaggttacgtatttataaaaaatttagttattgctgattatattcaggatatctattctcagcattttaaatattcaattgtgaatggtacagcaatgatttgcc

SEQ ID NO: 38014 - DNA, 2300 bp, Homo sapien
tattgatagaagcacatattcaaattgagagtatctctgctttttaaattaaatcagaatacactgtagcttctaccaagatgtggtactgttaacagttactgctagctcacaggcacctgtgaaagtgtggttaagaccctcactgactttgacagggataggaaagttgctgccctcccacgctctgtactggtagaggggtgtttcagggaaaaactctctgggattatgttttcctctgttttcataccaccacaacaatcatcaacacagaagacttttgtgaccagttcaattcaattcaattctgacactagctacatggaagtagtgtcagatcccacaggttggggactcagtccccaagactgcctcctctccttcagataccagttgcaagtgcaagtccaggcctctcaaacttcctttttttttttttttttttttttgagacagtctcactctgtcgcccagactagagtgcagtggcacgatcttggctcactgcaacctccacctcccaggttcaagcgattcttctgcctcagcctcctgagtagctgggactacaggcgctgcccccacacccagctaatttttgtatttttagtagagagggggtttcaccatattggccaggctggtctggaactcctgacctcgtgatctgcctgccttggcctcccaaagtgctgggattacaggcgtgagccaccatacctggcccagggctctcaaacttctaaccgaccagcttcaagctgaggtttctgtgaccccctctttagcttggattaattggctcacagaactctgggaaatacttacgtttactgctttattttaaaggatatgggtgaggtatacggaaaggggcatggagcttccattgccttccctggggcgccaccctccaggaacctccacgtgttcagttatccagaagctccctgaacccagttctcttgggtttcagtggaagcttcataaagtcagcattccctcccccagggtatgaggctggatcctctctggtgaggggtgaggtgggtgtgggggtcgtcttaagaaccacaatgagaaagataggagaagattagagtcctgccgtggggcaggtgaaaggatggcaggagagttctgtttcctgtgaggcctaatgcacccaacattataacgaaagacagtaactagggatacagcagttatgagctaggaactgtggacgaaaaccagtatatatcataataccacaaggtgttagcagcccctgaaggttattatcgaaccctgccctaagtgacattaatattttcctattattgactgctgtgtgaaagggtagctctcaacgatagaaaaagtcatttgagagaatattttttgaaagtctgaagtctttggctattattctacatttgagttcttaatgcttttacttaaacccaaggtattgaatcagttttgatagacccaatattcatttctttttctttttcttttttcttttttttttttgtctcagacagagtttcactcttgtcccccaggctagagcgcaatggcacaatctgggctcactgcaacctctgcctcctgggttcaagtgattctcctgcctcagcctcctgagtagctgggattacaggcacctatcaccacgcctggctaattttttttgtatttttagtagagactgggctttgccatgttggccagacttgtcttgaactcctgacctcagttgatctgcccaccttggcctcccaaagtgctgggattaccaatattcatttcttagaaagtgttattgaagctgaagattttcttggtttcatttattagtagtattttcttatttttctttttaggaggtgcttttttttaaggcattttttcctatttagtaagaatatgaatattaaattttctttgttatgcctttaattcttaaatatctgagtcacagtgtccacctattgaaatatttttcagaagtgatacgtgaaattgagatgagtgtggatgatgatgatatcaatagttcgaaagtaattaatgacctcttcagtgatgtcctagaggaaggtgaactagatatggagaagagccaagaggagatggatcaagcattagcagaaagcagcgaagaacaggaagatgcactgaatatctcctcaatgtctttacttgcaccattggcacaaacagttggtgtggtaagtccagaggtaagaaaaggctaactaaacaggcccaggacataagtaaactaagtagtattcgtatctcccctt

SEQ ID NO: 38015 - DNA, 2300 bp, Homo sapien
tgggaaatacttacgtttactgctttattttaaaggatatgggtgaggtatacggaaaggggcatggagcttccattgccttccctggggcgccaccctccaggaacctccacgtgttcagttatccagaagctccctgaacccagttctcttgggtttcagtggaagcttcataaagtcagcattccctcccccagggtatgaggctggatcctctctggtgaggggtgaggtgggtgtgggggtcgtcttaagaaccacaatgagaaagataggagaagattagagtcctgccgtggggcaggtgaaaggatggcaggagagttctgtttcctgtgaggcctaatgcacccaacattataacgaaagacagtaactagggatacagcagttatgagctaggaactgtggacgaaaaccagtatatatcataataccacaaggtgttagcagcccctgaaggttattatcgaaccctgccctaagtgacattaatattttcctattattgactgctgtgtgaaagggtagctctcaacgatagaaaaagtcatttgagagaatattttttgaaagtctgaagtctttggctattattctacatttgagttcttaatgcttttacttaaacccaaggtattgaatcagttttgatagacccaatattcatttctttttctttttcttttttcttttttttttttgtctcagacagagtttcactcttgtcccccaggctagagcgcaatggcacaatctgggctcactgcaacctctgcctcctgggttcaagtgattctcctgcctcagcctcctgagtagctgggattacaggcacctatcaccacgcctggctaattttttttgtatttttagtagagactgggctttgccatgttggccagacttgtcttgaactcctgacctcagttgatctgcccaccttggcctcccaaagtgctgggattaccaatattcatttcttagaaagtgttattgaagctgaagattttcttggtttcatttattagtagtattttcttatttttctttttaggaggtgcttttttttaaggcattttttcctatttagtaagaatatgaatattaaattttctttgttatgcctttaattcttaaatatctgagtcacagtgtccacctattgaaatatttttcagaagtgatacgtgaaattgagatgagtgtggatgatgatgatatcaatagttcgaaagtaattaatgacctcttcagtgatgtcctagaggaaggtgaactagatatggagaagagccaagaggagatggatcaagcattagcagaaagcagcgaagaacaggaagatgcactgaatatctcctcaatgtctttacttgcaccattggcacaaacagttggtgtggtaagtccagaggtaagaaaaggctaactaaacaggcccaggacataagtaaactaagtagtattcgtatctcccctttcttttgttgacagatggacatttggctcagtagccaagggaattttgcagacctgttgtctgttctcttaaaagaaaccttaaaactcttgagtggtttccttttgaccttagatgaaatccaaagagtaacatggcttaaaaggccaggcatttgggctcagcttttgactctgccatttgctgactgtttattggtcaggttatttaagctctctatgccaccatttcctcttatgttaaacgaggttattaataatacctatatagtggagttgatgtgaacattgttgtattagtatatcggtagttagctccaaacacatgtaactaacatttagttacagctaactgctgttattagctttcaccctcaattgaataactgcagctctggggattgattcaactagaattttttttttgaagtataagtttcagctgtctttgtagttttatttattcttttatgtgttaggaacttagtttgctttgtttttatgatgaatcaatcagcttactggatttttttcttaatattaatggagaattcattgattttcacagaataaaatgaattatcatttaggatcaatgttaatatctgatgcgttttcccacagagtttagtgtccacacctagactggaattgaaagacaccagcagaagtgatgaaagtccaaaaccaggaaaattccaaagaactcgtgtccctcgagctgaatctggtgatagccttggttctgaagatcgtgatcttctttacaggtaagaacatttctggaaggcattcactcactaagggtcatggtttag

SEQ ID NO: 38016 - DNA, 2300 bp, Homo sapien
ttatttttaggctcacggttctgtttcctttggtctgtttccctatcccaatctcaatgaccgtagctttaaaataaatcttaatgtctgctaaggccagtctcctaacttatggagtaatgtatagtagttcccccttatccttagtggacgcgttccaagaccgccagtgaatgcatgaaaccatagataagtaccagacccacttgccatcagtcataacacgtttctgttgatgtcttacacccacaaatttaatgccttttgtattttaattaagcacttaccatttactgtggtggtaacttttgcagttggagatgtgacaacgaaactagcatgaatttctttttctttcctcacaatttcatggatagaagatttattcttactgtagatcttgacaacctcagcatacgattttttttctctccttattaagttgaagactttcaccttttcacttaaaggaagcactttatggtttgtctttgcatatctactcttgcactttggggaccttattaagtcagataggggctacttgaacacaagcactgcatactacagcagttgatctttttttttttttttttttttttctgagacggagtctcgctctgtcgcccaggctggagtgcagtcgcgggatctcggctcactgcaagcaccgcctcccgggttcacgccattctcctgccttagcctcccgagtagctgggactacaggtgcccgccaccattcccggctaattttttgtatttttttagtagagacggggtttcaccgtgttagccaggatggtcttgatctcagttgatcctataactcagaacgctactaagtgactactgagcaggtagcaggtaaggcgtggatacgctggacaaagggaggatccacatgccaggtgcgatggcaggagattacatcatgctgcttagaatggcatgcagtttaaaacttacgaatagtttgtttctagaatttttcttttaatatttttcaactatggtggactgtgggtaattgaagctatggaaagtgaaaccatggataagtggggggctactgtatgactattcttggtccttgctttttccatacactgctgcacacacacacaccccctgccatcacctcatggaaatatatatacatatatgtttcacttttttcttttctttttttttgagacagggtctcgctctgttgcccaggctggagtgcagtggcacgatctcggctcactgcaacctttgcctcctgggctcaagcgattctctgcctcagcctcccgagtagctgggactacaggcaagcgccaccacgcacggctagtttttgtattttcagtagagatggggtttcaccatgttggccaggctggtctcaaactactgagctcaaaggtatccgcctgcctccacctcctgaagtgttgatattacaggcatgagtcactgcacccagccctgttttgcattttacagttgaaaatgttcaaatgtacacaaagcaaaaatagtataatgaactttcagcttaattaattattcgttttcaggtttcatttatctccccacaacacacatgcatttttgttttgttttgttgctttgctagggtgttttaaagcaaataccagaatttatattctgtcatttctaggttgcaggtcttaagtgttggcaaatgccccaagggaagtcagggtttcagactagcttactattcttcattctcccttgctcattgattttggcctttgaaggatttttctactttcttgtcaatttaattatctagcatttggcggcttatataatgggaggattttcagactatttaatgtatcatatttgctggaaacaataccatgatttatttaaatagtcccctattactgtcattgaatttgtttggaattttttgctattatgaaaaaacagtgactacacatattagaatctgtgtgtgcatatttatatatttgcttcggataaatttaggtgaaactgtaggatcagaaaatgctcattgttaatggtttttgattactgttatcaggttgcctacgagtaatagatcatattatactttcaccagtgatgcataagaaactgtattactcactccctaaccaatcaacagaggttgttactgttttttccagacttagccaatctaaggttttaaattggtatgttctatttttatttttaaaaattctaatagagttgacacacttattggctgttggctcatgtgtgcctatatgtgtttcttttcccatttt

SEQ ID NO: 38017 - DNA, 2300 bp, Homo sapien
gctaagtcagcgactcccactgtgaccagccccgaagcctgagcacactagagagtttcagagccgaccatccctgggatggttgtgaatggcactgcctggcccacatacatgcgatgaagggcacaaaacttgcatttccggcataccaagaaatccctctcactctaagagtttccagacctgctcgcagctatacattgagaccaggagagcctcaagaggcccaaagcctgtgtcaaatgctcttccagaagccctcaggagagtcctcacccatttatggattagacaaactagaccacacactcctggagtgctgtagcacagctggaaggtattcaataaatcctcccttttcctgtcctcaccatttcccatgtatgacatgatggcctacaactaccatgggcgtcttggaattctcttgaagctggtctggggtgcaggtttcatcacactcctgctagagtcatagacagatgcactaagcacttacttcttgccagccatgctgctttgttgtttggatacatcatgtattcgagtgcttccagcagcgcattggagcggatattaccattatcccaatagaaatgagctacttgggaggctgaggtgggaagatcacttgaacccaggaggtcaacactgcagtgagctgtgatcacaccactgcactccagcctggatgaaaaagcaaggccctgtctcaaaaaacaaacaaacaacaacaacaacaacaaaaacaagacactgaaggggggaaagttacatcactggtctaatatattactcagaataaacagtagacatgagacgtaagcatgagcctttctgtcttcacaatctgagttcctaatcaatcagtcctttatttagcctcccttggaagtctctggaacttctctaggcctcacccctgtggtggtcctagtgaccccagagctccccttagtcacagagtgaagaactgaagcagcagcaccttagagtcagaggaagtcacaggcccatggacgcctaacgatatcctcagtattgggctggaagtgtaattagggaaacactctgacttgtgctatctctgcagcaggtttgggaattgtagccccatcggtgcttgtaagactaatgactgcacaagaaatcttccaaccataaaaactggtatttcctacatcctggaaaggatgctactctaaaactttgcctgctactccaaatgctattttttttaattgctaacaatttagatagcttctataatatttcaaaatttgtaataagctccctcagagcctaagcagagagaaacagaatctcatgacctcctacacttacctagactgtggtactttggccctgtcctcttatcttgactgagaatggcatatgattttgttttatcttattttagagagaaacatttagattatatgtcttttatctatgatctggttccgattttttttttccctcagaaagacagtgttcagttctattcttcagagcagaaaatcagtctcttaacaaatcatccacaaaatgcacttcgaaattctggagaaaaaaaagatgcattgtgcacagcctagcaactgtgaattgattaattctaacccatgttttttctcattaggtctaaaatcccaccatgctaactgcccattattttctgtactgtttattttctgcacaccaaataaaaggccttgacccttcaaggaataacccaatttctccagaggaaagatattatttgaccagaatatccttttacaacaaaataaggatcacaaccttaccatataaagctgttgaaaacaagactaagtaagttctgaatgtaaccaattagaatttctacaatatgtgggtgctgctgatcaaattgttaaagggttgtgtgcttgtggattagttttttttttcttttttcttctcagttttggctttagtatcgttttgttttgttttgcaagaatgaaaggggaagggcctcctaaccaacccaacagatcagttccggcaagcctcgaggctcacggggtttatgcacactaacttcactgagccagggagcacggaagttgtgccactgtgcaacttgggttttctttatcctgcagtctttacctcagcagaaccgcacaccacagactccctccagctctttgtgtgtggctctctcagggtccaacaagagcaagctgtgggtctgtgagtgtttatgtgtgcttttattcacttcacacttattgaaaagtgtgtatgtgagagggtggggtgtgtgtgtc

SEQ ID NO: 38018 - DNA, 2300 bp, Homo sapien
aaacatgaagggcaagagggtacacagcatttggagaatgcaacttgtctggtatggatgggacatagaatccaactggagaagagaaaaacaaagacataatgaaaaagcaggtttactatttagggcaaagactggagcagagtattaaaagaccccaaaatacagtggcccaaatgagatagctttttatttccctctcatgcaaccatccagcaggccaaggttggcaggtagctttgctgtatgatgatgtttgggagccatgttgttcctctacctttgcaggtagggatgggccatggccatttgtgttccagcttaaggacatagaaagtgaagaagtctggggcaagcaattttcttttaagcaagtaaggtgcaaacttcatcacataaggccacactttaccttatgggaaatgcagctgttagctggacaatgccaagagagaatcaagagtggactagatatggggccaacaaagagtctgccccagcatgaaaggaaggcagggctggattaggaggacaattagtggccatgtaacagaatctaactttttcctgaatctgtctcttaatgggacagcatcattaattggtgacagacttaatttcaaacatgcatattctagcaaacaagcagggacagtatacgggacaaagggcaagactaagaagcaggcaatccacctaagaaacattttgcagtcattcagcctctggaaaaaaaatgatagaaaggagtaataagattgagaactcttttgggaatctacaggacttgatgattggcttactgtggggattagggcagacagaagaaatgtgggtgattctaaaatgtctgaggaaaagagtgaatggaggtggcattcaccaagatatcaaatataagtggagaaataagtttgggcagaggagaaacataatgaggcaattagatttactcttcggagctcaagagaatcttctgccctgaggatacagatgtgacagtgcccggcatgtgagttatcattggaaagctaagagcgaatgagatttcctaaagagagaggaccaagtgatcaaaggcccagagacggaactctgtggaacagacatatggaaggcagcgatatggaggaaaagcactccatgcaaaaaactaagaatgtgccttacagcaataggaggaaaaccaggagatggcattttgtggaagcaaatgtaagacagagttttaaaaatgaagatgtgctcaattgttaaatgccaaataagtcaagcaaaataagaactgaaaacccatccacgatttggcaataggagctcattggtcagcttggtgtgaggagtgttgggcagaatggggagaattgaatattagaatgggagaaatgtggagggaagggttggagaaaaatgagagcagggagtaattactgaagtaaagtactttggaagagggagagaatgaaagtctaagcccaagggaggaaatcaattcaatgacaggacacagatccagagccataaacagagcagcacttctgccttcagttgagagacttagagaaaatgccaagaaggggtcaaacaccagcataaaggtggaagacactaaaccaagggcagtgatgcccatcaattatctaagggtttactttggttggagaagtcaggactagatgcaggacgtaaaccaacctaaagggttagcacatttcctgggattaacaaatgtaagcacaagcaaagattacaatatgagttgagtcggagtattaattaatgtaatgaattccctgcaggtacaaccagaattatcttaatagccataaaaagatacattggaatgatgtcagttggcttcctttcattcctccttttatcccccaagtgttttccccaaaagtggattctgcactaaatcattttaatgatgagccctctctgacttgcatttgttcctctactggtggccctcttatctgattttttaactcacggagttccatgtagttgtttacagcatttccctggagagcttgtaggcatctacattctaatttcaccttagcaacttcactgtgtctttttattacatcaatagtctgttcatttcagactttgtcttttggtatcaagttggttaatatatgattttgaaaatgtaaatatgcatacctgcaacaaagtgcatcagagttgaaagaagaaagaagcaggttgtgtttgcctaaaagctgcaaaaccaggcaatataccaagcattgaatctcacttggttcctgcgcaaatcagactcattt

SEQ ID NO: 38019 - DNA, 2300 bp, Homo sapien
tcagggcgccttgatgaggtgctaatgcagaaaagagctgggcctgaacactccgtacttacaaaatcttccacaagccgccagtgtaatcgcttcattccaaaggttggctaggaaccaccgcagtgccctctgaggaataccattgcaaactttaacttttatttgcggagctctcagggctgttaggcaacaaatatttttaaagatacccctctaattctctaggttaaaagttgcagtaattttaattaggggtagaggctgtttatgtttgtttacatcctgggtaggaattagagtataaatcctcccagtgggacccctgctgggatgctctggaatgcttgcattcctgagtatgtgagcacccctggtgtgcatgccttgtgtgtacatggcaaggtatcgcgaggtggttctatgacatttctggacaaaaactgtgtgtgaagagaaggtaggagaaagcaaactcacaatcaaataaaagtagagagaggggaagagatgagattgcagttgattatgggtctggcagcagatgttctgcacgaatccaactcgctgcagccagtctgtttctatggcaacagaatcggtaattattgagcccaggcactcccccacttctcccaacaaggtggaggctgatgaatatgaactatctccagcccatcaccagctttttctttttcttcttgtccttatttgttttttagttctttataagaaaaagtgggggatatattgagaagtaccaagacggggagctatgggtttattgacaaaagagcataggacactaaaatagaaacgaagttattatttttctcttgtgatactctaagagaaaagctcttcctggaaaagccgatgatctctgaagatgctaaataaatgagcaggagtttccctgaaatggaggcgccctttgattggctgatctttccccgactcctgccaatcggagcatccctgggctccagctccataaacataagcaaagctacatgcttattcttctggacttggagtgtataccatttaaaggtgtgcggcgggtctctgttcacatggctcaactggaaacctgtttcatgaacaagcttactcaggaaccatctggtggtattccagcacattgttcttcagggggacgactctaagtcgctttgtggtggcagcagcttagaatcagtatttgtggttgggaaagatggacttacgggagcttggtgagtaaacctccgtctcacacatgtgtccaccggtattatcagcctgagctaaatgtagctttgtcctattgtctgccgagaaaactgaattggaacaagcacatggaggagcgggcattcaagggttcccatgatgtaggagactctgaattcaaaagactgcatgctttgcttgggtctgatccgatttgtagctgactgtacattatacttggacattggttgtcttgttaggattagtgtaaggagcagagttctgctttatttccctgggtgttgatgcatttcaagagaaaatgcttttaaagctacattaataataagagtcaaccctgtgtattgctaggaagagagaaaaaggtgcaggcacggagcccggagccgcttgattgtgttgctggtgtttgcattgtgaagagagatgttattacaatggtctgtcaaacacttcttcagacccccagccacggaatgaagcatctcttctccgtgtgccactgttctctgcttggaaaatgtgtaactgagctaggtcatgtcctttccttttatgaaacctgtctccaaattgaaatatgttttttaattaattgcaaagataaagtgaagtgcaattggaaagattttagcagtcaaaaagcatgcttcaaaatgactctattttgcatcctttcaaacccctgaaaaaccagagagggtttgcaaagttatattcaaggattggctctctgccaggaaagggatgctctgagctattgctctgctccctggggtttaattttctgacactggtgatgaaattttcaatttcgttgggtagaaacaggaagaacaagaaagcagtactataaacaggcaatggaggggcagcgtggggaacgagaaactctttgcctgtagggacccttctagctgcaaacttaaaaatgtatgtggcaagatgcaacccaagcaccgagcaggattccagacgagttataatcattctgaacggggagaggaaaggtaatgccattggcttgggttgcagagagtgggggctgaagttggggcttctat

SEQ ID NO: 38020 - DNA, 2300 bp, Homo sapien
gaatgttgtctgggcagagctgagaaagattgacagtgttggctttgggtgctgtacctgggtgagactttcttcctacacttagtggcataaagagacaaaatggaaagccaggattcatattcttgaaggtacaaatccaacatcaagaccaatgggcggccaggcgtcgtggctcccgcctgtaatcccagcactttgggaggccaaggtggatggatcacctgaggtcaggagtttgagaccagcctgtccaacatggtgaaaccccatctttaataaatatacaaaaattagccaggcatgatggcacatgcctgtaatctcagctactcaggaggctgaggcaggagaatcgcttgaacctgggaggaagaggttgcagtgagccgagatcacaccattgcactccagcaagactgtcaaaacaaaacaaaacaccagtgggctatagctgagcatttggagttggatggatatggggtttatactgagcttcatttaggaagaaaggaggctgagggcgactgttgctgtttagacagtggatgtgttgtagatggatagttcagcttggcttcaagaatcagaaacacacaaagagcaggtcccagtctcctcagaagcctcatctgggtcattacgggctgagggtcccaggcttgcagagacctttaaggaagagaaggttctccttgaggttgttatgatgccaaggcagatgacgatagggcagagagtaattcttttctctctaacataagcccaaatcggtgccttctgtgacacttaccattttccatcaatctctgtggaactgagggcttccgcagacccctgagtgagattgccaccttatgagccccctcgagtctgaccaggatgtgcagccattcactgctcagtggcgacccctgctgctaaggagagagatggcagcacattcagagttggtgacattaattctagtcatgcaacccggggaatttggagcaagcaggggaggagtctgaggggatgaaaatgggctgaggaaatccagggagatccctagtgttcagggcgccttgatgaggtgctaatgcagaaaagagctgggcctgaacactccgtacttacaaaatcttccacaagccgccagtgtaatcgcttcattccaaaggttggctaggaaccaccgcagtgccctctgaggaataccattgcaaactttaacttttatttgcggagctctcagggctgttaggcaacaaatatttttaaagatacccctctaattctctaggttaaaagttgcagtaattttaattaggggtagaggctgtttatgtttgtttacatcctgggtaggaattagagtataaatcctcccagtgggacccctgctgggatgctctggaatgcttgcattcctgagtatgtgagcacccctggtgtgcatgccttgtgtgtacatggcaaggtatcgcgaggtggttctatgacatttctggacaaaaactgtgtgtgaagagaaggtaggagaaagcaaactcacaatcaaataaaagtagagagaggggaagagatgagattgcagttgattatgggtctggcagcagatgttctgcacgaatccaactcgctgcagccagtctgtttctatggcaacagaatcggtaattattgagcccaggcactcccccacttctcccaacaaggtggaggctgatgaatatgaactatctccagcccatcaccagctttttctttttcttcttgtccttatttgttttttagttctttataagaaaaagtgggggatatattgagaagtaccaagacggggagctatgggtttattgacaaaagagcataggacactaaaatagaaacgaagttattatttttctcttgtgatactctaagagaaaagctcttcctggaaaagccgatgatctctgaagatgctaaataaatgagcaggagtttccctgaaatggaggcgccctttgattggctgatctttccccgactcctgccaatcggagcatccctgggctccagctccataaacataagcaaagctacatgcttattcttctggacttggagtgtataccatttaaaggtgtgcggcgggtctctgttcacatggctcaactggaaacctgtttcatgaacaagcttactcaggaaccatctggtggtattccagcacattgttcttcagggggacgactctaagtcgctttgtggtggcagcagcttagaatcagtatttgtggttgggaaagatggacttacgggagcttggtgag

SEQ ID NO: 38021 - DNA, 2300 bp, Homo sapien
cagaattaagattcatgttcaaatttttaagaggattttctaccttcttgggtgatggaagataattatctgtagttacacaagtataattacacaaaattacatatgcaggggttggtgtcatcttaataatattttttcagcaaatagagatggcagggaatgaaatgaactgcatatttatatttttccttctctatctctgtccccatcctaatactacggaaggaagcgtctttgtctaaatgctactaggcttcaacagtcattgtgagagtaacattgtgattaagcttgggctgtagatttgggttgctgacatcgatttctgactctaccaatcacaggctgagtgacttgggcaaggtacttgacattttcatgtttctgttttttattctttaaaatgagggataataattttctctatcaatatgtgtgttgtgtagattaaattagtagatacttggaagttgttcagagcagtgcttgctacatagtctgtgaatctagatgctattattacgatcttatgattgatattaatattattggaatggcgtccagtgctctgtgacaccgtgagagatggtgatagcagaacgtgagagttgtaggttgtccctaggagggtagtgtgaaaatccgtggtgaaagtaacagttaaaggtgaaagaacactgggtgcttgggaaactgcaggtcatttatcatggccaatgtttatgttgcagagagggaagtagagttgccttttggagtgagggaaaggttatagaagaattttaaattcaaagggctttgcaatatacagtcagtcctcattattcatggattccgtatttgcaaatttgcctttttgctaaaatttatttgtaatgcccaaatcaatattcaacatgcttttttagatcattcttggaaaatgcacagtggcaaaaaatctgagttgcccaactcagatgttccagctgaagtcgaacaagacaccaagccaccaccctgccttcctgtttcagctctcatgcttcaaacaggtgtccctttcccagtctgtctaggccacgtttttctcatttttgtgcttcctgctttctgatggtaatttcagtttcaaatggcccttaaatgtagtgctgaagtgctgtttttatgttccgaagtgtaagaaggctgtgacatgccacgcagaaaaaatacgaaaatatatgggtttgttaagctttgttgtggcagtagttacagcactgttggctgagcattcattgttaacaaatcaacaacatatactaaatagggtgtctttaaacagaaacacacataaaagaaggttatatattcactggttggcaaaagcgttatggtcagaggctcgcagaaacaatttaatattgttcctaggagcaatggttcagtagttgttaacttatttgcagcaactttctaggacataactactgcaaataagaagagtctactatacttggaagtccccagggagcttttgggcagcagtaaactatggagaggagaatcccagagggtcccgtctgtgataagtggggaagagaaagtctgctcttaaatggtaatgagaggtgaagccggctgggcttctgggttgggtggggacttggagaattgtgtgtctagctaaaggattgtaaacgcaccaatcagtactctgtgtctagctaaaggtttgtaaatgcaccaatcagctgtctgtgtctagctaatcaggtaggggacttggagaacttttctgcctagctataggattgtaaacgcaccaatcagcactctgtgtctagctaaaggtttgtaaacacaccagtcagcactctgtgtctagctaatcgggtgggggacttggagaacttttctttctagctaaaggattgtaaatgcaccaatcagtgctctgtgtctagctaaaggtttgtaaatgcaccagtcagcatgctgtcagaacagaccaatcagcactctgtaaaatggaccaatgcgctctctttaaaatggaccaatcggcaggatatgggcggggccaaagaagggaaaaaaaagcaggccacctgcgccagcagcggcaacccctttgggtcgccttccatgctgtggaagctttgttcttttgctctttgcaataaatcttgctgctgctcactctttgggtctgtgccgcctttatgaggtgtaacactcaccgcgaaggtctgcagcttcattcctgaagtcaccgagaccaggaacccaccaggaggaatgaacaactccagacatgccgcctttatgaa

SEQ ID NO: 38022 - DNA, 2300 bp, Homo sapien
agcacagattattcacagccagaactattcacgactcaacagcttttttaccacaacccagggtaaatcaccagtgtaatctacatgtattatacatgtgggtaggtggaacaaatatttcacaagcaacacaggagatatactctgacctaatctactctactatgttccagtgtttaatgctctgacaactaactgaattgatttcactactcactaactggtatgaatgaaatgatggcaatacctttaactgctatcatttaacttggatttctatataacctctttaatctcacaaagaatagcatgcaaattatatagatgcagtataaaataaatgaaaaacattaagaaactgaagcaaagggaaaatagagacaggaaactaaacgtttaagtcaaaggaatcaaaggtaaacttaatatacaaggcatgccaggaaatcaagttcacttgttaactcccagctttgttttttctttttctctcgagatggagtctcgctctgtcgctcaggctggagtgcagtggcacgatctctgctcactgcaacctccgcctcccaggtccaagtgatcctcccacctcagcttcccgaacagcttggattacaggcgcccatcaccatacccagctaatttatgtatttttagtagagacggggtttcaccatgttggccaggctgatctcgaactcctgacctcaagtgatctgccgcccttggcctcccaaagtgctggaattacagacgtgagccaccgcacctggcccagttcccagctttgtaacaatcaatgttacaaagaaacatttgacgtgaagaagaaaacagcatcagttacaaaattcccagtgttcatctgggaagaacgaagcaatttctgagaagcattcaggcctttgaggcctctctcctgctgaactgaatgccctccctccttctttggggtagagcaagggagtcctaaggggaagtagaacccttgttactgcctccaccttctaccaccacctgattcatggataaaattacagtcactctagggactactgactgggacaaagcctgcaagacactgaagcctgaggccacccgattctccctccttcaagagtactttgtactcacttctgtttcagcactggccaccttgttataatgacagctgttaccagggctgttccttccctccctgctggcccccaagattatcagtttagaagacaaaactggctcatatgcatttcagtgagctcaacctaaagttgtgtcggatgcgaaactattgtggaaattccaaaagacaaaaatcaaagaagcacaaaagtctaaacttgcttcttgtagaatcaagtatgaagcattagtctaaccatttgtcctcaatgactcagtgtcgtacctgttaaccaaagccagtatttttatagcccaggttagtcttaaggaagaaatcctaaacagatgtaatgtgcatggctcagttcctggcatgcagtatgcactcaataaattccagtgtgcccttcctctatcagggatcttgtacatattaattttacttgctcccagggccattgctgtcttcacaaatccctccttctcctttaatcttgctaaaaaagatttaaaatcacccaaggagagagctgggttcccaagattcatagaacactcttagtgcctacatacataattccacatttgaaaaggtttcttgtcattatttcacgtactttaagcaagggttagaggctactttgaaaaaaacaaaatctgagaaaggaaaacccaactaagtcattaagtatcaaataaattctttaaccaagcagtaagagagacatattcactgttagaaggcaactgcagttgctaaacaagacacgaaacatatttggtctttactcttgagctggcaaatatcatcttgtggattctaaagtagcagttgtttgctttacagactctattttcgtggatagtagagacctaaaatttagacctgcatgtctaggcccgaacaaagaaaacatcatcatgatttactttccttcaatatgtatcccatattaaataatgtagttgacctaccttttctgtgatatagaagtttgaactatcggcatgctggagtgcaaaatattcatggttggcaagagaccaccttaaaaatacaagcgtatactgattagaaaaatgaaagtggccattttcatttttacaattttttagtgttggatgaactaagcaccctgtgattggaattggaccaatcccaacatataccacaa

SEQ ID NO: 38023 - DNA, 2300 bp, Homo sapien
cttccccttgcactcctatcaacactgagatgtatttgagaaaaaaaaaaaaagagagagagagagaagatctcaggctgtattgtgtttgctaatggttaattacgtaattaatctataagactacttttttttctttttttcttttttcttttttttttttaaagggcagagacagatattcttctgggagaagatggctcaaatgagagagacttgaagccatgtcacatgaagaagagtcagaataattgaggatggttaatcctcaaaagagagtgtttaggtaaaatttgagggctgacttcaaagatctgaaagactacttcatggaggaaagatgtgaagacccgggaccaaaggttacaggggagtggatttgcataattgctgtgcaaggagggaacaattatgacagctaatgtttactgagtgctcaccacgcatgcactaaagttaaggtctttatatgccttagctacaaggttgtagatcaaattcatacttatcactacaagtgtctcagagcatcgttagtaaaggctccatttactgactacttattaaattacttcatttaatagttggtgctattgacttttgttattatatcattactgttttatagatgaggaaatacagaagttaagttgctttcctgcagtcaccctgctttagttactggcttataaccatctggacccaggcactcttgatactaatactgcctcccagagtcatgcgtataataaggagttagatcagagctgttcattaaaagtataaggtgagccactaatgagagcctatgtgtagccttacattttctagtagctacatcagaaaatgtaaaaagaaactggtgaaattaatcttatatatgcttatatcttaacccaacacatgacgaatccaactgacttactacatcagactattctcatgtattgcaataatgtaatcaacataaacatacttaacaagttagtttacattcattttaaaaatactgaattgtatgtctgttttacacttacagaacatctcagggatagccacatttcaagtgctcaacagctgcctgtggctcttgagggggaagatcttaaaagggagcttagttttccaccttgattctgatgcctccctgcccccgacttatttcctttgccaattagaagaaaatgccgaactgcctttgacttttccggtagagccaatgtaggtatttctgaactgggggaggacaggtggttcgcctgcaaccctcttccctcctgccagctaggctgggagttaacgtttttgatttctgctttgaaaatgatttaagtaggttgcatgaattaagtaatttattctaaatatcaaattatgggtggaacgtcttgccttatgcaaagttatgcaaaattaggaagtccctggcttaattggttagaaatacatcttgtagtttcaattgcagggttagtaaatacatagatgtcgacggagagggaggaaactttttttttttttttttgccactctgtccaagggtagaggcacagcgtcaaaacaaacacgtcttaaagtagcgttcaaacagcccaccgaagtttccccttaatatccggaaccggttgccaaaaattaaaaaaggatgtgaaaagatgctactcgcttttggcctcccggagatggcgctatgagggtgacggagttaattagtgcctccaaacgccgtgtgtgagctcatcgaagtcatgctctgcacacatattatttatagcagatctgaggcatgcatggtgtttgacatttctgtcttttaagtagggggacttcaaaaagtcgtgggcatccccctaggcaaagtgcagtgggcagggaccaggcagggtgcgggcgcaaggcgaacgcgcagaccacgagtgtcctggcgcaggtgccgggggcggcggctgcaactccgcagcgtccgctcgggaggagagttcgcggctgatctccggatgccttgcagatgcaaaatgtgtctctggccagcaggaggaaggaagaggaagtgagagcagcggcagccggcggtgcagcagccggccgacccagagtgtaagtgcgtgtgctggggcgagcgggagcgggcgaggatgggcacaggatagaggcagagccacccacgccgccgcggccccacgctgggcgacagagcctccagttccccttcaatggtggcgggtcgccggagctctgatcgccgggaacccttgccgctgctgtcctgcgaccccaagcaggttcgtaaagtttcctgg

SEQ ID NO: 38024 - DNA, 2300 bp, Homo sapien
gctgtctcctagggtgtagcccttcaggggtcctaactgaaaatttgaggtaattataagggcaccacctccttggtggtctctgtttgcttcttaaactagatttccttaacttctgagcatcttagccactgtatttcacctgtttcttcacctctcagtgtccagtttcaaatcagcagtgccttgagtaaaaagtactcaggagttgaaaatcagattcactgatttgtacttcctgtcttctggggattttatttcttcaaggtgtcattgcctgggcagctttctgaagccttcaaacttataggttttgcattctgttcatttttgtaagctgctctcagcaggagggtttgtcagcaacaatcttctctacaactaataaagcttgaaatatctctagcatgagttattttgaagcagatagcattttaactcatatggcagaaagaacgcacatctgctgaaattgaagagtttcctgatgcagaggccttctcttcaaactaagaaacaaagttggaagcacttagaacattatgtttggagtaagaaatgtgaatactgatgaaaacagaactgcaaaaatttcgcctaaaataatgagtgttttagcactgtaaagaataccaggaatcaccccaaattaccaaagttatcattctacttagggaccttaaaatagaaagaacccagggccagtatcattttgatgccttttaaaatttctttttgaaatagtgaaatgtcacaatggattttaaaaataggggaatgttgaaaatgttgatatttaataaattagtactttttaattgaccaatttctatataatattaacatgctgtctacatcaggagttctcaacccctgggccacagaccagcagtggttcgtggcctgttaggaactgggctgtacagaaggagcggagcagtgcacgagtgggccagcaaagtttcgtctatatttacagctgctccccatcacttgcattactgcctgagctccacctcctgttagatcagcagcggcattagattctcatgggagcatgaaccttattgttgaattgtccatgctagggatctaggttgcagtgttccttatgagaatctaatgtctgatgatctatcattgtcttccatcacccccaaatgggaccatctagttgcagaaaaacaacctcagggcttccactgattctacattatgatgagttgtataattatttcattatatattatcatgtaataacaattgaaataaagtgcgcaataaatgtaatgtgcttgaatcatccagaaaacatccccacccctgtctgtggaaaaattgtcttccatgaaacctttccctggtgccaaaaaaggttggggaccaccgatttacataattagaaagtttataaaatcctaatttatagagtggtcatcaaatggtaggaaagttcaagcagtttgaggaactgatgtttttttttctcaatacttgcagtgcatctctatgactgtatgggcagcttcttctggagataatgttgacagtctaaaaagttaagctgtgacgatttactcccctcccctgcccctatagcacactctgattttaaatattttctctcttaattctaattaaatgacataattatagtgccatatcccagtcaatgccatttatcagtgacagctaattaacacaattataaaagtgggagccctaagttaccagtgaggtatagagcaactctggaaattttctccttactgaaaggaaatattacacatattccttcaccagaagaacaatacacagtttaccttccctttttgtttttgataataccactttgttccccattctctacaaaatttagtttgaagaacattttaaaaacttgattcatcgtagtcatcaatccttcataaatatttcttgacaattggcctctctgtagtttgcaacctggactactcatgtttaagagcttggtttttcaagactattgtgtttcaaatggttttgaggttttatggtctgttgacattctgaggaacttagaacacattcacttccttttgcttggtgagctgtccagagcctttgcaaatgcatgcagagcatggaaatgacccagctgccctgctgttgaaacagaatcctatttggaaggcagacatgtggcccatctctgtagccatcactgagaaatctggattttcaaggtaagtgcagatgacttaggtttggggagacatgaatgaaagtgctatagaaataaagcacacttaatttgt

SEQ ID NO: 38025 - DNA, 2300 bp, Homo sapien
aagaggacttgggacaagtgatgtgctacttactttactttcatcaattaggagtcaatcctactaggccaatagccaaaggaaatggtgagcagaacctatagtggcacattcattcttgactcacatgtgaacacaatataatttcatgtctccttgataaaactacttttctacaaggaaaaataaaaggcaagtagagagatttcagcctacggatgaaatacacagtgtaacatgagacagctgttgcagagccaacaaaaaaatcatgttcagttaagtgagtcacaattccttaaaatttttttccatgcccacaaatgcaaaaggctttgtgaggttgggttattattatctttttttttttaagtttcattgaggtataagttatatgcaataaaaataaccaattttaagtgtacaattcaatgagctttgatgaataactacaatggtaaccaacatgatataaaacagaaactaatcctttcccccacaacccagatcttgagctatctgatttgctttttgtcacattagttttgcttcttctagaaaaagatatcatacaatatataatcttggtggctggtaccttttatttagtaatgtttctcaactttttgtgtttgttatggtccctctaatgagtatttttccctaattgtctctccccacttaatgaaattttgataccacagatatatctatatgtctatgtactgtgtatacacctgtgctttatacagagtaagatttttttcacacctcaaaatgttttgcccctcacaaggtgctatcaccccattgagaatacatgatttagtgtaatgtgtttgagattcatcagtattgtgtgtatcagaagttggttcattttattgctgggtaatattccattatacaaagagacattcaataaatgaataagaataattgcatatgtgttgcaaaggtcagggagtgagttctttctcaaatcttagtctccctggtgtcagtagacatacctctaataacacaattgttcaagtcagaaatctgagagtatcaagacacttcttttttcctcatttccccatgtcaaatccattaaagcctgccaatttcatctcttgattattgcttgaatcttgtctcaagggatcagattttgccactgtaacccagaacattccagacatgtaaggctatcaatctttatcgtaggagagatgggaagccgttgaagggatttagataggaaactgacatgactttcttagtgaaattaaaagattactaaatcttttacagcaagcaatgaataagaatatggagaatgaattagaaaggactgagagtaattgtggagcggatctttcaggagtccaggggataaatgccagtggctctgtcacgaatttgcaaggcctttgagagtaggagatgagagagttggaagacatgctatatttcagtggggcccatgggaaggcttagcaaggcctcactcactgctagaagataaaataactgtaatgagaaattcaggtaaaccttcctattgcttgctgctctcttgacttagatggtatttttggtcaaattaatcagtattctaaatgaattaagtatgaatattcttgggtcatttgctaataagtaagaaagaattagagaattataatcatgcccgtaagaaaaaaaaattgtatacttcatgaatccatcgatctttctatccatctcacaactttttaaagggttactgtagtactagtatccaagtactagctccagatggtctgcaatcctcctgaagttttatgtaaattgtcttatctacatacatctctctggggggcaacttgaagattcagattcgatttttattcctattaaagagtaagaatcaatggcttactgtgttttaggtctagggtatgcaaacattcataggaaataatcttcattcttaaagcatgtaaagtttatatcatataagcacataaatggcaaagtcacattgtcagtgctgtaaaagagataggaacaaagctctgaaagcttgtcagttactctggtgctttttctcctccaggtgacttcccaagtatgcctggccacaatacctccaggaattcctcttgcgatcctatagtgacaccccacttaatcagcctctacttcatagtgcttattggcgggctggtgggtgtcatttccattcttttcctcctggtgaaaatgaacacccggtcagtgaccaccatggcggtcattaacttggtggtggtccacagcgtttttctgct

SEQ ID NO: 38026 - DNA, 2300 bp, Homo sapien
catggaatactatgtagccataaaaaacgacgagttcatgttttttgcagggacatggatgaagctggaaaccatcattctcagcaaactaacacaagaacagaaaaccaaacaccgcatgttctcactcataagtggaagttaaacaatgagaacacgtgggcatagggagggaaacatcacacactggggcctgtcagggggtggggggctaggggagggatagcattaggggaaatacctaatgtagatgacaggttgatgggtgcagcaaaccaccatggtatgtgtatatctatgtaacaaacctgcactttctgcacatgtatcacagaacttaaagtataataaaaaaaaaaaaaggaaagaaaattgcagatggtgaagtgaaggagtactacatgtcctgtcttgataggatatgatcctggtcaaaaatccttctgtaggtagccgtgctcatctattaggtccactccagggatgaggatccctacaaaaaggttcattgtgtccctctctactctacagttgctttctgtatctcagcctgtggattaatcagaaactattgtgaaaaattatttccagatgctgcaagtgggagggaggaaggaaagtaaagagaaaaagaacgaaagagaaagaaagaaaaagaagaggaagaagaagaagaggaagaagaagaggaagaagaagaagaagaagaagaagaagaagaagaaggagacggaggagacggaggagacggaggagacggaggaggaggaggagaaggaggggaagaggaaggagaagaggaaggagaagaggaaggagaaggagaagaagaagaagacgaaggagacgaaggacacggaggagacggaggagacagaggagacagaggaggaggaggagaaggaggggaagaggaaggagaagaggaaggagaagaggaaggagaagtggaaggagaagaggaaggagaaggaggaggaggagaagaagaggaagaggaagaggaagaagaagaaagaagaagaagaaagaagaagaagaaggagaaagaagaaggagaaggagaaggagatggaggagacggaggaggaggagaaggaggggaagaggaaggagaagaggaaggagaaggagaaggagaagaagaagaagaagaaggagatgaaggagatggaggagacggaggagacggaggaggaggaggagaaggaggggaaggggaaggagaagaggaaggagaagtggaaggagaagaggaaggagaagaggaaggagaaggagaaggaggaggagaagaagaggaagaggaagaagaagaagaaagaaggagaagaagaagaagaggaagaagaagaagaaagaagaggaagaagaagaaagaagaggaagaggaagaggaagaagaggaagaggaagaagaagaggaagaagaagaagaggaagaggaggaagaagaggaggaggaggaggaggaagaggaggaagaggaggaggaggaggaagagggagaggaagaagaggaagaggaagaggaagaagaagagaaagaagaagaagaaaaagaagaaggaagaagaagaaagaagaagaagaaaagaagaagaaaagaagaagaagaagaaaagaagaagaaaagaagaaggaagacgaagaagaagaggaagaggaagagagaagaaagaagaagaagaagaagaagaagagaagaagaagaagaagaagaagaagaagaagaagaagaagaagaaggaagaagaagaagaagaagaagaagaagaagaagaagaacaagaagaagaagaagaagaagaagaagaagaagaagaagaagaagaagaagaagaagaagaagaagaacaagaagaacaagaagaaccaaaccagggtagatgaagacaaagttaaaaagaaagaaaaggctggtgctggcagagagccttctgctccgatttgaggtgtatgcattttatgctgtaaagcgtggccagtcacaggaggattcaaaggcgaggagagatatgatcaaatctgcacttgggaaagcgcaccttggtgcgcatctggggatagaggaacgtagggatgggaggatgggggatgggagtttggggatgaggcagctgaagaacagagtcttgtgatggtggaaccaggacttcgttgttccttcattgtgtgggcagaagaggtggaggattttaggcgccacctggtcttgtccccactgcccaggtatagctgctgtctggagcaggggcctcgagacgccgctcaagtctcacgggcagatgggttggaca

SEQ ID NO: 38027 - DNA, 2300 bp, Homo sapien
cctggagttcaggggagtgttgagtgtgagaagaaggattaggatggagccccagagagctccagacatttaaaggatgggcaaagaacaggcacttgaggagaccaaaaggagtcaccagagagaagccactgaatgaggcaacttcccgagccttgttaaataaatgtaaggcatggaaagaatggactgaatgctgaagtagggtgttctagaatcacagcctccctggaagtcccgaagaggagggacagttgacaggttttcctgatgcatccttctctgctgccccctgtctgtcgaaccaccagagacactaccaatgggccgaatggggcaggcacaaagctttaggaagaagggctcttcatttcctcttaccttttcttaaagggcatgcctcagagaacatcagggaagcccataagactttgtgacttggtacttacatagttaaacagatgcagcaggttcaaactggctgcagaaatttgagccctctccgagtttgccctgctcagattcataggaaaagtgtagggtagttcagctctttctcttgctccccaggtaggaactccagctgaaaatctttttcacccagtgaagggtttagactcattggagtttactgctagaaatggcttgagatgtcatctgggctttcctcctcatgtgatattttactagcctggcttggcatctttggaggtggagactggttctataggaactagattacctttctagagtggcttggcagtgtaagaacaccctgggcttcccctaaataagaaccagactctttggatgaatcctgaaatgtatttgtctcatttatccttttcacttactatgtttaattcatgttccctaaaaaataagataatgcatttaaagttcttagcttcataccttgaccattgtaaattcccaatagatgtcacttgtgcttgttgtttcctcagctgttttaatccttagtctttagttttaatcctcagtcaaaactaaactaattgtgtaggtttaagctttggagagaaaaaccatgtgccttaaattcaagttaaactatgtttttaaagattaacattcagagaacatgtttccatattgctgatgccctaataaatagcatataccagaagtcttaccacctgaagattgatatacatcaatctcatataaataaatcctcccttttctgtagatagctgagccagcaattggactaccttttcctaatgcaagtaagataaaagagaaagcaaaacatacatacttgcatcccatagtacacagcttcttactcaactcaagcaacagtctctgagcacatcaaaaatcaagattttaggctgctgaggtggaaatcctttggcatgaaggatcagagcaggggagacctttcagattgtggtgcccaatgttttctcctgggttccactaatgctgcagaggggaacagggagttagaaggaagaggaaatgttagaagacatttctgaagctggaagatgctagcacaccttcccccagttctgttaacttcctggagcagaaacaaaccaagtgttatactggaaaaatttcggcccaaactgtctactagcaacaacaacaacaaaccacactccacacaactaagggcggagtgggagtgatttatacaacgtgaccctcctgttctgacattcactgcactctcgcctgccttgcaggacattgtcccaactgtcctcagcgctcctcatgccccctaccggagaaagcaaatatatttcagaattagagggcagcagaagctcctattttcccccaactctatacttggaaaaactctaaggcagagggagcaaagttcagttttcagccaaagagtgtctttctctctcttgaaattctctcccgcaccctcttgtatccggtgtcgaaaacaactgccagaggttctttttcttggtccgaagaaaaaagactggccagactaaaaaggagggactttagggggaaagcaggcttccagccctgggctgcggcccagagggggtgatgtcaccgcttctgcaccgacgggcctgggggtggggcggccgagggggagcccgcgccgcggctgcagctgccaagggagcgttccgagcccacgtcaggggaggtgtcgggataaatagggtcccgcaatggccgtggctggctgcgctccgagctgcggagtccgggactggagctgcccgggcgggttcgcgccccgaaggctgagagctggcgctgctcgtgccctgtgtgccagacgg

SEQ ID NO: 38028 - DNA, 2300 bp, Homo sapien
aagagctgaactaccctacacttttcctatgaatctgagcagggcaaactcggagagggctcaaatttctgcagccagtttgaacctgctgcatctgtttaactatgtaagtaccaagtcacaaagtcttatgggcttccctgatgttctctgaggcatgccctttaagaaaaggtaagaggaaatgaagagcccttcttcctaaagctttgtgcctgccccattcggcccattggtagtgtctctggtggttcgacagacagggggcagcagagaaggatgcatcaggaaaacctgtcaactgtccctcctcttcgggacttccagggaggctgtgattctagaacaccctacttcagcattcagtccattctttccatgccttacatttatttaacaaggctcgggaagttgcctcattcagtggcttctctctggtgactccttttggtctcctcaagtgcctgttctttgcccatcctttaaatgtctggagctctctggggctccatcctaatccttcttctcacactcaacactcccctgaactccaggttttctcacccccaacacttaggacatttggggccagataattttctcttcatttgggagaggggaggtggctgtactgcacattgtaggaagtttagtagcatccttggcctctacccacaaaatgtcagcggtagcctcctccccatctacattgtgatcatcaaaaatgtctccagatattgccaaatgtttctttgctggggagggggatgtgaaatttccccaggaaccactgttctactcttcggcttcatttaccacctatgtacctatggcttcctaatccaaaagctctgctggtttccagaagtatttatccagctgtcccttggatatttccaccttaatactccacagtcagctcaagatcaaccaatcctaaaatgaattgatcatctctcctcactcaggactggattcccagtggcccaaaccagaaacctctctctctgagttgaaatgcttctctacagctcccacctgtcttccaccctttccatgaccactcccgctgccttagctgagtcaggatcatctctttccaggatgataacagtagcttcctcctctccctgccttccctctggccctaccctttctgttgtctaagtgggctttctaaagcatatgcctgatgatgctcctccctagctttacattgattgatagttcccacagtcctcaatatcaatgacaaattccttaaaatgagtgctatggcttcagagtactcctctaccttgtccttgaaccccagcattattcttttcttgtccttatgcccttcattcaggaatgttatctcccactttcacctggctcaatcttaatcatccttgaaatgcagttcaaatggaaagacgctatacatttttttagttcctttcttttttcttgatttcatactttatcactatatttttagagacagggtctcgccatgtcacccaggctggatggagtgcagtggcatgatcatagctcactgcaacctctaactcctgggctcaagcgatcctcccacttcagcctcaggagtagctgggactacaggtgtgtgagcctcgctcattccatattatagatcctaacattacataactataaacccaattaaccttattcttgaagaagcgaaaccccccagacacccaaaccactcggctggtggtattgccaggcgatgggaggagcagtctcactgcaatgtgaccttgaggctatgtccatgagtcctaggcccaatgcaaggggctgtctactagtctcctagactcttcactgggaatgggagctgaggagcggccatgatgaatagctagtatcatttcttcaggaaaagactcgtctttccacttttaatttggaggaagaagtttgcaattttgtcgaggggcaatgtaggcggggcaaacgtttgcacagcaaacgcagcagctctgcttttcctatcttgaccttgaacttgcccctccctgtgtgattacctgttgaacactgaagttagtggagaaacacacttctcagcacagtctccccccatcccccctcttaaaacacgatgcctcccaggatgctagtggcaccactgccactgcatttcctgttggcagcagtgagcagtgaaaaccgaagcggcagaaggcagtggcagcaggcagtggcagcaggcagtggcccaggcagaaatagctcccgcgcgattcactggagccttccccgggccctggtcccggctaccg

SEQ ID NO: 38029 - DNA, 2300 bp, Homo sapien
ttccatcaatttctttgagacttcagaggctacacatgagtgaatgcaattaaatccacaatgtgatgcctctacatattcaccagaatgtataacatttaaaaaggaaaagaaaaaggaagaacacaaaacacaaatgagtatagtaagtgttggcaaagatgcagagtaactgaaattttcattcacgactagggcatgtataaattagtaaaacctaaaaactatttggcagtgtctattaatgttgaatatattgaatatataccctgtgcatagtaacactacttccagggatcttccaaaatcaaatgtgtaactatgtgcatcataagacaggtacaagaatattcatagcagcgtcatttgtaattaccccaaactttaaataatctaatgtcaaacaacagtagaataggcaagtaaattttagaattatatacaaaaatgaaaatgaaactattatattcttgaatatggatcaatcttacaaatatagtattaagcaaaaagagccacataagagtgcgtattatgtatgactatttataaacattcagaagcaggcaaaactaattgggtggtaggattcagaattgtgcctatctgtgtgtaggggtataatgactaagactgagcatgaggaaagcttctaaattgctggtaaacatttaaaattttgctgtgaggcggtggttacacaagtttgttcacactgtcactaagacaagcacttatgattattacacttattttgtatatgtgttatgctttaaaaggttttcacatctatcagtttataaaatttttttaaattgtattttatcagtattggcgaggatacagggaaaaattgctcaaatactagcagtgggaatgtaagttaaaacaactactcaggggagcaaatcagtgaaatctattaaggatttacatcgtgcaaactctgtgatccagtacattctcttgttggtatctgcactctagagaaatacttggacctaagtacaaaaaggcatctacatatatatttatggtaccattgcttctcataataatattaataaacaaacgtgagggtgggggaatggtacattaattatgtatgtatatatatacacatattggttctgaggacatgcagcattttcagagaatgaggtagatttatatacagatatggaaagatttcaatgctaagtgtaaaaaagtaacatctacacttgcaaatgcacaggaactaggagtcatcatctacagactgggtttgtaattagggcctaaaagggatataagcataattgtaacgtttaagctttttttttttttcgcatggacaaaatcttacttgtgtaatttaaaattaataacggtacttagaatgactttggaaaaatatacaaataatgaaatggggatccaaagaatgttcactgtatacctctgtacttctaaaaatgtgaataagtgtagcatccgttgggagaaaagtttaattaaattttaaataaaacaataaaaggtgcctaacttcgtgtgaaaacagacatatagatataattaaatgtgactaccgcttagagatgttagttatgaactaggagcgctgagaaaaggtatcctaaataggtctgggggaagtgagagttagaagaggtgactcttgagctgagtaccgacatagaaatggtatgccctgtttttattcctggagggctcagcatgaggtgcccaagaggccctgaaacccatttccatgacattttcccacgagctggagcataaacccccaccgaataactgaagggaagcggaaggcgcagaaacgcggacgaagaggaagcgggcgcttgttaaaccgtgcgatgcacaatgcgggaaagtccaaccagctccgtgtttcaaagctggatgcccagatttcccacccattcctacaggcagaccggctcgccctctccctccttcccgcgtcgtttactggtcagtagaagattgacatgtcatctggccaataggttggctcctctatggaggcactcaggaaccagtcgggtctttggtccctcgagcgagatgcgagctgtgtgcgtcgacgtcagcgtgctgacgtcacgggccggaggtcccggggctgctgggtgcgggcggtgggctgcgcgttgtccgctggactgggtcccggtcacgccccgccaagccccgcccctcaggccggggcgcgaccgcggatccgcagttcccgggccagcctggggcggccggccaggaaccacccgttaaggtaggctgggtttctc

SEQ ID NO: 38030 - DNA, 2300 bp, Homo sapien
taggtaccttcttataagaattcggtttaggtttattttacagagttctgaacatactgtgtctgtgtgtattccatttagtatttgatttttaatttagttatcataacccaggcattttttctaagtcattataaatgcttcataaacatttattttagtgactatactgtggctataccatgatttatctaattattctaattagttatttaggttgttttctaattgatactattatagataccttatgataaagtcttttaatatggatttttattgaaatataatatacactattcagttgtgtatacatgtatatactatatagcattttgaatttttcatgagccaacacatgactaaaactactgtgtacatcaataaattatcactaaatgaacacaactatgttaccactactcaggtaaagaaatagaactttaccaagtcccctaaatatgccctctaccctctgccttctaatcactgtttctttcctctttcttgaagataatcactaacctgacctttaaggccatagatcagtttttgctttgaaggtctgtagtttgattaatttcatttagatttagggttacaagatcaggaagtatggaggttttaaagtatcttatttcacataatcaaattgccttcataaatgctgtgccattttaccaccacattgttaaaaagtatgagaaagacttttgttcctgagtgtggaaaggaagagaaatcagggtcaagtgtaaagagacgaagttctggacagtgaataataggaccaaatgggatcatattgctttagggaaatctcagctgtctgtttctaaattctattttatggctttgaaaatcctcttctttacctagacattgccagtcattgtggcagaaagaaaggagagtgtggtgagccacatactggcgattcatgtaccagctctggacacaagtggcatatgaacttctgcccacgttacatgccacgttcatggctaaagaacagataggagttcagtagagccaggagtatataatcccacagggagaggtcctacaggaaaggaaactaggctgcttgacaatcataccatccaccacacttcgtttaatgtctttgtcccatccataagcagatcagattatttggattactcatttttaatttttattataaaagtgccctctggtcttgaggggcctgcatctctgtataggactatatcttctgtaattattggtcaggtggtttgcatagtgctaaactttttgtttagtgtgtgcacttcttttccaagaagaggcctagaaacatgcttgttcattaagaggatggggaaatgctaactaactttagtttataaggtacttttgatggaaagaaattcctcctcaggaagtaaggatatttgtgtgatttttgtttttcgtttgaggcagtgtcttgctctgttacccaggctggagtccagtggcatgatcatagctcactataacctcaactcctgggctcaagcgatcctcctatgcagctcctgagtagttaggactataggcatgtgctgccatgcgcagctgatttttcttttttcttttttgtacagacaggaccttgctatattgcccaggcttggaaataagcttttttatagctaatttacacattctgcttacatgctccaggaaagcattcagtagatgattttctagcccatgcacagttatacttacaggactgtggaggttttctccctgtcacagcaaggtaactgagtcgttcaccaagaggtttggtccaggtcatcaggaacacctttcagttgtagctaacatcctgccttcaccctttcctacagtcagtttgcttcttctctcttgccattctttgctaaaacagctattttgtagtattgctctaaaacattatgtgttgcttctcatttctctttctctttatgtcttcatgaaaacataaatcagtcaaggtactctgttgttcagttagagaaatagttgcacagtggagagggttgcacagttatatttgatcagcttggatttaacatggtgtctcttttttatttcccaaaggtgtcttctctttagggatggtgaggttggaaaaaggctcctgtaaccctcctccaggatgaaccacctgccagaagacatggagaacgctctcaccgggagccagagctcccatgcttctctgcgcaatatccattccatcaaccccacacaactcatggccaggattgagtcctatgaaggaagggaaaagaaaggca

SEQ ID NO: 38031 - DNA, 2300 bp, Homo sapien
ctataaaatggtacatatttttctcccaatttacagtccctttaaagcaaataattataaaaatccctatacatgtcacacagctagatctgggatttcaaatcaggccatcaaacaaagagtttatgtacttagtaagttttctgttctttttctacaatagagtcagatagcaagaaattaccaagccaggaacctgaaacaaaacggacatcatgtggggctgggtgggtgcatgggctttgcagactggactttcactccagctcttttaatgattaggtgtaagtgacctacattttgtgagcaacagttttctcatcagccaacaaagaataattacaccagattcacagttattgaagagataaaggcatgaatgtgagatgtctggcatagggcatctcatttagcagacacagaatgagtacttgtttctggctttttctctctacatatgcacaaagaatgcgactagaagcatgggctctagccctgctcaactttcctctatttccaataccaaggggctctgacttaggctgccacaccaggcaaggagggcagtaccacctcacttgaccaagggcagggagtcacggacacatcacttcttgagatccttttccacaccaaggactgatgtttctggaattctcactttatgaagacaaaacatataaatggaaattttctcaggtagagactcactcttgtagctcattgagtaggcactagtggtccacccccactgtctttacttattccttgacatcacatatctcttgcaaaacctcaaataatattaaatgcaatcacccaataatagcatagccataattagaggcatttaggaaagacaggtgagtgtgccacaactacctaacacatcagcaaatctggattaaccactttctttgattttccacaatgcaaccttactttttaatagttgggaatgttctaagtgaatttagcagaggttgttaatcaacttgaaagctgaattctgacttgtctgactcttggtggtgctggtagcagtagatgtttacttttaggttttggtggtggtggaatatcacttcaacgtaaatcatcagaaataagtatttgtgaacccctctcgcattaatgtatcttattctgtaaaaagaacatgtgcaatttctcttagatacactactgctgcagctcacaaacacctctgcatattacatgtacctcctcctgctcctcaagagtgtggtctattttgccatcatcacctgctgtctgcttagaagaacggctttctgctgcaatggagagaaatcataacagacggtggcacaaggaggccatcttttcctcatcggttattgtccctagaagcgtcttctgaggatctagttgggctttctttctgggtttgggccatttcagttctcatgtgtgtactattctatcattattgtataacggttttcaaaccagtgggcacacagagaacctcactctgtaataacaatgaggaatagccacggcgatctccagcaccaatctctccatgttttccacagctcctccagccaacccaaatagcgcctgctatagtgtagacatcctgcggcttctagccttgtccctctcttagtgttctttaatcagataactgcctggaagcctttcattttacacgccctgaagcagtcttctttgctagttgaattatgtggtgtgtttttccgtaataagcaaaataaatttaaaaaaatgaaaagttgacttttgtccatggtattttaattggatgacatcaaattgaacatccaaggtaagaaacagcatggcaattgggctgtggaattctgtattggttgtaagaatggtccaacaccccatttctaattctttccctgagatcgtggttatcacaccttctaagaagaactacaaccaaatgaaggagctcatgtgacttctgtttgaaaggtcaccagagtcagattcattcggtttaggacattccagtggctataggacactatctactgtgacgcgtaccgtgtgagctcagctctagagtgtttcacagacactgtgtttcctgatcctcacgatacccccatgagagctgccctaaaagcagagaggcagcgtgatggagaggttcagcacatgctctctgatcccaggaatcctgggtatggtgtttcgtatctgtgtgacctcaggtgagttccaggaactctatgtgccataatctcctcatgtaaaatgaagttataatgccccgtttcctggagttatgtggatta

SEQ ID NO: 38032 - DNA, 2300 bp, Homo sapien
actcgaatatgtaaatttatagggctacaggtaaaacagtcaaatgtctacctataacatttaatttcttacctggttcatactttcaaagttaaaaattatatcaatatcaatatcagttgagaaatattgccttttttgcccttatatttcattaaaacttttgttttgatgcttcacatgcatgtaaagcatctatctcagaacagctttctaaggcatctcaggtcaaagcgtccactttggaatcctcttatgatggtgtctctgaatattttattctaagacacaattattcactcacaaaataaaaggatatatttttttccaatttattctgttattctacagttgtatgaagtaaaaactacagagacattaccccaagtaataatgaccaaatccgtgataaatttctttgcctttttttttccttttaccagtgctattccccaaactagcatcattgagttcatttcatgtcgatatctcctccagttagtccttctggatcaaagcagagtattagaagaacattttttaatatgagaagttacacaaagactgtaccatacataaggcacctccccatgttgtgagagaaaattttggggaaaaaaagcttcattttaagttctggcactttctatctaaatttagtatgtaggtgtccctatcacagagctaggatttgcaaacatagtctccattccttgtgtcttatttgagcttgaccttacaaaaccatcaactcctgggggcaaaggagaaacatgctaaatgcacaaactctttgttatttatttaagctatctctttccaaaatctatttgagaagacctaaattaaaatatacaagcacagtcagaccattaaatatatacagatgatctaaagccctaaggaaaggagaaggaaaaaggcctgtgattacctagtgaggagcacagtttaaaattttatgctcaaaagaaggagaaaaaggtaggggaatacatacatcttactaattgataaaaagaagcacaccaaattttcaaatatcatatttttttctattactagattggaaaaagacttcaatgcatgagtcctttagaaggaaatggaagagtgggcagtgccttcaacttccattttggaaaatgaaaggaatggtcatgaaaaacccactgcatattaccactgcatcagtgctatgggcatcctgacatttaatgaaatgcgcagatggtgatgctcagcagacatggtcaggcagataacatgtagtgatctaaagtgacaacagagagatggatttgaggaccaggcctcttgccttttctctacccattctgccttgaagggtaaagccaggtgtttcaagctggactttggcatgaactagacagaagtcagtttcaggctgaagtttctggtgaaacttggaaggcaaataagttgtgctgctgattagaaaaaggctcacttgttttgaaaaacacaagtgaagaattcccatacactgactgcatatattagactttagccaatgttccctttgactttcttaacacggtaggtaaggcaaaggataacctattaaagattgggcgtgtgaaagccatgtttcttgtgatgatggggacgatggctttgagaatcccagagcaaagtggaatgcaaacagaggaactgagaaattattcctcctgcttaattgctatggatttaactgccactccaaaatgctgaattttttttagtaagggcaatgcttggtcctatagggttaaaatgtcatgtcaaggcacacaatcatagcaaacagattgctaatcataacaatgacatcatcatcatcataatctcttatatttccatagcatttatttttgaggcagggtcttcccctgttgcccaggcaggagtgcagtggtgtgatcaattctcactgcagcctcgaactcctaggctcaagtgaccctcctgcctcagcttctcgagtagctgggcctacagtcgtgcacatcatgctcagctaatgctttttgtatttttagtgaatatggggtctcactgtgttgcccaggctggcctcaaaattctgagctcaagcaatcctcccacctcagcctcccaaagtgctggaattataggcacaaaccactgcactgggacctataacattttaatcaaattgcttttttatatcttgtttcattttggtctcacttcagtgctggtagcgatgttgaactgattttgaaacatcactgtttttagacaaataaaacaccaaaagctttaagttattt

SEQ ID NO: 38033 - DNA, 2300 bp, Homo sapien
ctatagaaggtcaatacatcccacttattagtgttctagtttctttgagggaggctgaagtcagtcaaaatttatgcaattgggactcttgttatatcacctggaaatggcccggtttaatagaatttgtaagttcaaccagccatgtcagctccaaggtcaatgaaaagagtcttcatcattttacatcttcatttgttcattcatcctctcagcaaatatttatcaaaaacagtttttgttctggatgctagagataaaagggcaaagaagacacagtctcaacactcaaaagctgccagtctggcagataagtattctagattctggcttggttgggccctgtccacgttctttggcctgtggctgccggagaagcagaaggtcttgggttcatgagctcattttctttcttaatttgtgtagcagttattgcttataagatctatgtattgcgtttggtgggaggatttgataaaatgacccaatattgtccttttaaggagaaaattaatattagcaaagtttattgagagccagacaccatgctaaatagtttcaatgctttatctccttcctcatcagacctatgcaggagatcctcttagtcccatttcacagatgaggaaactgaggcctagagaagctcagttactttcttaaagtcacatgactagtcactgtggaaaagtctgggatctatctaagcttgtctactccaaagtgcctggtctggacccttatgtgatatttagaaatattaagtcatatttttatactttgaatatttcttcttctgtagcttgaccctatgaatggactctttagttgactatttttctagtaacaactcccaatttgtattactatttgtgtattaatacaattcttctacttctaattatggcactgaaatgacctctctcctccaaaaagtcatatgggatatacatttattaaatactcaaaatataatttttagggtatttctgtagaatgagtcattttgacgtcattccactcagctgtctttctgtattggcatcaaatttgctagatatgttgaaactgatgtaggagctatcgcagctatgctatattgcagtgctaagtcgcataactcagagctgcctcagattctctgttgagtagcacacgatttaatttgatgaaactgtatagatattttcaagtcaaaagtagcagtctttcagcaatgaatcatcattaagaattcatattttctaacaactcatcagtattctatcagtgagaactggattctaaaaagaacttactttatttttattttttattttttgagatggagtctcactctgtcgcccagctggaatgcagtggcatcatctctgctcactgcaacctccgcttcccagtttcaagagattcttctgcttcggcctcctgagtagctaggattacaggctcctgccactacgcccaactaatgttttgggttttttttgtatttttagtagagatggggtttcaccatgttgaccaggctggttttcaactcctgagctcaagtgatccgcttgcctcagcctcccaaagtgctaggattacagggatgagccactgtgcctggccaaaaagaagttattttagaatcaatctagatacccatccctccatacatatgaatcccaaaatacctataaatcatattgaatatctatttattaaatgtcaaacataggaatcctattattgtctctctttgaaaattaaggaaatattaactctaaattacacttaagacaaagtgtatacaagaaaactttttagggaagatttagaagattcaggcaaaatcatgagaaaaggtaaaatcagactctctaatgtatgggatacaaggagagaatgtacatagcccaaagtgcccagggcaaggtgaggtcagttcttaaattcctgattacattcagatccagtgtgattttgtttgacctttgtcttgacttaacgtcagcagggccaatttttatgtatttatgtaaatattgaaaaaaatgttggcacaattttaagacaaacacaaagggagattcttataaaggcttctcaggtggtgggcaagagttgggcaaaaaaatcaaggtatttggtcccggaacaaagcttatcattacaggtaagttttctttaaattttgcaatgtaaagaagggatgggaggctggcaggcaggagctggctcagaattctaggattccctccttggtcactaatcatggtgaaatctccagagaggtcaggtgacttggttcatgc

SEQ ID NO: 38034 - DNA, 2300 bp, Homo sapien
gaaatacttgtgtcaccctcttctcgtggttgtctcatctactactcaaaacagcctcagagagcagcaatgaggtatccactgccagatccctgtgtccagatcatagagcagagctctcctgcagcctttcaggcatcagactaaatggtgagaaacagagaaagagatactagattcatagtgcattcaaatgacagaatactatgcagcctgtgaaaatgatattgtatgcatttattaataaaattcaaacatcttcacaatacaatgtaaagaaaagttcttgaagtgtacaaaacctcttaaaaatataaatgtctgtgttgatagaataattttttaaaaacagaaagaaattatccaaaattttagaataattattcccgagggaataattatttaaattattctatgtacttttactaatttttatatattttcttaagtgagatactaaggctttgttgtaagatatacttaacaaagtaattttctcttgtttggtagtaatactaagacacgataacgtcattaaggactcatgctgtgccaggtactgatatctgagtattttatgcattaccattgtgtaacacgataatataagccccttagtacctctagaagatatatatgtaggcaaggtacacatgtagaaactgaggcccaagagcttaaataactcagcccacattctatagggttaagtggtataggagtgtttaattgtattcggtcactaaaaataatgtgcacatagactcaagacctgcagtattgctcatgataataaagtaaccaaaataagagagtataaagccaaatatgtaaatcccaccgaaatatatacatatatcatatgtataaataataccaagccattctatttcttttttaaaaatttttaacttttaagttctgaggtacatgtgcaggatgtgcatgtttgttacataggtaaacgtgtgctgtgtggtttgttgcacctatcaacccatcacctaggtactgagcccagcatgcattagctatttttcctaatgctatccttccccacaccctgcccgccaataggccccagtgtgtgttgtttctctccctgtgtccatgtgttctcatcattaagctcccacttataaatgcggacatgcagtgtttggctttctgttcctgcattagtttgctgaggataatggctttcagctcatccgttttcctgtgaaggacatgatctccttccattttatggctgcatagtactccatggtatatatgtaccataatttctttatccaatctatcattgatgggcatttgggttaataccatgtctttgctaccgtgaatagtgctgcaatgaacaataccaagctattctatttccaaccataaatatgttgagaaaaattcaaaggaaaagtaaatgatgggtgccttttgttgtcaatttttatatctcattttactcagattttccttaacggatgactgctactcacctgagttcttatgtttaccagctctgtgtttttgaatgagtcactcaaactctgtttgccgttgtcctcatttgacacatggagataatcataaaacttactgcacaggactgttgagaggatcaagtaaaataatataagaaaacatctagacaagtagcaagttgtaaatggatattagatgcttgtcaagtttcttactgcagttctgaattaacagctaattacagaaagatagtcattgggacagaacactgcaggtttatcttcacattttcaaagccatatttctgcaatatggtactgctggggaatgggagagtgggcaagagaacatccctgccccacccctagaggtacacattcatactaggtatttctttccagatagttaacccacttacccgatctgcccagcactcatgggatgcaggaaaccctggaactgctcataactgtagcagctcatgaagaaccctaaggaaccacctcatctagtacttctgagagacctcaacagccccgccttctgccactgacttgagacctccagtgaacagggttaccttctccctggggaaccagactggcagaaagcatgccactggtagtagctgttatcttcttctccctctgggtttgtgagttgccccctaatcatttcagtctacagaagagattgaagtcattctgtattattacctcttcacgtatcgttggcttatgggaatttctcttcacttgcaattgcacttgggcagttggaacaacctgaaatatctatttccagaccagcaa

SEQ ID NO: 38035 - DNA, 2300 bp, Homo sapien
agggctctaagccgggccctgcagactggctcaatctgcagcatgggcgctctctcttacttcccattcccaggacacatcctgtgcaggggaagagtgagtccttctagttgtagccacaggcccattggtctgctgacctccacctcctcaatattcgactccccagcattgagtgtctcaaaaacagtatttttcagaaaagagggtgaacagggcaactgctttaggaggagccatccgagccagctgcttcctctcctgtctcctagggaggacccaagctgtcggagttcatacctgtcccacaaaacacgagccagagctggacaaaagtgacagggacaaccactgtccaaggttaagtgagccctgaggcaccagaagatctccaagaaagccacatggaaatcataaaatggagctgaatggaggaaaagagaagttctgtaatgtggaaaaatgaagtactaacaatatttgactgttttcccttgatttagccaggttactacttcaaaacagtcagcaaagcattttaacaatgaaagctgttggggaaattaaatggctggaagtggagggaaactgtgcattgtggtgcatgcctgttgtcctagctactcaagaggctgaggcaggagggtggcttgagcccaggaattcaaggctgcagtgagccatgatcacaccactgcactccagcctggccaacatagcaagaccctatctctacaaaaataaaaataagaagtggaggggagataaaaatgtagtggtaggagtagtagtaataatatctaataattactgaaaatttactatatgtcaggaactatactaggtgtacttagctatttagtctgcataaaattttaataccagtgttattattgtatccattttcagatgagagatttgaggcacaaagagattaagaagtttgcacagggtcagacagcccctatgtgataaagatgaacagttagacattaaaacatgttttggttgggtgcagtggctcacgcctgtaatcccagcactttgggaagctgaggtgggtggactgcttgagctcagaagtcggaggccagcctgggcaacatggtgaaaccccgtctctacaaaaaatacaaaattagccaggcatggtggtgtgcacctgtattcccagttactcaagaggctggggatgaaaggattgcttgagcctcagaggttgaggctgcagtgagccatgagtgtgccactgcactccagggtgggtgacagaacaagatcttgtctcaaaaaatatatgtaaagaaaaaattctccaatgacatgggaagttgctcagaatataagctgaactgaaagaatacagaacactatacatgtaaatatatctatagtccataaaatcatattaatattcatgtatccaaaatgaaaatatctacaagtgagcatatgataatgtgaatagtagtgggcctttgtgatatgaccgtagatgtttttattgttatctttccccattgctctgagtttcttcaatgagcactgttaccagcatgttctacctatcagctgtgtgacttctgtggagttgatgactctgtgcctcattccctcatccaaaaaatgaaaattccaagtacccatattaagtgatcattgtgaagattagaaggtgaaaaacgtttagaaaaaaaaaaggctagcaaatagaaaatgctcaataagtatttgctattataaaagttaatgtttattaaatatgcaacaatttaaaatattatgctgaggaaaagtgttcacgaacaactcctaggcaattagaaatccttctcatttccacagaaattaagcaacccccatggccccctcacattcgtgcagagaacaccatcgagattgctagcctgatttgagataagcagggtgagcaggaggggggctcagtgctgagcctgcaggaggcactgaagggcccaaaaaaccattttctttctctccccagttcaggccacaccctccagaacctgaccagagtcgtctagccaccaggtccgcactttcctgccttctccttgggtacaccgccccgaagacaggatgtcactgctggaagcatttgccttctcctcctgggctcctgagttgctgtccgaacatttcagtctagctgcgtgaccaaaatcattcttcaatgtttccctcttctactgtcagatgttcattggaaattctcctcttttacttacagttggacttggattatcaaaagtggagcagttccagctatccatttccac

SEQ ID NO: 38036 - DNA, 2300 bp, Homo sapien
gggacgtcacagctacagatatgcacctgttcttcactctgggaatgtgaacttgttctcctacttctcagattggctgagggatttttttgaaaatgaatgtctcatttcttgataactttggtttcattgaaaatgctattttgtttctaattgaaattgggtaaaaacaattgaagcaagtaaaaatctttatttcattagcagaaatgaagcatatattttcactgtagggtatttagatagaacttttcatacacactcaggtactgaccaacaccaaatcaggcttttgaggatttgatatttacttggaaaaaaaccctgttccaggtcaattacaggcaaagagctgcaaccatatataaaattctgtatataaattctctatataaaattctgtctacttccctttagttcttaatataaaattcctagaaaaatagaaagacatgatgacccaatataatggcccccaggaaactagcatgacattggagctgaggtaatgggcacttgccccattatcatgtctgcgaccacatccttcccaatgtggaagagcctcgtccagccctctgccccagctaggcctcagcctcagcttgcagcacttcctgtgttcctcagatgatgcctctgtgatcacaggaaaccagaaagggagtctgatgactatcaatttcaccccacaaatgccagtacctatacccccaagtgtctgatttgacatcatttcctattgacttaggttcctatttagagactatgtttgttgaaactgcatgattatttcagagagaaagcaaggtccattatatcatttcttagaaacttctagtcatggtgaattgctcagggtgaagatgccagcaaggaacaagatggaattcatatccactcagttcccactggctgccagaaaatgggatagatgttctacatattcagaatttcaggtgattgtcataagaacctggtaaataaacttattcatgaaagaaataactgatgtttagacaggggcagttatctgtccaaacaaatagttcatgctctttcaagtgcactattgggccactttgaataccctttgggtttattaacttaatggaaatagggccaggggcagtggctcaggcttataattccagcgctttcagaggctgaggcaggcagatcatttgtcctcaggaattcaagaccagcctgggcaacatggtgaaactccatctctacaaaaacacaaaaattaaccaggtgtggtggagcttgcctgtagtctcagctattccggaagctgaggtgggaggatcacttgagcccaggaggcagaggttgcagagagacaagattgcagcactgcactccagcctgggatacagagcaagactctgtctcaaaaacaaacaaacaaaactttataggaatgaactgtggcatttgtgggtaattatgcgctggcccggacttactgcctagtcctgcagagctaggtcaagacagaatgggcagtgactcaagacagaatgggcagtgactcaagaagccatggctaaagggtcatgctgaacacacatttggaagagttcccaccccccaccccacccccaccctgctccccaccggcattctgccttaggacccttcttctcactggaggggaaaaggctaagaaaacagaaaaccctctctgttcttgtgaacttgctttagcagataatatcatgggtgggatacctggagagggatcaaaacctcacagcccagacttaagtaaatgatcaaaatgtgtaatgaggatcatgttttggaaatgtggccaacatatttttattctctaaaataaatcatgtcaccttttgtcctttctttattgtagctaatccatgatatttactacccatagaaagagatggtagttgcccagaacaaactcacttttttttttttttttttttttttttgagatgaagtgttactctgtcgcccaggctagagtgcagcgcacaggcgcccgccaccacgcctggctaatttttttttgtttgtttgtttttagcagagacggggtttcaccgtgttagccaggatggtctcaatctcctgacctcgtgatacgcccgcctcagcctcctaaagtgctgggattacaggcgtaagccaccacagcctgccacaaactcactttttgaattaattgtgagatgttgggcttgaaaatcaggttcaatttttttttaaagagttttctatagttgtgattctctcattcataggtcaaaaggccacactggcaa

SEQ ID NO: 38037 - DNA, 2300 bp, Homo sapien
tgcagcccgatagaattaatcttaaatctgtcaccaacaagctgttaaaccttgacccattacctgacctgctttgagtagggctttgtgaagattatactaaatttatggtattaaacatcataatggctacaaactgcttgacacattaaggcattcactaagtgtccattgcttggtaactctttaaaaactgtattttaaatggtgatgttttgttaacatcagaacgacaaaaaaatactacaatggccatccattccctcactccaccctttcatctattcaacaaacacctgggaatagagagataaacagcacatgatcttactcccctgggaactcttaactgtcgtttagaatgagagagaaatgggtaaacaggccaagacttgggtaggaggtgctaggagagaggaaggcactaggtggcgtgaagagaaagcaatttgaagcatctccatcctggacttactgggtgaggtaagcttcctggggaagactgcctggggctgagcccagaaggataaacaggaattagccagggaatgtggagtagaatgcagtccaaacacaaaaaaattcaagtcaatccatagaagtgggtcgtggaattccaggcagaaagtgactaaatgaagatggaaggacagggagggggtggccacatcacagagaacctcttatcctaagaactctggacttcatcttcagaggcaaggtagagagagcaaggactttagagcaggaaaaggaccaggtcagtctagtggccatggggaaggtgggtgggaggggccgagatgggatgtatggaggtgcgtgaggtggaggcagtggtgagccaggaaatgtttaggacgtagaatcctcaggaattagagtgcggtgaattagaggggagaattgaggctgatgctcaagctcctggcttgggcaatgtgggtagttatgtcatacagggaactcggaagaagatatggtttgggggaagggaatgagttcactctggctatgagcagactttgtttgagatcccatgtcagacgtacttgaaaatgtccaagagttagctggatatgggtacagacagctttcgatttaactgaggtccgacttaagatttttttttactttatgatggtgcaaaagtgacacgcatttggtagaaaacataatttgacctttgctgtttccccaggacagtgatataaggttatgatactctcttgcgatgctgggcagtggcagtgagctgcagctcccagtgggtaaattaagcatggaaatctggaacacagcagcttttaagggatgcactggggagagcagtttgtaaaaataccttgggacggattaaatgtcttggcttagagaaagaacaacagacaataggaaactgtcattgaggagaagccgggattcaggagatgtacattattcaggtagctgagggaggggacaggaacctgaatcttcaacagaagcaaacaaactgggatggagggcccagcctcatgaaggtgaccagaaggacccggtgctgcaggctgtgtgggtagctgagcagagctaagcggcttgacggaccaacatctctccagctggttgaagacaagctctcagaagacaatgctgcatgtcacagccccagcaaccaacaacaccagcctgacaacttgctggggtggccgccttgtggtctgaggtggccgtctaaactatgtggtctgatctcaggctgcagaccttgcaggactgtcttcacacagactggaagtgctaacaggtggtgaggacaccgctttacaacgatgcagggggccccatgtcaccctcacccatgggaagtttgacttggtggactcagccaagccacagaggtctaacgcttctctgcggtgatttcaggctgccctggcagaaagcacagtgcctgcagacatgctgtcactgctccacacatcaacgctggcagtccttggggctcgtaagtagttttgctcccccaatcactttggactgatattctctattgttatatatttttataaattccaaattcttggtttatttactccctcccatttttttccccagtgtgtgtatatggtgcaggtcacctagagcaacctcaaatttccagtactaaaacgctgtcaaaaacagcccgcctggaatgtgtggtgtctggaataacaatttctgcaacatctgtatattggtatcgagagagacctggtgaagtcatacagttcctggtgtccatttcatatgacggcactgtcagaaaggaatcc

SEQ ID NO: 38038 - DNA, 2300 bp, Homo sapien
aacatctttcatttcctcaagaggagactctgccactgcagtgaaccttcaccaccacaaacctccaccttcactcctcaccaacacctgctgtactcttcatgaatgctgtgagcttgagcgagttcttaaatttcctagccatcagtttcctcatctccaaaataaagaaaacagcaatgtccaaaatcaatctccctctgaattatactacctggtttcagcctcaacctccagggtgatagaccagcttagagaccaagattttatctttcctaagtgatctcaccttcagaggcatcatcaccagacttttcaagttttgtttcttagaaatggtcccaagttctttccctctcatcgtctcttgctttagggagcctcccagctagtctgtcttagcaagacaagggcatagctggtgcattgctgctggtgagcaggggcaagttcacagaaggcagcatgggagagtataacagaaatcaccatcagtttccaagggcttgctctgtgtcaggcattgccctaaacagtctacctgggcaaacatttattctttgcaacatccagtaaggtaggctgtgattttattctcctttggtagataagaaaacagaggcagagagaactactcaaagagctcaggctttgcagcccgatagaattaatcttaaatctgtcaccaacaagctgttaaaccttgacccattacctgacctgctttgagtagggctttgtgaagattatactaaatttatggtattaaacatcataatggctacaaactgcttgacacattaaggcattcactaagtgtccattgcttggtaactctttaaaaactgtattttaaatggtgatgttttgttaacatcagaacgacaaaaaaatactacaatggccatccattccctcactccaccctttcatctattcaacaaacacctgggaatagagagataaacagcacatgatcttactcccctgggaactcttaactgtcgtttagaatgagagagaaatgggtaaacaggccaagacttgggtaggaggtgctaggagagaggaaggcactaggtggcgtgaagagaaagcaatttgaagcatctccatcctggacttactgggtgaggtaagcttcctggggaagactgcctggggctgagcccagaaggataaacaggaattagccagggaatgtggagtagaatgcagtccaaacacaaaaaaattcaagtcaatccatagaagtgggtcgtggaattccaggcagaaagtgactaaatgaagatggaaggacagggagggggtggccacatcacagagaacctcttatcctaagaactctggacttcatcttcagaggcaaggtagagagagcaaggactttagagcaggaaaaggaccaggtcagtctagtggccatggggaaggtgggtgggaggggccgagatgggatgtatggaggtgcgtgaggtggaggcagtggtgagccaggaaatgtttaggacgtagaatcctcaggaattagagtgcggtgaattagaggggagaattgaggctgatgctcaagctcctggcttgggcaatgtgggtagttatgtcatacagggaactcggaagaagatatggtttgggggaagggaatgagttcactctggctatgagcagactttgtttgagatcccatgtcagacgtacttgaaaatgtccaagagttagctggatatgggtacagacagctttcgatttaactgaggtccgacttaagatttttttttactttatgatggtgcaaaagtgacacgcatttggtagaaaacataatttgacctttgctgtttccccaggacagtgatataaggttatgatactctcttgcgatgctgggcagtggcagtgagctgcagctcccagtgggtaaattaagcatggaaatctggaacacagcagcttttaagggatgcactggggagagcagtttgtaaaaataccttgggacggattaaatgtcttggcttagagaaagaacaacagacaataggaaactgtcattgaggagaagccgggattcaggagatgtacattattcaggtagctgagggaggggacaggaacctgaatcttcaacagaagcaaacaaactgggatggagggcccagcctcatgaaggtgaccagaaggacccggtgctgcaggctgtgtgggtagctgagcagagctaagcggcttgacggaccaacatctctccagctggttgaagacaagctctcagaagacaatgctgcatgtcacag

SEQ ID NO: 38039 - DNA, 2300 bp, Homo sapien
agtctgatttccttttttcagttttattacaactaaatctctatttgtaccttttaagttagcaacccaaggatatttgtttccatatggtaagtcaattcccaaaggagaacatagtaaataatcaagtatttccttgtggatattaacatacaactttatgacatgataaaatattacatacacgtggctctctttctggactttccactgtgttccatgaatcttttcagtctagtgccagtattgtcctctctttgttgtatctgaatgagttagagaaaatgccacactttgagacaaattaagattccgtttatttagccggcggccaagagacggctaatgctcaaaattctctcggccccgaagaaagggctagattttcttttatactttggtttggaaaggggaggggtgtctagttaaaacaattttacagaaataaagtaggcaaaaagttaaaaggataaatggttacaggaaagtaaacagttccaggtgcaggggctttaagactattacaaggtcatagacttggggctttgggcgttatcaatcagatggattcctgggaattgcggatatagcttgccacagtatcttatcagttaattgcattcttggatgtgctgggagtcagcttgcacaagttaagtccttgaggaaggggctgccagtgaaagagccaagatggagtctgtctggctctcttagctaagggagagtcaattcaggtggaaacaaggccaggtgattaaaggaaaagggagagtctaaaaacagggttagtaaaaacacggttgggcattacatcttcagcactgtagttttgtagttcattttatattccagtggagattgtttctctcattacttttttgttttaaggattttctgtgcattctaatgtgatggcagttctctcccttctcatttttaaaccatgagagttctgtcccaggcaggattttcctggctccaaggcaggtgagcttccctccttcacaaggaccccaatgactcagctttcagagctcctcccctggcagcctcaagtcctgtacgtgtggtggagaggcagagggagaccaactggagccccctgcctttctcattcccagctgtgatgtcagcaaaaactgaactctctgagctaggccaaaacaacaaccaagagggacattgttctacgttttatgaatatcttaaacatgtgtccaaacttttttttttttttaccgaagtgaaaatctgtgtatgcactactgaattttcacaattattttactatacttgttttatcacctgtatctccatctatgagtccaggtccactgcagacatcagtcagctttctgaggatacggttgctaagtaaaatatgcaatactcaggaaatttggacgttcagataaataacaagtttttagctgaagtatgtcccaaatattgcatgacatggcaccctgtattactttaaaaaaaaaactcacacttctacttgaatgaacggaaatcctctaataaagagatcacacacacaggcatacactcccaacacacacacacacacaaactcacagaggatcacacaaacacccgccccacccccacacacccatttaccttagaggagagtccaagacccaccaacatacctgaccctcgatcctgttaataaagcaggttcaggccctctcagagtgaccctgggtgttgcctctagtgtccttgcagatgtgaaaaggatggtggtttagggccctaatcagaagcttcccggcagaatgagggtcttgcagttgccttacttgctgaaactctgaagtgctgggtgtgaacctgctgtgagactaccccctttaaggtctgagcctgttaactccagggtcagcttcccccacatctgcactccctctgctgcaggcctgagctctctatgcccggagctctcttccttagagggcctgctctcagccgccacagagggcgctggagaactggcctgagcagagaggcagaaactcctctgcaggtcctcctaggcaccacccagagtcccctaagacagatcctcaatcacttatctctgcctgtgaatcaggaagaccagctcctcctactgtcttctgtgttagggatcacttccttgttgagtgggacctgagttttgagagggtcttctgctcctcttcgtctggtcccttacttccaagaccccagagaggaaggcatgctgttggctctagctctgcttctagctttcctgcctcctggtaagagtgctgcctacagag

SEQ ID NO: 38040 - DNA, 2300 bp, Homo sapien
gtgaccccaagaactcagctttcagagctgctcctgcggcagcctcatgtcctccacgtgtgctccagaggcagagggagaccaaccagagcccctccctttctcattcccagctgtgatgacagcagaaactgaattctctgagctaagccaataccacaaccaagagggatgttgttctacatcttattaggaatattttaaacatgaatctaaacatatttgttatagaggaggtgaatatctgtgtatacactactgaatgttcccaattattttattctacttgttttatcacccatatcttcatctatgaatccaggtgcactgcacatattagcctgctttccaaggatagagttgccaaataaaatatgcaatacccaggtaaattggaagttcagataaataacaaataagttttgagttcaagtatgtaccacatattgcatatggcactgcaccctgtacttttttttttctttttttgagacggagtctcactctgttgtccaggctggagtgcaatggcacaatctccgctcactgcaagctccacctcccgggttcacaacattctcctgcctcagcctcctgagtagctgggactacaggtgcccacccccacaaccggctaatttttttgtatttttagtagagacagggtttcatcgtgttagccaggatggtctcaatctcctgacctcgtgatctgcccacctcggcctcccaaagtgctgggaatacaggcgtgagccaatctcacactcctacttgatgtggcctttttacttgagaatgaacagaaatcctctaacaaagaggttacaaacacaaggtcacacacaccccctcctgacccccacacacccatttaccattgaggagagtccatggccgaccaacatacctgattctcactcctgttgagaggaggggccagctgggcttcctgggtcgagtaggggctcagcaagctgtgaaacgcactcatttcctgcatcacgacttacttcggtcctggatgaataatattgaagatatatgcttaaaatattccgaacaccaggatttgtgcatgtgttttcttccccatgaaagctatgaacagcgaaaattttcctgtaagtttccctgtgttctctctccctctcttccttccccctgccccaaaactaaagtaaaataacgttaactgcccgtttttctgtaaccagcagaccttatctatactcccaattccaattccttgtaaacatactttgtaaagtcctgtaagatcctgtctcctttgccatgacgctgcaaggtcataaagtagataaaacctaagttgcaattccggttttcctcaagatctaagacatgttacaaatggttaattgcctttgtttctcgctttggtaacatcttcccgcctcaggtatttcccgccttgaagagtttaaaaggcaatcctataatctaactctggctacccattctggaccccctccatgctttggaagctttgtactttcactctgctcaataaagcctacagctttttctctctctcggtccgtgtttctatcactcgctgcggtcagccgccacaccaattctatggcgtggctaggcaagaaccttaggtgttacactgttaataaagcaggttcaggccttctcagagtggccctgggtattttgcctccaagtgtccttgcgaatgtgaaaaggaaagcagttgaaagaccaaatcaagcttcctgacaggacaaggccctggaagcagcatcaactgctgaaactctgaagggcagggtgtgagcctgctgtggactgccccgtcctatggccctggccagctggcgccagggtcagctttccccacatctgcactccctctgctggaggcctgagctctccatgcccctggctctcttctgcagagggcctgctctctgctgccacaagatggcgctggagaaggggcctgagcagagaggcaggagctcctctgcaggtcctcccagacaccacccctctgggaggaaggctggggagtcccctaagacagatcctccatcacttctccctgcctgtgactcaggaagaccagctcctcctactgccttctgtgctagggaacacttcctgtttgagtgggacctgagttttgaaagcgtcttctgctcctcttcatctggtccctttccttccaagaccccagagaggaaggcatgcggtgggccccagccctgcttctagctttcctgcctcttggtaagtgtgctgcctacagagaggctgatgggttt

SEQ ID NO: 38041 - DNA, 2300 bp, Homo sapien
agggaggccgaggcagggggatcatctgaggtcaggagttcgagaccagccaggccaacatgaggaaaccctgtctctaccaaaaatacaaaaattagctggatgtgctggcgggcacctgaaatcccagctacttgggaggctgaggtaggagaatctcttgaacccaggaggcggaggttgcagtgagccgagattgctccactgcactccagcctgagtgacagactgagaatccgtctcaaaaaaaaaaaaaaaaaaaaaagagagagaaaaagaaatctagaatgtaagttaaaatctccaaatgcatcttcgttaaaattatgactttagttccatgtaaatagtttacatatgcaaaacaaatatgaaacaaaacaaaataatacaacaaatgtctaaaattttaaaatgaaaactgaacaaataaactagctatatcaatgttggcatgaacatgtaaagaaaaattatttcaaatgattttgttgaaaaaatattcggattatgtacccaaaaaggaaagaaagagagagaaaagcaaggaaggaagaaatgaaaaaaggaaggaaggaagggagggagagagggagggagggagggagggaagaaaaaataataaaagcaagcaaggaagtaagaaaggagagagaataaaagggagggcagagggagagagtgtttaactgcatatctaggcctagtgttttagtggtatttataatattgcctatattgttatagacataaggagtaagcagcactctcagctgcgatctctggaccatgattggatacatgattcagtataaatacccttcccatttgctgtccaaaatatctcgcttcacagctggaccctaagaaacagagtgagtgggcctcccccatgtcctaggagagctgagaaaaccttgctctcagccaggctgcttagctgaggcttagctgagatggcagcttagtcttcaggaaagtcctgggggagggtggggaacagggtacagctgctgacaggagagtgtaatattaggggggagatcaggagttaagctgtttctctttgtacagaatacagtaaattcagggcaggaaatgagaggggacggctctctcttgtgtaccagaagcagccacaagacagatattcagtgtggtgtagagcaggtctgaatcactctgcctgtcctaggtggcacagtaatagaccccagaggcattttcatttagttttggaggtataaatttccagcttatccttctacttccataagtatcatgctttcctgactgactcctgattccaacatatccctggagttgcagatgtcatagtacagaagatgctgtggggccttcccctcctggcgtaggtaccagtggatgtagaaggcattttctacaggaagatcacaggtgattacagcagatgaccccatctgcctggtgcctgactttattttcgcttccaagttagtagatatctgactggctgcaatgggaacaacataaaatataatgaggtattccttagtatggcgtcccttgctaaagaagaaaaatccaaaacaaaacccaacctgtgagcctctctgtaggcagcacacttaccaagagacaggaaagctagaagcagggctagggcccaccacatgccttcgtctctggggtcttgaaagaaagggcccagatgaacaggagcagaagatcctctcaaaactcaggtcccactcaacaaggaagtgatccctagcacagaaggcagtggggaaggctggtcttcctgagtcacaagcagggagaagtgactgaggatgtgtcttaggggactcccacgccttccttccagaagggtggtgcctgggaggacctgcagaggagctcctgcctctctgctcaggccagttctgcagcaccctctgtggcagctgagagcaggccctctgcagaagagagccaggggcatggagagttcaggcctccagcagagggagtgcagatatggggaaagctgacccctggagtcagcaggcccagccctaggagggggcagtcccacagcaggctcacaccctgcccttcagagttgcagcagctaatgctgatgccaggaccttgtcctgccaggaagcctctgattagggctgtgaaccaacttccttttcacatctgcaaggacacttggaggcaactgcccaaggccactctgaggagggttgaatgttctttattaaaaggactgaggatcatgtgtgttggtgggccttggactctgctctaaggtaaatgtgtgtgtg

SEQ ID NO: 38042 - DNA, 2300 bp, Homo sapien
acagagtgagactctgtctcaaaaaaatgaataacgataataataatattgatggtacatatgggtactgacattctggtagttaatgtactaagcacattacatgcatattttatttaatctacacagaaacttcattaaggtttaaagtactgttgaatgtaacattagaaattgggcggttaattaacattccctaagtcatatgctttaatttgataatgattgcaatccaagctctgtggttccgaaaatgagatttgtaaattcagtttgcattcccccatctttgggagtactagtattatttcacaactttataggttatttatagttcttcttttgtgaattgccatgtcatactctttgcctattcctctcttggaggattaattttttcttattatttcgtaagagttaagatacactattttaaagatactgaccctttatcgaatgtgttgaagatatttcccctcatttgttattatttacatttggcaccttttggtgaattgaactttgaaaaaaaaagcattaaaatctatcaatttttctagggtgtctagtttgatgtcaagcttagaaaggccaatctcacctagaatttctatgcaattcatcattgtttaagtgtaatgattttgtttttattacaactaaatcactatctatatctggtaagaacgaaatgcaataatatttgtttccatatggtaagtcaatacccaaaagagaacttataaaataattgactatttccttgtggatattaacatatcactttatcacatgataaaatattacatgcatgcggctttctttctggattttctactgtgttccatgaatcttctcattctagtgccagtattgccctctcttcagcactgtagctttatagttcttttcacattctgatgaaatttctctcattatttttttgttttaagaattttctgtgcattctagtgtgatctcaatcctctcccttcccatttttaaaccatgagacttctgtccagcaagactttttcatgctccaaggcatggaagctttcctccttcacaaggaccccgagaactcagctttcagagctgctcctacagcagcctcatgtcctgcacgtgtgctccagaggcagagggagaccaaccggagccccctccctttctcattcccagctgtgatgacagcagaaactgaattctctgagctaggacaacacaacaactgagagagacactgttctacatctcattatgcatctttcaaacatgtgtctctatatattcttacagaggtggtgataatctgcctatgccttactgaattttcacaataatattactatactttttttgtcccctatatttccaactgtgaatccaggtgcactgcagatattagtctgctttctgagggtagggatgacaaataaaatatacaataccgggggaattggaagtacagaaaaataacaagtttttagtttaagtatgttccaaatattgcatgacatggcacccagtactactttaaaaacaaacaagcaaacaaacaaattcacactcctactttaatgaacaaaaatcctctaataaggaggtcacacacacaggattacaggcacaacccctgcccccccaacacacacacacacatatttaccttagagcagactccgggacacaccaacacacatgatcctcagtccttttaataaagcacgttcaacccttctcagagtgaccttgagtggttgcctccatgagtctgcagatgcgaaaaggaacttggttcagggccctaatcagaggcttcctgtcaggacaaggttctggcatcagcattacctgctgcaactctgaagggcagggtgggagcctgctatgggactgccccctccaaggtgtgagcctgttaattccagggtcagcttacccaacatctgcagtccctcagctggaggcctgagctcttaatgcccctgcctcccttctgccctgggcctgctctcaactgccacaagatggcgcagaagaaagggcctgaggagatgcgggagctcctctgcaggtcctcccaggcaccaccccttctgggaggaaggcttgggagtcccctaagacacatcttcagtcacttctctctgcctgtgactcaggaagaccagctcctcctactgtcttctgtgctagggatcacttccttgttgagtggggccggagttttaagaggatcttctgctcctcctcatctggtccctttccttccaaggcccccgagaggaaggcat

SEQ ID NO: 38043 - DNA, 2300 bp, Homo sapien
cttcttttgagaattgccttgtcatactcttttcctattctttttttggaagattagttttttcttattagttcgtaagaattaatatacaccattttagagatactgaccctttatccaatgtgttgaagatatttctcctcatttgttattatttacatttggcaccttttggtgaattcaactttgaaaaaaaaacaataaaagctatcaatttttctagggtgtctagtttgatgtcaggcttagaaaggccaatctcacctagaatttctatgcaattcatcatcgtttaagtctaatgattttctatttattacaactaaatcactatttgtaactagtaaggtagaaatgcaacaatatttgtttccatgtggtaagtcaataccaaaaagagaacttatttaataactgactatttccttgtgggtattaacatatcactttatcacatgataaaatattacatacatgcagctctctttctggattttccactgtgttccatgaatcttgtcattctagtgccagtattgccctctcttcagcactgtagctttatagttcttttcacattctgatgaagtttctctcattatttttttgttttaagaattttctgtgcattctagtgtgatctcaatcctctcccttcccatttttaaaccgtgagacttctgtccagcaagactttttcacgctccaaggcaggcaagcttccctccttcacaaggacccgagaactcagctttcagagctgttcctgtggaagcctcatgtcctgcacgtgtgctccagaggcagagggagaccaaccggagccccctccctttctcattcccacctgtcattcccagctgtgaagacagcagaaaccgaactctgtgagctaggccaataccacaactgagaggaatattgttctacatctcattatgcatctttcaaacatgtgtctctatatacttcttacagaggtggtgataatctgtgtatgccttactgaattttcacaattatattactgtacttcctttgtcccctatatttccatctgtgaatccaggtgtactgcagatctcagtcccctttctgagggtagggctgacaaataaaatatacaataccaaacaatttggaagttcaggtaaacaacaagtttttagtttaagtatgttccaaatattgcatgacatggcaccctgaactacttagaaaaaaaaaaacaaaaaaaactcacactcctacttcaatgaacaaaaatcctctaataaagagatcacaaccacaggatcacacacacacaaacacacacacacacacacacccaacacacacacctttatcttagagcagagtccaagaccaaccaacacacatgatcctcagttcttttatttttattatttctttatttatttatatttattatactttaagtgctagggtacatttgcacaacgtgcaggtttgttacatatgtatacatgtgccatgttggtttgttgcacccatcaacttgtcatctacattaggtatatctcctaatgctatccctcccccctgcccccaccccactacaggccccagtgcgtgatgttcccccactctgtgtccaagtgttctcattgttcaattcccacctacgagcgagaacatgcactgtttggatttctgtccttggaatagtttgctcggaatgatggtttccagcttcatccatgtccttacaaaggacatgaacgcatccctttttatggccgcatagtattccatggtgtatatgtgtcacattttcttaatccagtctatcactgatggacatttgggttggttccaagtctctgctatcgtgaatagtgccgcaataaacacacgctttgcgtggtgcctccaagtgtccttgcagatgccaaaaggaaggtggttcagttccctaatcagagacttcctggcaggacaaggtcctggcatcagcattagctgctgcaactctgaagggcagggtgtgagcctgctgtgggactgccccctcctagggctgggcctgctgactccagggtcagcttccgctacatctgcattccctctgctgcaggcctgagctctcctggcccctggctctcttctgcagagggcctgctctcagctgccacaagagggcgccggagaacggacctgagcaagagaggcaggagctcctctgcaggtcctcccaggcaccaatccttctgggagggaggaaggcttgggagtcctcttagacagatcctcagtcacttctctctgcttgtgtc

SEQ ID NO: 38044 - DNA, 2300 bp, Homo sapien
ctctgtctcaaaaaaatgaataacgataataataatattgatgctacatatgggtactgacattctggtagttaatgtactaagcacattacatgcatattttatttaatctacacagaaatttcattagggtttaaagtactgttgaatgtaacattagaaattgagggggttaattaacattccctgagtcatatactttaacttgataatgattgcaatccaagctctgtgattctgaaaacgagatttgtaaattcagtttgcattccctcatctttgggagtactaacattatttcacaactttataggtcatttatagttcttcttttgtgaattgccttgtcatactctttgcctattcctctcttggaggattaattttttcttattagtttgtaagagttaatatacactattttaaagatactgaccctttatccaatgtgttgaagatatttctcctcatttgttgttatttacatttggcatcttttggtgaattgaactttgaaaaaaaaagcattaaaatctatcagtttttctagggtgtctagtttgatgtcaagcttagaaaggccaatctcacctagaatttctatgcaattcatcattgtttaagtgtaatgattttgtttttattacaactaaatcactatctatatctggtaagaacgaaatgcaataatatttgtttccatatggtaagtcaatacccaaaacagaacttataaaataattgactatttccttgtgggtattaacatatcactttatcacatgataaaatattacatacgtgtggctctctttctggattttccactgtgttccatgaatcttctcattctagtgccagtattgccctctcttcagcactgtagctttatacttcttttcacattttgatgaagtttctctcattatttttttgttttaagaattttctgtgcattctagtgtgatctcaatcctctcccttcccatttttaaaccatgagacttctgtcctgcaagactttttcacgctccaaggcaggcaagcttccctccttcacaaggacccgagaactcagctttcagagctgctcctacagcagcctcatgtcctgcatgtgtgctccagaggcagagggagaccaaccagagccccctccctttctcattcccagctgtgatgacagcagaaactgaactctctgagctagcccaacacaacaactgagagggacactgttctccatctcattatgcatatttcaaacatgtgtctctatatacttcttacagaggtggtgataatctgtgaatgccttactgaattttcacaataatattactgtacttgatttgtccccttattttcatctgtgaagccaggtgcactgcagatattagtctgctttctgagggtagggatgacaaataaaatatacaataccgggggaattggaagttcagataaataacaagtttttagtttaagtatgttccaaatattgcatgacatggcacccagttctactttaaaaacaaacaagcaaacaaacaaattcacactcctactttaatgaacaaaaatcttctaataaggaggtcacacacacaggattacaggcacaacccccacacacaaacacacacacacatttaccttagagcagagtccaggacacaccaacacacatgatcctcagtccttttaatttaaagcacgttcaacccttctcagagtggccttgagtggttgcctccatgagtctgcagatgcgaaaaggaagttggttccgggccctaatcagaggcttcctgtcaggacaaggttctggcatcagcattacctgctgcaactctgaagggcagggtgggagcctgctatgggactgccccctccaaggtgtgagcctgttaattccagggtcagcttacccaacatctgcagtccctcagctggaggcctgagctcttaatgcccctgcctcccttctgccctgggcctgctctcagctgccacaagagggcgccgaagaaagggcctgaggagatgcaggagctcctctgcaggtcctcccaggcaccaccccttctgggaggaaggcttgggagtcccctaagacacatcttcagtcacttctctctgcctgtgtctcaggaaaccagctcctcctactgtcttctgtgctagggatcacttccttgttgagtggggcctgagttttaagaggatcttctgctcctcttcatctggtccgtttccttccaaggcccccgagaggaaggcatgcggtgggccctact

SEQ ID NO: 38045 - DNA, 2300 bp, Homo sapien
gttgaagatatttctcctcatttgttattatttacatttggcaccttttggagaattgaactttgaaaaaaacaaaatctatcaatttttctatggtgtctactttgatgtcaggtttagaaaggccaatctcacctagaatttctatgcaattcatcatcatttaagtctaatgattttctttttattacaactaaatcactatttgtaactggtaaggtagaaatgcagcaatatttgtttccatatggtaagtcaatatccaaaagagaacttatgaaataattgactatttccttgtggatattaacatatcactttatcacatgataaaatattacatacatgcagctttctttctggattttccactgtgttccatgaatcttgtcattctagtgccagtattgccttctcttcagcactgtagctttatagttcttttcacattctgatgaagtttctctcattatctttttgttttaagaattttctgtgcatgctagtgtgatctcaatcctctcccttcccatttttaaaccgtgagacttctgtccagcaagactttttcacgctccaaggcaggcaagcttccctccttcacaaggacctgagaattcagctttcagagctgttcctgtggaagcctcatgtcctgcacatatggtccagaggcagagggagaccaaccggagccccctccctttctcattcccagctgtgatgacagcaaaaactgaactctgtgagctaggccaacaacacaattaagagagacattgttctacatctcattatgcatctttcaaacatgtgtctctatatacttctgacacaggtggtggtaatctgtgtatgccttactgaattttcacaattatattactgtactacttttgtcccctatatttccatctgtgaatccaggtgtactgcagatctcagtcccctttctgagggtagggctgacaaataaaatatacaataccaaacaatttggaagttcagataaacaacaagtttttagtttaagtatgttccaaatattgcatgacatggcaccctgaactacttagaaaaaaaaaacaaaaaaacctcacactcctacttcagtgaacaaaaatcctctaataaagagatcacacccacaggatcacacacacacaaacacacacacacacacacaccccacatacacccatttatcttagagcagagtccaagacccaccaacacacatgatcctcagtcctttcatttttattatttatttatttatttatatttattatactttaagtgctagggtacatatgcacaacgtgcaggtttgttacatatgtatacatgtgccatgttggtttgttgcacccatcaacttgtcatctacattaggtatatctcttaatgctatccctcccccctccccccaccccactacaggccccagtgtgtgatgttcccccactctgtgtccaagtgttctccttgttcaattcccacctacgagtgagaacatgcactgtttggatttctgtccttggaatagtttgctcggaatgatggtttccagcttcatccatgtccttacaaaggacatgaacgcatccctttttatggccgcatagtattccatggtgtatatgtgccacattttcttaatccagtctatcattgatggacatttgggttggttccaagtctctgctatcgtgaatagtgccacaataaacatatgctttgcgtggtgcctccaagtgtcctcgcagatgccaaaaggaaggtggttcagttccctaatcagagacttcctggcaggacaaggtcctggcatcagcattagctgctgcaactctgaagggcagggtgtgagcctgctgtgggactgccccctcctagggctgggcctgctgactccagggtctgcttcccccacctctgcactccctctgctgcaggcctgagctctccttgcccctggctctcttctgcagagggcctgctctcagctgccacaagagggcgccggagaacggacctgagcagagaggcaggggctcctctgcaggtcctcccaggcaccaacccttctgggagggaggaaggcttgggagtcctcttagacagatcctcagtcacttccctctgcttgtgtctcaggaagaccacctcctcctactgtcttctgtgctagggatcacttccttgttgagtggaacctgagttttaagaggatcttctgctcctcttcatctggtccctttccttccaaggccccagagaggaaggcatgcagtggg

SEQ ID NO: 38046 - DNA, 2300 bp, Homo sapien
agccaagtttcataaggaaattgcggtggtgagtcatgacgataatttttgcatatggaatataaagtaaaggaaggtttattttggaagcaaatgaaatgggatagaattatccaaagaattcacccttttgtatgtttcttttagcagtgtgttattaccctcgataacatttctacggtttttcatagtgatcacatagttctttgtatcttttgaagattttgccacagttttacagtgttgtttcttttaccaggcagtttataaagttggaattcccagtggtattttaggctaatgaaaaattgctctcaaagtatttagataatcaactctgttgttgattgctttttgttgttgttgttcaaaagggtggagtcaatgtaaacagtaagcttttgttttctgccctgtactctggttaataaatatatacatatatatttagtttactcgtgtttcgtttgtttcagttttgacatagattttaaatttgaaccgtatacagaatttcagttatcctgaggccatccaagctatcataaaatttatagcttctcaataagcaatttctttcttggggagaatagcctgaattggcaccagaatgacatgtgactaatagacaagtggcctctgtccccttagctttgccacaaactgtatgaagtgatgacaaaactgggtgaccagcacgccgacaaggccttcaccatccaaggagcgcccaggtaggcccctgctcattggagcacctgtaatgtcctgcttgctaaaatttcttcaatctgtggaccagcctgtactattttatttatcctacaaaagtcccacaggagccttttcaccctagaagctgacactaattttatttttgtgcttttacatttatgtctggccttcagtgacccaactaggattcttcttcttgtcacaacagcattgactttctgcctctctgcctctctctgctttccatgaggcctgatagcaacagtgtgaaattttaatatataatgtatatgcttgttgtaatatataatttgttatgcacttaatattttctccggagaagaaaggaattcccaaagtttatgacagtttgtcttgattgttatcattgatgctgacgtctttcatgaatccattttgggaaaggaaagaggaagtaggtgagatctcatcttcctcttacctcctgactcttgatctggtgaacactgtgctgtttttgttttattgcacgttgcattatgagtatgccagtcaaataccccggagccccaatgatccataggtgacctgtctaccttgccagggttcggctgcacaccagctttctccagtgattctggaatcctttttattccatccttcgtagactttacgtactcagagattgaaggctagtgagctgggagtcagaagacccagctttcggttttctgattttgcagttaacttgctttgccttccttgagtaagttcaaaacctctctggttagaggtctcattttttttaattcaatagaaaaaaaaagatactattgaactacatggtttccaaggtaatatacagtcctgacattctatatttgccattttaatacaaacacttatttgcatacatttatgaaaacacacatagtcatacacatgaaccaacttctacatatgttaatgtttggatccctctagagattgttaattttcttattccctgctctttggattagccctacttataggttctgctatggtttctatactatgtaagcagtagtatatcttctctttctaagggaaagaatattgcctgaaagaatacataagagaggcagagttactgttttcagtatggttatttcagtatggggctaggcacgaaggaagaattggaatgggaatatcagaatgatatttgagtgttttaaaaatgaagtgcatgaaaaaatttagggttgttcccttacatggaaatgaaagggacaaattcatctgaaaattgtaatgttgccaaatgagatacagtgaagaaaaagcggggccatgaccacttaatgaatgttcctttcactttttttcaacattcctctgcagaatgaggtggtgagtgagctcagtggcatctctattaagcttagattggggctatgtttccatctgaggccatgattgctggcatatgaccccaatcatgtggcatgtctgtgttctcgctaaaggacccagtttcctcagccctttgaatatgtagaccatgctgctgtgtacatgctcttttattttggggtaca

SEQ ID NO: 38047 - DNA, 2300 bp, Homo sapien
agggtgggtctgcctttctaagcccactgactcaaatgttaatctccttcggcaacaccctcatagacatacccaggatcaatactttgtatccttcaattcaatcaagttgacactcagtataaccattacagccccaaaggcccctgtttgagggaggtgactcaaattcctggtttctgagcatagcctttttcattgaatgttgaccaagtggtggatttttttttatctctctgaaataaacctctgtttacttggagtgttataagtaggactcatccaaatttgctcagaactttcccactgttagcactaagagtcctgtgtcctggaaattccttaattcctaaggaaactggggcagatatttatcctagggaaataagagccaagcacatagaccaggtgttccaggtacctactgttttataataaagcattataaaagtgatcgactcataaaaactgttttgtttgctcacattctgcactctggctgggattagctgagtggttcttctgctggtcttgctgatggttgcttgtgtggctgcagccagccagtgaactgattggagaatgggctcagctgggacatcttggctgctctctctctctctctctctctctgcgtaatctcagggcctctccctttctgtatggcctctccttgttattttattttattttatttttgcagcagggtagctgaattagctgaatttcctatatggtgtcacaggaatccccagagggcaaaacttgcctggtttctaggttgggtgggtgggggggggactggaattaccatggcgtcactttcaccacatcttattgattaaagctggccatagcatcattctagaatcaaggtgaggggactacagggtgacacaagagtgaacaccaggtggcagctcgctgaggtctaccaatgtaacagtttcccccagaggtacagtaggatgctcacctggactcataggattcactgtgagtgaccacttctgacctctgtttgcagggcaccacctgacttcttctcctcacactctcagtgagaatggaatatgaatagtttgaccactggtcagagccaacaagagctctaggtgtagggcaggtttatccctattattcgtacttctcccaagcattaataagaataatagggatggtgagtccctgttaaggttgccaaaaggtttccaaggaagcaacaagttaggggggactgggtcttccatggttgatgcgaagctataagggacttgactgttccatgcaccatttcttgaagagtagtctattctaaggtttctgcccagcacaggaattttggagatgaccaaaacacatcgcctgtcttccggaagctgacctttctcaacgcggacctccccgccctgctaactcttgttttaaagtttaaacaagtgtcagcgatggtctctccccgctttgctctccacacgcctctctcctgcagctctgacttcgttggtttcccagccagggcccctcactgggctgtgagcctcctgagggtagggcgacctccataccttcttctgcaacacccagggtgtatggaggggcctctgttagctggaaacttttgggagcagcaagggaccagccccatcagctccacttcagagcagttccaatccagctggcttccacatccctagggttcttcccttttttgtctcccctatttctttttttgctggaaagaatcaggtcccctcactctccccaaatacaaactgcattaaaagaacccccgagctgcccctgggcccagggacttctgctaggcttggttccctttctcctctcgaaactcttctatcatcgaggagacaatctggcttctggcttttccctctctttttcttggcctctttctctttcttcccccgccccttctccccatgtcacagccagtcccgacgcatcccgcccccgctctgtcgctttaagctggtcccgccgccgcgccccgccctcacccctccgcgctccgcggctccccgccgcttctcccgctcctcccttgctcggccctctcctcctcctcccgctcctcctcccgctcctccgcgccgccgccagccccgctgcgcgctctgctcttcgcagctccccggacccgcagccatggccgacatcaagacgggcatcttcgccaagaacgtccagaagcgactcaaccgcgcgcaggaaaaggtcagcggcgggcggccggggctggggccggggacgccaggcgggggcttggccggagggca

SEQ ID NO: 38048 - DNA, 2300 bp, Homo sapien
aactcagccagccatgggtcaggctgcttgcaggacctgggtctccataatgcaaagtccatgtaggcacctgctatttcttgatcctgccaccagtgtcattctgtggtgaggaactgagctcctttcttttcttggcttccccagattcttaagtgctattctccaaattgaagggaccttagaaagatcttcaaaaattcctgtgctttctcttccctcactgcctgcaacatgctctatggaactatatgttgactcttccctcaacctggtcaaaagtaaacaatctattggctgttgtttacaatcagtgtgatatggtttggctgtgtcccacccaaatcttatcttaaattgtagctcccacaattcccacatgtcatgggagggacctggtgggaggtaattgaatcatgggggtgggtctttcctttgctgttctcatggtaataagtctcataagatctgatagttttataaaggggagttcccctgcaaatgcactcttgcctgccaccatgtaagatgtgcctttgctcctcctttgccttttgccatgattatgaggcctctccagccacatggaactgtgagtttgttaaacctctttttctttgtaaattacgcagtctcaggtatatctttattagcggcatgagaacagactaatacacagtgagaatagagaacatacttgttttctgaatagacaaagttttctgaactatgaattaacatttttgttcatttaggtcattataaggaaggtgttacttttttatttcccagtaagttttctttcctagtttaaagataactcataaggagcaagagattttccagtatgaagagaggaataatgcagagcagttttcaaggagtcggaaggagcgaggagactctataaaccacattcttactctgaagtactttagagtttgagagaataagtagtttctacttgagataaaaaggaagcaatgtccttaagagaaatccaagttacaattaaaataaggagaggcaaggaactgtcaataaagaagcagtctatggaaaaagggaagtttgctaaaaatcatgtagctggacttccaaagcataactggaagttttatgcagcatgggaggaaaagggtgttgggccaagggagaaaattcagaatcttgtgatgatacaagcacaggagagaataggtgaccaaaggagactatgatttgaatggcattcaaagaaaccaggaatgttcagcagagagggttgctacttcagacaaaagagaggggagggcagcagcttccttcatcatctgatggagttaggcatctcaggtagtgagcaaggaagtccaaatctagtcactaggtgctcaggagtgggcagtcatcctaccagcttggaccctgtgtgtctggttccagtgaagattaagtcatcaaaccaagggagcacagggaccaagaggtaagctacaaaaactacagctcttctctgagacatcccctccaagatcctgtccagagacacaggaggaggcaatggtgctggtcagcgctttgtgccattttgtggcctctcctacctgccccctctttttggcccaagttcttgtcctgcctgcttacccacccactgcctgcctatggtccttccctctgtggtctttagtgtcctcactggtaaaatgaacataacgtctctaatcatgcatattcacgcagtgaggtagataatgtgaaagggctttgaacaatgtagtaagggaaagagactaggatactgacttcccattttcccaattcttgcttcagaactgctctcctaggccccaagcccctacctctgttagccccttgatcaatctttgcctgtccaggggcaaaactacgtaatatcccaagaacagggactaatattacagccccatttcttttctttgctatttcccatgatcactcttaaaccaagaaacagatcttttctctgattggtggggcctcctcactagaacaaaggggagaatgtacgtttcataatagggattctgtgatgaaatgacctaaggagataaatgtacatttcataataggcattctgtgatggaatgtcctgaggggataaaagctggagtcggtctcagcacatctcagttactcattttgactcgtttggacaagtgagttactacagcgctgatttggaaaaatgactagaaagctacctccaatttctcggcctcaaccccagcctcattttctttctgttccttcccgctctcgtcttccagccctccttc

SEQ ID NO: 38049 - DNA, 2300 bp, Homo sapien
cattaaatataaccatggcatatatcacagtaaaggccagtatggcaccgcagatactgtaccaagttctcctgctaaggaaatgtcagacaaccattccatatccagaccacagagcgataaaagggcagagtctcatttcttttgtccctcaccatgacaatagctaattccatatttcttgtgtgctattggtggttgtgtaattaaggcctgttattctagatttctttggggggctacttcaattctctgcattgcatcatcatgagagtaaagcaggaatagttgttttctatgtcctttaaaagttatacaagagaaaacttagcacacttagggattatatcagtaggactatgggtatcagatacaataagtgcacttgtatctttgcccatctcattgcaccctaggaggaggcttagggaatagagcatttttttcaaaagtcagttttctgctttgaagcttttgaagactgcaggaagggaatgagaggcacctttttttctcttttgctcagatgctactgctgcattgttcatgattggaaatctcaagattatctgcttcccaagcaaggctccacattgctaaccaccttaggaattcatttataaagcagtgatttctgacttacttaagccaggagacaggattatgggcagtagctctctgtgcgacaatgtaatcagtgcaatggtgaagtggtggcacagcccacactaacatggctcatcttccctgccaggcaatgtcttgtttctatatatataaatttgactcagcattcatgtgacagggcctccctgtcctttttgcactctgggaaacagcaccacatatccccgctaacacactgaccccagtgccagtggactggcggtggtgttcatcagacctctgcctggcacatgagttcagtctactgcttgtactgctccgttttgccttaggaagaagtgaacaggaagcctgaagattggtttcttaaggtgcatgtgtccatggttaggcgtcattgtgactagattcaacagcaataacaaacatcagcgcatttacagtctcagctgcagggcggctggtgctctatgtctgttataaaccaatccacttggaaacagcaacccaaggtgttaatgctcgtgggattggtgattaagtcttcctgtcttcagtagattgtggggtttttgtttacatttaatattaactaaacattgaattgttttttgacttctgagtactgtattgatagacttaatcttgcctgtgaggagaaagtgaattactgatttcctgtgaagttaactttttttcagacagctaaggtaaggaatcagttttgaaaactgtttcagaacacctgcattcttcttgatttttactttgtatttttgtttttgatgttaccagtttaggcagcatttcatttgaagagtcaacaaagaggagatgcagaatgtatggaaatgagtttagtgcccgctacttgagtttttaagaatatgtgcttgtcccaggactctaccctcttttgtgtaaaataatttttatgatctgggaagaccactcatctttttatttctgagccaaagcagataccaatgatgatattgacaactactgtcattaacatttctgtagttcttagtgtatgctaagttcattggttctgagtgatttcgtaatggcaactcgtttaattgtcacagtaactcaataaaatttttgtagataaactgagtctcagagagattagtgacttgcctaaggtcacagttggtacgtggcagagtcaggttttggggcccttctagagaaattatcggaatcctttgctctcccaaagggttttcctttccacttctccatcacctagaggttttccctgaagactgcttctcccccaacctgtccatgggaggtgtttagagctaaaaatagcaatgttagccaggtattgcttttctcattttaatgggtcacggcttatcttttgttccttttagtatttgcataagcttttcaagagagaccaccataaggggcagcgttaccatgaaaaacagatcagtctttatgctgaatatgatcgaccaaacttacttccctttctccgagacagtacccattgcccacttgaaaaggtaaggcacagactccccgacttgtacactttggatgaagaggttgtcattgatggtaagttgtttgtctttcttctctttctatctctgttcatctgtccctttccagggggaagactgttgctctcaaagaagtaggttttt

SEQ ID NO: 38050 - DNA, 2300 bp, Homo sapien
cgggaggcgaggttgcagtgagctgagattgtgccgctgcactgtagcctggtgacagagctagaatctgtctcaaaaaaaaaaaaaaaaaaagaaagaaagaaaatgaattctgaaatgtaaaagacttaaatataagaaataaagtaataaccatcatgcaaaaaaataggagactgtatatacaatatctggataaatatacctcataccctaaaaatagaaaagagctcttatagattgacaaaacaacaaacatgttaatagaaaaaaatgagtaagagaagtgaacaagcagtttacagaagatcaaattaattggtcaatagacttaagaaaaatggttaagtttattagtagtcagggaaatgaatcaatgaatattgattgttggcagaaaaaaaagtgaaaaaaaacccttctattgctaatagaggtacgtgggaaaaaggattatcttaccttagaggtatgatttttttcccccataatgttgctaatgtgatggcacaaatggtttccattcagtgagaaacatgttgtaatggaaacttcgtttatttgcacttggaatgctattgtgtgacatacatagcccttagtagcactgtggctttagaccactcacataaattcttgaagcctcattttcctcattgtgagatggagataaccagccttagctgactgctttcctctggggttgaataacagatcttgtgtatgccaggtctttgcaaatgatataatgtgatttacagaatattaggataggccatgagcttttcaataccagagtccaagaacaaattacataaacgtgtatatagaaggaaaatctactaagtgtaacttgcagtaaagaagagctttgtaaagaaggcttgatgtcttagttactttcattattggatctcagttttctgagcacagaacaacgctctccagtagaacttactgcagtgatgatgttctgtgatctgtatgctttccagtactagtcacatgtagtcgttgaacacttggcatgtgttagtgcagcagaggatctgatttatcgaattttaatttaactttcagttttaaaggctgcatgtggacagtaccatattggacaggaaacctaggctgcacacacttactaaattataatttgaggcagcttacaaccagatgccaaagaaattacaatcagaggtaggtgcagtttatatttgccaagactaaaatcgatatttaaaaaaatgtagtttgatgaactcaagatctgaataagtaaactattaacagaagatattcaatttgaggaaggaatttattcaaagactatagaagttgaacatttagacttctcagccggaagtccagacatgctggcctaggtgctttcccagatcagcttttgctttctttgtagattccttgctgccagtgcagtattcttcactcctcccaggttgtagccctggctcctctcttttctctgttttgattccctgctatgagcttcagtttattcttctacaaaatggatcaaatatctatcttcaaggaacctttactcttctgacattctaggaactttaaggagctagctgatttttcatggactgcatttcaggggtgtcgctcatgtggtgatttagggatcaagatgagaaaggattttgtagccaggagtctcatcctccatgtcaaaatgtctttccatagcatcaatcagtgggtggcctttttgaggtctgggagccttggtctgccctgacctttgcctacttgatctgagatatttttcagttgaagatcccacattcaactttgcatatttccatttattttatcatcaagccaaaccattttaaggctaaatattttttaaaaactactctgcaagctcatgttgtagctgccgtaggcttacttttcttctcatagtttctactgtgctttgtgtaagatagttggaaactgtcattatttaagaagaaaacaaagagcttactattttacaaagagcaaagacattgattgttgatatatattttcctgaagttttacacatctttttgtctttttctttttagagtcctgtgaagataaatcagattagcttggatgaaagtggagagcacatgggtgtgtgttcagaggatggcaaggtatggcaaagatgtggtcatgcagagagttctgtggcgccagccccaggtgatcggaacagcaccttgcttactatataactgcattaagacaatcttgattattctttctgagtattgaacttgcttctgattggtcat

SEQ ID NO: 38051 - DNA, 2300 bp, Homo sapien
cccacaggtgaagacttctgtaagaatttgagtttgcagtctctgcctagtgtgtctcatcagtcttataatcttccataggcagagcacttattactctacaagtcgtttttcttttgcctaattttctttttactatgatgcaccttaggtgtgactttatatttatcctgcttattgcagagcttcttgagtttgtaggttgatgtcttatcagttttggaaaattctgttgttatctctttaaatgttgctcttgttcctttccatttttccttatccttctgggactgtaatgaaaagtatgttagagcttttcactgtgttctacatgcctcatagattcctttacatattttccttccatttattcttctctggagttccctttggatatttttttttactcatttcacttattttgtcttctgttttgctaatcttatattaaaccatctattgacttcttaattcagttaacattttcagtgtaaaaaatttcatttgattcttttttttttttttaacagattagaattctgttgaaaatttctatcttttcatcagctttctgtctttttctgtttttttttttttttttttttttttgaacatatagtcatagttattttaaagccctgctaacttcaatgtctaggtcacccatttgtttatttttatggtcttttttcatcctgatttttggtcatttggtcccgtcttatggcatacctggtaatattttattgaatccttagtactgtacatgaaaaattgtagaggccccagtagttttctttctctgaagaggagtcaccctttccttcactagacagttatgttgggggttatataccttactccaatcaaagattgagctgagtcagaactctaagggagttaagtttttgtgtcctctggggaccaggggttccaactaagactgtgatattcaccaggatccaatttcccgatgcctcttgaactcttattcttatctttttaacacatcaaggcagctggtttgcatttttctttctgttcagctttttagcttcatcctttgcagctttagaaattgacagttgtcttacagggaaaagtagctgtgtaacaagctcatgtctctgcctctcttccactgatatcttagccccgcaggtctctctccagttttgtcactccatccccgcaagtgccagaaggtgtgctgctttccctacccccggcagtggctgtcttcccaggcagagcttgggttctcagcctcttgtcctacacccagaattagtaaatgcctccaggaagaaagtggctgtagaatgccagctcaattctctgctgccctggaatcttgatccttctagttgaggttgcctcagcagccctttgatgccttggatagatgttgttatatattccatcaagactttctggttatttgtggtgggagcactgatgtcctcaagctactctaatattagctggagggtgaagactatgcaattatggtggtttgaatggttttttgactctacaaaccacggtaattccatagtcttcaccctctagctaatgtcaatgagtagattatttttatgaacttctgttttggctagttttatgccatcacagttctccatatgtaaactttttgtttcctattacttattgaagtaaaataaaatcttactctgaatcattattataataatttttacaactctccttgatttattaattcaaggccattatagtaaatattgattactaactttattccataactgtgaggattaagaatagtttatgaagccgtaccaaatagtaaggttgaacatgtaaagttagtgacaatataacaccaagtctgtatactcttgttttcaacttttgaatttattttaccagtgaagttacagcaattgatatacctaggcaagatgaaatatgaagattttaacctttagctgtagttggaattattaacatcattgaaggaaccatctctggttctctcgtaagaagtgtgttttgaggttttcaaaacaaataaatctctgacgggtgtcatttttctttgccgtttgtgcaggaagaagagagcgaagaggaacccaagctgaagtatgaaaggctttccaatggggtaactgaaatacttcagaaggatgcagctagctgcatgacagtccatgacaaggtaagatagcactttcagaggattcttctgtaaattgtttccattgtaaatttgcttgtgctttggagtcctgatgtttttggtggtggctttttac

SEQ ID NO: 38052 - DNA, 2300 bp, Homo sapien
aatgcggaacaaacttggggaattgagagtttctacggttaaatgagcagaggaaaacctataaagtctggctatatctttaataagacccataacacccttcttgagaaagagaataaacattctcattccagaaaagtagaaaggccaggaaggcccagagtggatggccttcagctttgcttgcttgggctgcttgacttctcaccaaaataaaatggaaccataaaacaaaaatgaccttgtggttaagacagtggtaataatcccttattttccttcttcatcccaatctcatccattcagcatagaagaggagattgcccagttggagaggctgtagtcctagaggtttatgggtggctgtcactcataacagaaaagagaaaattggagtttgtgaggaaagtcagaaaagtggaagagctcattttatttctctttcccgtggatactcgactgagggcttccacagtctctttggtctgtattaaagtttttctgggatctggagttcatcatgagcaatgtttggccctgggctgctttgcaagagattttagaaactcttgggttaggtttatacttgccctaggtttatacttagggcattgggtgcttgcttatggatttcttttttcttttttcttttttttcagatagggtctcactctgttgcccaggctggagtgcagtggcaccatcaatgctcactgcagccttaacccccacctcagcctcctgagtagctggaactacaggcgcacaccattatgcccggctaatttttggtattttttgtagagacagggttttgccatgttgtccaggatggtctcaaactcttgagctcatgaaatctgactgccttggcctcccaaagtgctgggattacaggtgaaagccactgcacctggctgcttatagacatttaaatgcctcagggtggtctatcctgtcggctgagtgattagcccactggaagaggaaccccagcaaggcttggaggaagaagatggaggtaaggctgtttaggccctggggagaagacaggtgtctcagagatgatgtcaccttggcttctgggccattgaggaatcatgggttgagcaagctacagacagagtactgagtccatgacttcctactgggtcagagtcaatgaggcacagggagtcaaaaaaggtactgaggcaatcaccacatgctgccatttgcaatgccctctgctggtcaccagctactccagtgaatggaaattgtaaaatgtctgtctttggacaaggtgctgcagattcctgagggttaagaaacagaattcataatgttcagaaacatggagaaggaatcagtcattctgaaggctggaagtaatacagtggttgtgcagattttgaccaaggacaacttcatattgtgtcttcacttgaacatttacctattgaatatcctcaacaaaagtttaacaattaatttattaaacaacagagattttttttaaatcaatgttcatatgacaggagaagacaaagtagcaagcaaaaataatgatattatttgttggcgtataaattttctctgactctccactgcaaagactgctttatattcactgaatatacttaaaaaagagagagaaaaaaggacaagaacacttttagagtaagcagcatttggcaatcacagagactttggcatcaggcagggctgaattctattactagttctgcctcttactagctgcatgacctctgagctacggtattctcccctataaatggggatgatagtaggaattgctgtgaggattaaatgagataatttatgcaaagctataaacccagggcatgacatagtaagtgcttaataaacactagaataactagagaaacaagaacaacaataaaataagctatagtattagcaatggttatgttcacatccttcaaagcagaattccattgagtttggagaattggcagcagaaatgaaccctagcaggtccgtcccctagaagagatttccaggctcagatgaagctaaaactacatttcccagaaggccctgggccaagtgtgtggtttcctcttatttccgggtctgtcaggtgactctcccgtggcgccatggcggaagcagaggagcaggtaaagggtgcaggtggtagttgagggcacagggatatagagactagggtgggctgtttggggagggtggagtggagtgggtggaggtgcggagctgctggaatagcgcaaggcaggtccgcggcagggcggggtgggatggcgaaagttggt

SEQ ID NO: 38053 - DNA, 2300 bp, Homo sapien
ggactaaaaagtaaaataggagaagtagttgtattaacagtaataaaaatatactgaaaatcagggctgccaattattggtccacctgctgtgctccgggccctgcaagagatcctggcatttgtcttctcgttaatgtgatgccgccctgatttgctataggacttgccctttcctgaggattctaacatgtgaaaagacacaatggccaggctctcagcacatatgatgtctaatgcccttcaaccctttcttgtttttggtctgtgccctgatggttttccatctcatctgtggcagatgagattcaaggtgagagaaagaacaaaccctataaggtaattctgtcactcacctcatcttcataatcttccctgagcttcctctgctgctcaccctggtattgatcgtgtcactggctatagcagaccaaggcagggggctgcaaacctttcctcacaaccctcgccagtgcgcctgtttcagctccaagaagaaaagcctgctgtgaaaacaatcagtgcatttgctttagatctaagtgattccaactaggtcgatgcttcatgctgatgtgttgaaaacatttaaaaaatttctcagagtttgatttccacgggaacattgtggcatgtgtctcagtgtctacagttgttatttttcacgaatgcagccgacaactgcttcctgccacagcacacaaaagcagtaggaaaacggaggcttttgtctggatggatatttactataaatgctttctggggaaagggagaaacctgtgtgtgtgtgtgtgtgtgtgtgtgtgtgtttatgttgtgtgttgtgtttgcgtgtgtgcgtgcaggcatgtgtgcacgtgtatgtaggttgggttgatagccgcacgctatcttgacctgccgtcaaagaggtttttgttttagtttttgtttttttcactcctgaagtgagtaagatccaatgttgatagggtataaatgcaagagaatggactactgtctggtttgggtttgagttttgagatttcctttgttttggcactgactttcctagacaaataattcataataatgccaagagttgctttatcttctaaaggatctaacagatctctgcaagtttatgtttatatccagaaacaattggaccttttcatcatattgtggcatgcagcagtaaaatggacattatgaaagggagctatcctcacacgaattcatatgtatttaatctctgacagagatccaggataatatttaattgtagaatctaagctaacaagttttccacctgaaaagtaatctctctaaagaaaaggaatgctgtgccagcatgtatgtggtgtattgtggtattggggggacatgataaggggtaaggggcccagtctaacagtgttggagtcaggggcatggacaagcatcttacacctgatcacatttttaagtccccattctagttaataatacagttgggccgggcgcggtggctcacacctgtaatcccagcactttgggaggccgaggcaggcagatcacctgaggtcaggagtttgaggccagcctggccaacatggtgacaccccatctctactaaaaatacaaaaattagccaggtgtggtggcacacacctgtaatcccagctactcaggagggtgaggcaggagaattgcttgaacctgggaggcggaggttgcagtgagctgagattgtgccactgcattccagcctgggtgacagagcaagactcagtctcaaaaaaataaaaaaaaatgtagagcctagaatttgttttaaaaatatagaacaatgtacctacaagccacaccttcaaaattacttctttatttagagataaagtcagagagctgacattagggcttcttattttcccatgtagctccacggaagatctgtggctaagtcagagtcagaacctagttgtttagtgttctgtctgccaagtcctgtaaaaagcatgtgtgtcatttcagctgagttttctttgcaatgtcatcatttaaataaaatgttggggttttcttctaggcatgaactctcttgggttgtgttaccctgtttgctgtttactgtcaagatgctgaaagaatgttcttataatgatccaagaggaagtggcaaatgagtgctcttcttcaggtattttgttgatttttcagaatgcctaccaataggaaatttccacaaatttataatctgtgagtttattgtataaaatcggagggaaataattgtcatgtttccttgagtcaaatgagtgagattcccttatgctctga

SEQ ID NO: 38054 - DNA, 2300 bp, Homo sapien
atataatatatatctatatataacatagatatatctataatgtagatctatataaaacatagatatatctatataaaacatagatatatctataatgtagatctatataaaacatagatatatctatataaaacatagatatattatatatataataatatataatatatctatataaaacatagatataatatatctatatataataatatatattagattatatattatatataatagatattatatctaatttacatataatatatatctattatatattatacataatatattatataatatatatctattattatatattataatatatattatatctattattatatatagatatttatagatatatctctatataatagataccatatctctagatataatatagatatatataatacagatatataatatatacataaaatcagacctacacataccattaatagccatctttttttaaaagaggaaataaattctaagaataagaaattgttaggcattgatatatttttaaaattctgctcccgaacaaaacagaatattctaacagagttactgacataatttttttaaatccataagcaagatgataaatattctcagtggtcatctgaatggagaccacgaggaggaagacgatcatttatggtgtaccatccttctgcccaaaggctcttgtctccaactaatagaggagtcaacagcagtagcaagaaggaaggcacagcttcatggaaacggttccacttttgccaaaaggaaactaagaagtaggaggcgccatcatttattacaccaaggatgtatttgtatagtcaactgtgaaaaagagctctccagcatttgtgagagaatgatctgcaggacctttgacattaggaggaagtctggtggggagaaaacaggaaaaaaaaaatcttgcaattttctttccaggtctaagctgtctaagctatagcaacatgtggaggtgacaaaagaaaaaagataaattgacaaagaatgaaaaaaaattcagctttttctgaatccataagattccacacatatttcacaaggatttatcaggtgaattaagacttgccttgcacatagacgttcttaaaactaactcaacaatgttgtctttgtattacccaaggcgtaggagaaagatttaacattaaaaattgctaaacaacatctaacatgttatcatttctgtaaaattaattttatccccttctttttcagtatgttcaccttcatttttatagttatagcatctgctctcctgaaaacatgcttttccagttagctggaagagaccttcattcacctgccatttccacaccctgtctgaaacaatctcctgtgggaaatgttcatttaaagctgctttcctacactgccagcattgggttatgcctctctgaaggttctgctgctaaacattggcttttaagtaactactcaaagacactcccaagagatgtacagttcattgtttcataatgagtcgcttctcctagccagaaaagatatttccgccacatccatatttgattttctggaaaatctatagtaggctaagcttcacacatgagccagtaaaagcttattataagcctatggtttttctttttgcaactcatgaggactctctcattcctctgaagggaaaaaatctggaaacaaagtaacctgacaagctgagtacataaattaagtgcataaattctttacgaatagggctcttgctagtatatttaaagtaaaatagtgtttctacagcacacccaaggagttcatttttaaaatgaatgaaatgatgttggaaagatgacatattacaactatttcctccactcattgacttacagcagctccactcccttggtgtttatagacaaatgccgttaatagaaaggaagggaccatgtttaacataaatgctgccttctttatgctatggaacactgcaaaatatcattatcatgccggaatcaattgattatattatctccagcattctaaaagtctaaaactctacagaacaagacattctgaatagtcaccccatttttaaaaagtacctatctagggaggagccaagatggccgcataggaacagctccagtccacagctcccagcgtgagcgacgcagaagacgggtgatttctgcatttccatctgaggtaccgggttcttctcactagggagttccagacagtgggcgcaggtcagtgggtgcgcgcaccgtgcgcgagccgaagcagggcgaggcattgcc

SEQ ID NO: 38055 - DNA, 2300 bp, Homo sapien
cccagcactttgggaggctgacacaggaggatagcttgagctcagaagttggagaccagcctaggcaacatagtgagactcctgtctctacaaaaaaatcaaaaaattagccaggtgcagtggtacatgcctgtagtcctagctactcaagaggttgaggcaggaggatagctcaagcccaggagatcaaggatgcagtgagttgtgatctcaccactgcactccagcctgggtgacagagcaagacgctgttttaaaaaaaaaaaaaatagtcaatgcaatgaaatattattgatgtcctaatattgcaaaagtttgctttcctggtacaaaacctcttaaattattcttttgataaagtactaccaggttggtgcaaaagtaaaccccaattaattttgcaccaacctactagattctcttttggatatatattcacaagctaacttgaactttggggtttttctggtactatctttatgaagttacagtaaggctggcttcatgaaatgatttaaggagtttcttctttttctctcccctaaaatggtaaaaatagtttaagactccatcattccttaaagattgcaaaggacttaatgtgaaactcccaagtctccatgacatttttaatagtagatatttaatgtccaatttttctatggtaattagtctcttcatgaccctacttcttgggtcaattttcttagaaagtcattcatatctctcaggttttcgaatgtgttgcttttgagttttagttggtaattaatattttaatctccttctgcatcagtggttatctcatttctcattcttgtataattttgttctctttaaaaatctgggtcatgacaggattatctatcttattggtgttttcaaataatacaaaaaagaattggacttacttattcaagttttgaggttttctattttattgttatctttattgcttactaccattttgttcctaataaagatatatacatatatcttaatatatttacattaataaaatatacatatttgtagtttatatattttttatttgtgggatgccaaattctctctggagatttaaaattgtaacatgaaccaaccacccactcccacacacttatggttcttactgtgcttatttaaaaatttttttcatagcatttatttatgatcttctaacaaaccttatgctacttatatattgcttattgtttatcctgtcaattttacatgactataaagtcgacaagggttgggaacttccgtctgttcattgatgtatcccaaagcctggaatggtacctgacacaaggtaggtgttcaataaattgttagataaataaatcataatcacatgactcattttacccaggcaaagggcaaaacaggaatactacaggtattcattcattcaccaaaatagagttcagcatttactatgtgtcagaactgtcctggtgttgacacaagtccccacccttaccaaaccaactgtttactttagggcatatgaacaggaatgggaggcagaaggatatcgtgaatcaatgaaaaaatatattggctttacaaatgtactctatatttcttactaatctcaaattggctacagtacctcgcttttcgatcctattttcctttactccacaatcctaacagtttaaaatgtcggcttgtcaaatcctttaaatgcagaggagattccaaaagagacaaagtatttgggtggtaatcgcccatcgactttactacctttaatagtttaccaaagcgcgcgaatgtaaaacccagaccatggtaagactacggtggaaatggaaggtgtctcactgagggtcccggttgccttctgcaaaggtgaaggtcgtgccggccacgcgaggaaatctgcctcgctcacaactcacaggcacacatcaacactgccaaccgagggagcccaaaatcaccgcaagcgaaaggctccggcggcggccacgggccacagcccgcctccgcgcacacgcagcccctcccgagcctccactcgccgtcttcgccccgccttcggaccggaaggagttgttggcgcttccggtggcctgcgaccccgtaattgcctcggtgatgtcgtgggttcaagcagcctccttgatccagggccctggagacaaaggggacgtgtttgacgaagaagcagacgagtcgctcctggcgcagcgggaatggcagagtaacatgcaaagacgagtcaaagtaaacgtggtgtggacggcgcggggtgctgggttgtgggaagaggcgcggagttgtgaaga

SEQ ID NO: 38056 - DNA, 2300 bp, Homo sapien
gtcctggtattttacattttgaaaattcacagaaggttaatataaaacaaagtttgcattctactcaggaaaaagcatcttcttgtatatgttttaaatgtatctttggcatcatatacagaaagttcttaattaattttacagtctgtaatgcttgatgtttcaaaatcattaactatatatatatatatttattattatcattattttttgagatggagtcgcgctctgtcacccaggctggagtgcagtggcatgacctcagctcactgcaacctctgcctcccggattcaagtgattcttctgcctcagcctcccaagtagctgggactataggtgcacgccactatacccggctaatttttgtatttttagtagagatggggtttcgccacacatttttatattttaagatacaaacttcatattttcctgttctttcctaactgctaatattgtgtggtatcttacaggtagaaatcaacaggatggtacacttagtgtatttttactccttaaagagcatactccttaaagggcatacatagttttcaccttacaagaagggggaaaaccataaatacaatgaatcaactgaccattatgtagtagacaatttctgtaatgtccccttctttctaggctctgcggataggagaatccactagacttatagtagcataatgtacaagttttctttaaaggtctctcctttagaatataaaatattataccattgaagagtttggatgtgtaacctgtgatgccttagaaaaatatcctaagcacaaaataaacttttctaatcacttcaaaagattaaaaaaaccaaaaaacaaaaaacaaaacccagcattagcaatgtcttcacaaaaaggatatatggaaaattacacatctgggctcttgccaactgattggaatggtgtgggtgggtgaggagacagggcaaagcagagagaggaaattgtttaaaaaaaaaaggatgatgagaagtctggtttcagaaattttgcataatacctaaattcaactaacctgcaaaagctctgtgggtagtgatttcgttctgcatctctcacggtgccacagcatttaaaagatgctcaatacttattagtgtggccccagtctcacataaagcatttttgtaattgacaacatggtttttgggctaagcaaataccactctactgaaatattaaacagggcagattcccaactgcagctttagcggcaatttaatggttggcaaatatattaagtggatgtggacctcactatttggtcctcacccagaaatactgtaggctgcacacagaaattaagcttagtttcaatgaatagtgagacaaattagagatgaaaaagttacatctaacaaataaaaaagaaaccaactttaatattcccttacctagacaccagtattccacattagctttcccttattgtcctctgacagcatgctttagttcatcttttcaatatgtcttgattaacactactccttaactttaggctccctacccattcaagccacccatataaactgcgtacacgtcctttgacagccataataagtatagtgtatgtttctctccagctcctttccctgtgatcctcaacaaactgcaaactgttcaaagtctacacatagttaattttggtcggtcctcagtttctaacgcatcccgtaggcgctcaaagaatgcgtcttgttgttttacacgctttcaagtaaccatcgagaaatcctagcaagacgcgggtcggaccgggtccctagggataaagagagcagcgccgggccaggctggggccactctggacccagcttcttcacaactccgcgcctcttcccacaacccagcaccccgcgccgtccacaccacgtttactttgactcgtctttgcatgttactctgccattcccgctgcgccaggagcgactcgtctgcttcttcgtcaaacacgtcccctttgtctccagggccctggatcaaggaggctgcttgaacccacgacatcaccgaggcaattacggggtcgcaggccaccggaagcgccaacaactccttccggtccgaaggcggggcgaagacggcgagtggaggctcgggaggggctgcgtgtgcgcggaggcgggctgtggcccgtggccgccgccggagcctttcgcttgcggtgattttgggctccctcggttggcagtgttgatgtgtgcctgtgagttgtgagcgaggcagatttcctcgcgtggccggcacgaccttcacctttgcagaaggcaaccggg

SEQ ID NO: 38057 - DNA, 2300 bp, Homo sapien
acactcagcacagggtgtaagactcagcagacccagatcatgaaggacttgaatggcaggcttaagagtcattggagggtgggaatgcctgctatgagatgtccctcatgtactatccgagaggaccctgggtcaaggtcatgccaagaggcaaggccagcagcagacctttctctcttccttcagtccatgtgttatatcgatgagccaaaggtggcctctgtgtgtgggtccctaggttgttaatttcttcaccatgggctgagacctgttagctcaaaagcctgccagtgccacattcaaatttctacacatccagttattttttaaaatggtccaaagaagcatatttttagccacttagaggctgcctgctttgcataccctgcaaaacctcacacacatttgctagcaatagatacgacatagctttgtagttataagaccccaagctgctgcttccctttggagactccctgccatgctgctgagggacatcacctagacagggaagccccctctctggtcaccctctcccccaggagatgccttaaactctcccattctggaagatggctcccccatcttaaagctgtggatggtctcacgctatgaggaacttcccctcttatgcatccctatccaagcactgcccagtaaagcttctgtgtgcctgcctctagtgtttctatcttttttcttgatcagcctccaaacgcctgaaaccctgagaccttgtaagtctcaagcccatgtactccttcctggggacgagagattaggatacaccacttccagcccagccccgttctttctggaggaatccttgaagcagaaactgaaggtgaagagaacatacagagaggatgggacaggatggacaccaagctggggcctcaggaggcggcccaaagacctcagccccgagcactgcaaaggagcaggtttccagatatggtcagggcaccatcaagaatggataccctttctagggccatgtctggttataatctgttcactttgttcagtacaaacgatcacttccagagcagaggctggggtggagagtttggaatttaagttttaacacgtcctagagccagtctccttgagggcaggaaccttattctcttattcattactgcatccccaggccttggaaaaggacctggctcatagttggttcttattaattctgagaagggaaggaggaatgacttccttccggggaccctcctcaagctggactgagccaggtcctatgaccacctgcggaagagcaccgcagggtttggggccatctgcagcaagacaaggtgtcattcaggctccctgcagctcagctctagccaattctcctccttcccgccatgcacactgcaactagtggagcagttttccagggtggcacttccctttcccaccctcccccgttaggaaaagcccttcttctcctgagctcccatcgctgcctgaaccccactcggcctggccctgcagaagcgaaagccagggaccggatttctcctgaagtcttctctgccaacgacagttcctcttccactctcccccacccaagggccgctcctcttacagtagacagcggtgcctgcatcgaaatggaattcaggaggagcacgtgagggggaggggagaggtgcattttggaggaacttgataggaggtgccttgggacaccctggaggcgacgaagctgcgtctctcagactgccactcttactcctcgccctgtagcagaaccccaacccccggcctgagactccagggatcggctgagctcgcgggctaacgctgtgaagcctgcccagctaccgtgacgtcacgagacccccgctatctcgttggtggctatttcctctcccgctgtggtccctggagacgccggaggagatttccgtgacaacggcaagctggctgcaacgaagccgcccacgtaggcctccccggcctgctggaggagaggggatcccccggggcagaggcggctacacccggagaacccggaaaccggaagcgcagatcctgccggctctggactagccgctcagcaccagggcggaaggaagacgaggcgaggcaagcgccaagcttccatccggacttcaaggccagtggctgggtctggttttctcaacacggcctcctagtctccttcccgcttgggcatctgtttttcttatatagaccctgaagccgcccgtgatgttctgtaagcaggttccgcttcagaatcagaggtacttaagagggaacctggatgctagacctgcccttgctgc

SEQ ID NO: 38058 - DNA, 2300 bp, Homo sapien
gttttgttaaacagaacaatatgaagagatggcattgtaaaaaaaaaaacaaaaaaaacaaaaacaaaaaaaaaggcttggcagcagggcccatttgaatggttagtccttggctcccgtgttgatataggcagatccttcatgggaatttggaatgatcccaaatattgtagatcactggtacatcaagtcatcctcagggttgtctgtgtaacagtcttgaatgatattttgtgaatctttggagattctctgcatagggtttaatcatttagttatttcagtcgagcctgtttagtttctttgcaaggagataagaaatgtgaaagagatgcagacattgggaaatgccaggagccttgtttccccaccctctacttgggttctggaactggactcatcggtgagtagtgaggagctgggcccaagttcattaatcctagatctagctctgctttgtgctcgctccagttcttgtatcaaattcacttcaagccacgcagagtagtatgtagaggagtcattcaggactgtgcttatagttcattatatcaaatgggagatccagtaatttatagcctagtatttctggagtctggagatggctctgcataagctttgctgaagtagattttattacattagaagagaacctagctggctgcatcctacattggaagcttttagatgctaataaggaggtcatataaaggtcacaaaatgactctggaattcatttcccccgaaaaaagaataatgacattctgcattggcctcttttcatttccctttgattttgagtaataaattatctcctcacttcccagctgaacagtttgggagtctctattccctagaaagactctggtcacatacccatcagattaaattaggtgaaaactctttggccttaatgaatgttgaaggatttcaaacggctaatggaaattcttctagaagtaactgcaacctctgccttccagattcaagcaattttcctgcctcagcctcccaagtagctgggattacaggcatccaccaccacgcccagctaatttttttatttttagtagagacgaggtttcaccatgttggccaggttcgacctcaggtgatccacctgcctcggcctcccaaagtgctgggattacaggcatgatccactgtgcccagttaaactccagtttttcatgttccatgcataggtcagggtcttagggagtgattcattctagcagaactccctggattttaaggcaagtgttccatttattaattgacaaaggacgcatatttctcttctggtaacctaaagatttaggtcgttttcccagggactctgtttccactatgagagttcttggaaaactaagcaaaggatgaggaaaagtctgtgaacaagcttgcaggtctctccctgtcctacaaaagagcatacctcttctgtaaccagaagaccctttttttttttgattagtcaaggctggacagactgagatgagggtgtgtgtgggtgtgtgtatgttgagacagggtctcactctgtcacccaggctggagtgcagtggtgagatcagagctcactgcagcttccacttcctgggctcaagcaatcctcctatttcagcctccagagtagctgggactataggaatgtgttatcacacccagctcattttctaattttttgtagagatgaggtttcactgtgttgcccaggctggtctggaactcctggcctcaggggattctcctgccttagtctcccagtgggctgggattataggtatgagccaccttaactgacctgtgatgatttttcaacaatgtaatttctcttttacagagtcacctaagctgaagattcccttgagaacaagtactgtcctgtggtttcatggcctttcttccatttgtggttcttgccaagcggaatttaaatgacatcttatcaagatggataaaccctagtttcccagtgctggaatatagaaaatggatggacaagtaaatcccactcagcacccatagcccaggcatggggacctcaacacatttgagccgcagagatcacctttcattgtgaatagctctgagatgatacttctggttggtaagtgcccactggcaatagtttatataacagcaagtgaaggaataaatagtcaccaaaacattttctgtccctaattccagcataaattggattagatagttattttatgaagaatttcctatgccacagtcctgaccatatcttcaagtgaacagaaaaatttgattaaaaagtcaaccttctg

SEQ ID NO: 38059 - DNA, 2300 bp, Homo sapien
tttgcgataggccttggaaacaaagggagtcaccatccctacagaaaaatatatgaattagcctagtgtggtggcatgttcctgtagtcccagctacttgggaggctgagctgggaggatcacttgagcccagggaggctgagactgcagtgagtcatgatcaggcctctgcattccagcctgggtgacagagtgagaccctgtctcaaaacaacaaaaaagtagcagctaacatcaactgaccttttaccaggtgcctattgataccatagtttaatttcttataactttcttatttcacttaccaactctgtcttcagttactcccagatttttactgtgtttgtacagatgaccttttgtttagactgaattgtctccccagaagtaagattactgtgagtcatggcgaatggacattgtcattacccttgatgtaaattgacaaggttttgggtgcctcccagctataatcttagcactttgggaggctaagacaggaggattgcttgaggccaagagtttgaggaggcagtatggcagtatggtgagaccctgtctctattattttaaaaaattgacaagctttaccctggaaggcttatacacaatttaaacacccctcatagtataagaaagtgcccatttcactgcacctttgccagcacagggtattataattaagtcattttttgtttgattattttaaatagataaaagacctcatattactttgcttgtcacatttcaacatctttccttagcttattagctctatttcttttctgtctgtaaatggttgttgttgttttgttctttgagacagggtcttgctctgtcaccaggctggactgtagtggcataatcatgcctgactgcagccttgacctcccaggctcaaactttagcattccgagtagctgggactacaagtgtgcaccatcactcccagctaatttttttctttttttggatagagacagggtctcactgtgttgtccagaccggtctctagctcctggccttaagcaatcctcctgcattagcttctcaaattgctggaatttcaggcatgagccaccatgcctggcctgggctagtcctatattctctagagttctctttactttgtgctagccaatctctcattatgctgctcacctgttataatgaataattctctgtattaaattttaccactttaaacttttgagtggtttatgcttcctgattggactctgactaatatgttaggaagggtcccaggagataaacccacacagatgggatttgggcataggtttggtttcccagggggcagtgctgagctctttgccagtgggaaatgggatgctggtgatttccaggaagtgacctcacaatgactcaagctaccacttactgttgattgtgatgacatgccagctgaggcacatgccttgggagctaagtggttgctgcacttgaccactatgaagactggtgtgggaagggtcgttttggatgctcttgagcaggggtccccaacccctgagccatggagccgtaaggagccacacagcaggaggtgagtgtgtcgagtgagggagtgagggaagcttcgtctgtatttacaaccactcccctttgctcacattcccgcctgagctccaccttctcacatcagcagtagcattagattctcataggagaacgcaccctgttgtgaaccgtgcatgtgagggatctaggttgcgctgtccttatgagactctaatacctattgatctgtcactttctcccatcacgctcaggtgggaccatccagttgcaggaaaacgagcttaacacgcccactgattctacattatggtgagttctataattattttattatatattacagtgtactaatggaaataaagtgcctaataaatgtaatctgcttaaatcttttggcccagctcctacctcccggcagcctctccaggcccagaactttctccagtcggcctccacagaccaagctcatgactcacaatggcctatttaggcccataccctacctcacggcagtctccgcagatgaggctactgcctcacaacagcctccacaggcacagctccatcgttacaatggcctctttagacccagctcctgcctcccagccttctctctaggccctgaactttctcaagtcgacgtcaccaggcccagctcatgcttcttggcagcctctccaggcccagctcttcctcccggcggcctctgcaggcccagactgtcatcaagtcggcctgtccagggccagctcctgcct

SEQ ID NO: 38060 - DNA, 2300 bp, Homo sapien
ttaaagaaatatgaataattgaatttgtaaaaattgtactttggtaaataatagattgttaaatactaagagggtgtgtgggtgagaaaaggaatgtgctggaaaatgattatattgtgacagaaaaattatatttggctaagctttctcacaatacaggaaatttgaaatgtggtcagggtttatttggatgagtatgctttctgtgacttttaaattcatactaacatgacttttataatacttatgcctaaataaattcttatcatagtaatcatggactctccctggtgcgttttagttccaaaactgtacagcagatagcatatagtttcttttttttttttggacagttaatattttggtatcatatacttcttaggatagcactctttccctatttctatccttggttctgtaattagactaatactagaaattgtgaaaatttagttgagtattgtggtacgtgcctgcaatctcagctacttgggggttttaggtgggaggattttttgagccaaggaatttgagaccaaattggccaacatagcaacactgcttctctcatataaaaaaaaattgtggaaatttagaaatgtaaattttctttctccaaatgtacattataaagggattccattgtgttttctaagtcacttaattaagaacatacttaaaactcctcaaattgaagaatttggactaatgggctaggacatgctttgcccaaaataccaaccagttctagcagcagagactcttaataaccataaggtaaggctttgatttcagaatttttttgcatcatacttattaaagatttacactcaaaatctttgtatcacatttaaaaactccaaatgtaagaagtctttgtatttagttatttaaataatcactttaaagcccctgcattagtataagctactggaggttaggaaacacacctgtttatatcctggagtagctagaataaagtattgcctgtaagaagcattttaatattttgtaatgtgaatacttgaacagacaaaaggatttctatataatggaatgttacaattaacatgagatacatacctaataattaaatctatggcatttctaaagtatggcttaaatgtatagtccctttcaatgtttaggatgtataaattcagatgagttatattgggaaaatatgtcataaataagaaagaaatatgccatcaaataggaaagagggttacagtatactttgcagtatcgtccaactataagcttaggttaggatttgagatttaaaatttttaaactttttaaaccccaacccatgttctactaaatatatcttttcaagccatagattacactttagaattatgattactaattatttctccaagtggaaagtttatggaacatttctttttccatttctctctccctctctatagtaataatggtccatctttcaggtagttgtagatgaccatgtttaaatacttgaatgtattgttttatggtataaaattaagctcttagagaaatatttacagcaaactaattgtagagtattattagggatatattataaacaaaaatctctgttatatatctgtatttccccatgtacgttagcatacttgatgattttcctttgggtcctgcttgacaatgattgatgtatataaaaacttttaaatcatcaatcgggataatcatagctttgtttttttgtactagatcctttctccaacttttaactaccattctatatggtgtcaatgggaaattagaactattagtatgtttacaggggaatgagaaaaccatttgattttgaaaataggatttacatttctttcttacatcgtagtagtacctaaaaatgcctcataattctataatgacaaaagcttttcttacaatgtaaaactttaaaaattaatttttaaaaaggagtgttcttgcagaattttgaattgaggtcttagaatgaaatcttttcattcaatataaaatgtatatgaccataatattccaaaaatattagcatatattaaaacaagtatattttatatccttgaaacaaatgttgaaatatgtaattgagagggcggcggcggcggcggcggcgctggaggcgcagagggcggcgcaggcggagccgggcgggcgcgcgagcgagcggagagcgggcggccgtgcgggcggcggcggcacccccaggccgagccggcgccgaaggagttccagggcgatggggccgcggcccgggctgacgctttgacagctggaaagagcgcggagccagc

SEQ ID NO: 38061 - DNA, 2300 bp, Homo sapien
aaacctcttatttgctctctttgttctgttattccagtctatctaacgtaggacgatggaacaagttgatcctacatgtttctgaaaaagccacttgctaaacagtctttggtaggaggctggctacaggaccttcactcaacaatactgtcaaccagaaatttgttttaggaaccctgccccctatttttctattcagtttcccaatgcccatcccatggtgttgcccacccaggcctgccctcctgggaaatgctctgactttaagattacctattcctttgcctcctcctttatccttcagcaaaccaacatcctttgtactcggtcagtgaagtctgatcttagcttaaatcaggccagtctgtgatactgtgatgtcaaactgattaaaataatttacactaaggtattaacgatggatagataccaagtgtttaagaactaaaccaactgatgatctgaacaaatgaattttcaaaggggttactacatttagtcattgaacagacggcttagctttttcttttattagaggcagggcctcgccctgctgattggccaggctggggtgctgtggcacggtcatggctcactccagcctcgaactcttgagctccagagatcctcctgcctcagcctccggagtagctgggactacaggcgtgtgccactgcacagggttagcttgcgtttccaaccattctaaaagccaataagccatttacattttaatctaattatcccgagtgcttagtctgtaactgaagggcaattctaaggcaagaaatgagatgtgaggtcactatatggctatgtttggcaaccccaaaggtttagatatgaaggtgaaagtgggtgaagtactaagagggcagtcctcattcgcacaagatgtttttatttcaagcctcctgagaatttggaattttcagtagttccttttaacattccacttatttcctgtattgatttaaagctttaaaaatttttattttaaagtaaatagtgttaccgaagcttgagctgtgattcccaagtgtgttttttaggataagaaggggcctcgcggaagttgcggtgagccgagatcgcaccattgcactccagcctgggcaacgagagcgaaactcagtctcaaaaaaaaaaaaaaaaaaaatggggcctcgaactttggcgtacgtgagacaagttaaaccaacgccatctccaccctgttttgcggggtgttttctctcctttcgcagctgttccactcccagggcttgactgaaggtacacggggggtaactgcctactccagaaggccaccaacagcattatttccctcgcagtctccagaaacacttgttctcactgtgacctttcgctcaacaggcaggcagtgcggcgtctgcagagccggaaccggcactgcgcgctggacgcaagcaacaagcacgacaggcgcgccaccacgggcagagtctcaagcaacagcagtgggcggcacacgaatcctctcctttctttaacccttcttcacacggagtcccaccctcgccggaagccgagcggtttctacatcatgccacttccggtgcggcctgccggcccctggcgggagcgagcacgccagtgcgcggtaactttgttcccgcctctcttgccccggccacctctcatcttcggctttctctgagcgtgaattgcgggcgcgctcccggtcgtacgtcagggctgaggggaaaagccgaaagagcgaggcgagaaggaggggttgtggaggttagggcccaaccagcaagtcccgttgctctccctcctcctgacgaggagcggagagggaaggggaggagcgagccggggcaggccgcgcacaccaggagcctcctcgtggagggggggagcggaggaaaggggtagctccgccacctctgctggcggcggcggcggcggcgaaagaagaagaaagtcagggcccgtacctaccgccacagactcagaaacgcccctgcccccatctccccggaaatagccccccgcccagccccgcacagtcgctgccccaaccgagagccgcagcccggtcgcccccgcctcgccccgccccgctgcccagccccgcgggccgcagagtgcgcgaggccctaggccgggagttgttgtcaggcccaggccacttccgaggcgcctgcggtgtgtcgccgccaccacaggaggacgacgtcgacgccgaggaggaggcggtggaggcgtgttgttgtctcgcccactcccctcccctgaacttgcacccaacgtcagggcgcgatggagtg

SEQ ID NO: 38062 - DNA, 2300 bp, Homo sapien
atcttataagagactttaatgcagggactacagaggtgccgtggattaagggaacccataaggcatgtttttactagcagcagagaagcccaaagggccaggaaaaatacagtgttattggagtctcttgagagctgtgaagagggtgcctcacagcaaccatggcggtggagggatgcagcttcttccagaaaatgtggccatgaggagggagggagctaggaagaaataatccagcctttctctgcctccttctgtcagtggcagaacagccctggaactcagaaggcatatctgttggggtcagcatcattgggcacagagtagggcagaaaggtattgggagatagggcagttgtagtaagataataagcaacacaactactaatgagttcaggtgttgacttcaggtaacgtaatattttacccaatttcttatctgttaactatgcatactttactgggttgatgagggcattaaatgagataatgtgaaagtactatcataatgtctttgtcttgtgagtatattttaaaagtcttggtaatgcatggatttgaaaacctcagcttcctttcacttggtactgtgttaaatttgtgggaactttgcttgccactatacttttaaatatatgttttccaataatttttgagaagtgaatggcctcattattatcaagtagtttccaagatttagtttgtcattgttttatagagccagaagcctgaaaacctaagtcctagttcagactatactactatttgtggcatagttctttgtgggaattatttttactttgcctctctgtgcttttcctttctaagaaattgagtaataatacttaactagtaaatgtttaatattatggtaaaataatagttgtcaagtactttgaagacttaaatgatatgtatattaacttttttactctcattcattttgaaaagtatcagagcctcagattaagagtgattggatagtttttactttgttgcattttctgtgtgaaattatgtagctcataagctattatcttgtatatgtgtgtttacgtgagtaaagtgattatgcttatgtctattttagttactgtgtgtgaatgtaattttttaatttttttgaatggagccctccgcctcccaggttcaagtaattctcctgccctagcctcctgagtggctgggactacaggcgtgtgccaccatgccgggctaatttttatagttttagtagagacggggtttcattcactatgttggccaggctggtctcgaactcctgacctcgtgatccgcccgccttggcctcccaaagtgctgtgattacaggcgtgagacatcacgcctggctgtaaattttcttaaaactatctttctgaaacgaactctaagagactctacttattgcccagtagtaagtcttgtctttttcactcttgccatagacagagcactgcttacttctgaacttacagttgaggaaggtacttttgagatgtggcaactgtctcctggtaaaagatttgtcagactttaccctgctgctactactaccattgatgtagccttattgcctacttcttttttctgagacagcagtgatgccttgtcacatttttcgtcctaatttttacatttgtagaccagagcgagatcagggcaatccattttgaagaaaactatgatcaccaaataatactctactttaaagaaatttttatttttcaaaacttcaaaaatgtaactttgaaattaagtaaatttctattttatttcataaacttgaattagcactgtctttgtaaattccaaactgaacctttctcaattactgattaaatcttaattatttctcaccagacggtctggaaaatcccgaagcagaagcccgtattcatctaggcattcaagatctcgtagcaggcacagattgtctagatccagaagtcgtcattctagtatttctcctagcacactaactctgaagagtagcctggcagctgaattgaacaagaataaaaaagcacgagcagcagaggcagcaagagccgcagaagcagcgaaagctgcagaagcaactaaggctgctgaggctgctgccaaggctgcaaaagcttcaaacacttctacacctaccaaggggaacacggaaactagtgccagtgcatcacaaacaaaccatgtgaaggatgtgaagaaaattaaaattgaacatgcaccttctccctcaagtggtggaactttaaaaaatgacaaagcaaaaacaaagccacctcttcaggtaacgaaggtggaaa

SEQ ID NO: 38063 - DNA, 2300 bp, Homo sapien
cttcctctaccagccttttattgttaaaaattgtgaatttatggaaaggttgtaggaataagtttctaatgtattaattattctcattcttaggtgcattttatctggtgtttgaatatatggaccatgatctgatgggactactggaatcaggcttggttcattttaatgaaaatcacataaagtcatttatgagacagctcatggagggtctggattattgtcataagaagaactttttgcatagagatattaaatgttccaatatccttctaaataataggtatgggtatgaactttatatatatttaaaatgagttttaccatggacatgtacatggagagaatagactggaaaccgtagcggcggggaatgtcgggggtggtgagcgttgaaagttacctattaggtacagtgtccaacgtttgggtgatgggtaccccagaagcctaacccctactattacacttgtaatacccatgtcaccaacaaacacatatacccccgaatctaaaatttttaaaataaagatacggtgttacatgatgttgcaccttgattatgttaaaaaagatttaaaatttagtttactttatacaaactatgtaaaaataatcaggccagccacagtggctcacgcctgtaatcccagcaccttgagaagtagagacgggcggatcacttgagaccaggagttcatgaccagcctggccaacgttgatgaaaccctgtctctaccaaaaaaatagaaaagttagcctagcgtggtggagcatgcctgtgatgccagctacacaggaggctgaggcatgagaattgcttgaatctaggaggtggaggttgcagtgagctgagatcatgccactgtactccagcctaggtgacacagcgagactctggctcaaaaataaaaataaaaataatcaacaatattataacttgggatacctcaaaagttgtgttacatagctgttagtggccgggtggggcagctcagcctgtaatcccaacactttgggaggatgaggcagatggatcacttgaggccaggagttcaagaccagcctggccaacatggtgaaaccctgtctctactaaaaatacaaaaataaacccggtgtggtggcacacacccgtaatcccagctgctagaaagcctgaggaacgagaatcgcttgaatcccagaagtggagttgagtggagtcagtgagctgagatagtgccactgcactccagcctgggtgacaaagcaagcaagactcggtctcaaaaaaaaaaaaaaaaaaaaaaatctaataatagtctgtaatgcatataaaataatacttagttgacttttctgtttgctattattccaagtaatgtgaatggatcatctgataagcaatgtaacttcagctttaggttaagaatagattttagaaaattttaaaaaagcagtcacagttgtaaagtgaacttcttggaagtgtgtacacacacatacacattcacatatttaaaacttatgtaaataagcttagatttgtaacatcttatatttgaaccctgataattctcttgtaattggtactgtttgttaatttaaataaggcatggctggttctcattttaattaatagacagtgttctatgcacctagcccctctaaaactggagaattaaacaaattaaaagtgatgtcacttcgttcttgagcactgttaccttgaacaagaaatttgtcttactgctaagtaataaaaaggatctcattttattttcattgaagtatgcttttctaaataggaactgaatagtaataaaatactattctaatattataatacagtaattataataatcatattactataataattttaagactatccaaggatagtttactttcttgttttgtgaatttatccactacttgcctttccctgtattaccttgatgatattgcagtgtgagcagagttaaagtttacataggttttttttttttaatcagttctaggcatagaatataaatgtgtattgtcaattaagagtaaattaataccttttgttcattttgtcttatttccaccagagggcagataaaacttgcagactttggacttgctcgattgtatagctcagaagaaaggtaagcataccttcaaatgaatattgtagatactagagtttagtattagaagctatactaagaataccttattgatagttttattttttaaaagagaagtttacttttcatggttagtacataaaacattgaaattttataccatattgggttgattattgtaat

SEQ ID NO: 38064 - DNA, 2300 bp, Homo sapien
agctgccatagaagggaggagtaacagatttttagagggcagctatgagtatctgccacgaatggtgaggctgtttgctgagacagtaaagaagaacagagatgcattttttagcaaaaggtaataatgtaggtacttataggacttctaaatttgcttgtgtaataagaatgggcaagtaagacagctgatcttagatgacagcatcagttgggaaaaaattggttttgtttctctatagcactgtgatgatagaggaatttaaaagttatttttcttggaagatatcaaaaggagaaaaacaggagttcaaatagggggaaagaacatgagagaaaagattgtgtttattgttatgtagttatgttatatgaaagtattaataagttaggcaatgcatatgtagggtgaggaatttaaaatagctgagtgctacaaagcaaataaaataacgactatagtgtcaaagtaggggtggtagtggataattgggtaattttcgttaggggagttaagataggcctcttttaggaagtaaattggagctaagaccagagtgatgagaaagggaaaacttaatgaagacctgggccaagaacattccaagtacaaaggagaaggaactcagtacggcctgagaacagacttgggaggtttaaggtcaaaggttgcccagtgtaataggaggtaagatccttgctgtacagtcttatcaactgaagtaaagtttaaattttatttgattgcagtgggaaatcactgggcagttttaagcaagcagttgatacctggttttatgcttaataaaaaaactgaaaagaagttaagggtagctgggcatggtggtgcatgcctgtaatccaagctactccagaggcaggagaattgcttgaatccaggaggcagaggttgcagtgagccaagattgcaccactgaattccattcagggcaacagagcgagactctgtctcaaaaaaaataaataaaataataaaaacaaaaacgggcagggcgggcgggggggtgcaattagagatggaagccaggaaaccagttaagatattgttgtggtcataccagtgaaaagaataatggcttggactaggtatttggattggggatctattttggatgtagaattggcagaagttgtttggaaatttgagggaaagatgaatcaagaatgacacttggatttttgacattaaaagctgggtaggtgttagaaaatagatcccagatttcttttgtaggtttgatagatttttctgcaatggattgtgaatgtcttaaagatgacatggcattttgtgtatatgatgaatttagtttactgaagactctctttgtctcaaaacagtatgaattatagtataaaagaagtacatgggggggttgccttcaagcaggaagaaagaagtacagactttatcatatgttgttggaaaaatgaaacattttagagctggtttaggtatttcattttatatgatttttttcacttagaatggtctttaacaaaggcagcaaccctgctttataaattttaactgagattatctagaacccccaaatacttcaaggatctaggattttgttctgtttttctatatatatctagaccagtaggaggtggaaaacgtgccagccaaggggcacactccttatcacactgcttggtttgttgtggatacggtgcagcttatcaggccttaaggtagggaaggccataaccgtatctcatcttccctgccctccatctctggaattcctgggattgctttttgttttttgttttgttttgttttgttttttgagacagagtctcgctctgtcacccgggctggagtgcagtggcacgatgtcagctcactgcaacctctgcctccagggtttaagcaattctctgcctcagcctcccaattagctgggattacagatgcatgccaccacgcctggctaatttttgtattttcggtagagatggagttttaccatcttggccaggctggtcttgaatgcctgacctcgtgatccacccacctcggcctcccaaagtgctgggattacaggcatgagccactgcacccagccttcttgggattgttcagaggcaaagtattggaatctatcaatgaacagatagtctttgatctctactccgttgacacttccttgaatgtaaaaataatttttagagtgtggtactttttgttttataaaaagtatgtatcagtctgaatgtttgtttgcttcataaatcaaaacatttccatatttttgaaattacatcagtgtt

SEQ ID NO: 38065 - DNA, 2300 bp, Homo sapien
attaaaagacaaatgtccattatgtaaccaggaatgttaaatatatggaaacggtaaatctctaaaatgtggtaggtacttccagagctaaatgttgcaagttatcctacttttttctctaatatcaacaatacctgatacgatgaaaaataacaaaaagaccttactaattatccaatcaaagtcatcatctttgggtaaatttatatcaacacaacttaaagttttgtccaagatgttcctgacacatgaagcttccagttgaatttcagaaatgttaacaaaagtatcttccttttttgcctgtgaatgtttgagtattgctgtattgttggcttatatccactacagatactggttctaggccagcccaaggatcttcaagcattgaaggcttgaaataattttccaactcattagacattcttttttctctaacacgccctgatccaaatggtgtagatgtccttggagaaccctttagaaaaaaaatcagttaaaaaaacacttagtaaagataattggtacttcttcctttagctaaaggttagcgggaatcacattgctgcttaaaagttgtgacttgaacctaaataatgttcaattacaaagtccatgcttcctttaatcaagtgttcctattttttaaaaaaagtacttaaagcaattcgttattctcatttatttataattccatgaccactgtcatctcaaatacttttgtgtctaatgtagtaactttgcagtaattaaatacaagcagtgatgaaatcaagtaattatattcaattttccctcgaaattttcacttttttcaggagaaaacaatactatagttttaaagtttctagaacctttctagctcatgaacattttctttactccttagctccaggctcaaaaggggtagggggttggtgtagaatacagcaagttggaaaaccacgtagttgcaagttgtaaaccacagaaatcccagacatgctagagatactctctctgtcttttgtatttactctcactaaaggaatggaaaacttccactaccaccgattttcttttcagggaagttggagcagaagccagtgtagctcgaaagaaagataaaaaaaaaaaaaaaaaaaagaaaaagaactatttcttgaaacaaactggcaaggcctttggcaaacaggaggaaatggagaattaggaaaatctgtgtacgggtggcagtgtattggttaaaagcacgagggctcgaaaacagaacgtacggctctgccactctttcggataatcttccggaagtcactcaacttctctaagcctcagttcgctcatctgcaaaattgggctaacaatagtacctcagagaggattagacaaaataatccacgtaaagggaatattagtaccgtgcctgccataaagtaagagctcggcaaacgctggctattattattacctgggggtgggtctgctgctgccctggggagtagccgaattgctgctgggaccccgcgggggacctggagtaggagccagggtagccgccaggggacggagacccgaaccggccccccgggaagctgccgccgtgtcgcggagagtgactgctcccgtacggcctagaccggggcccgtacggcggcgtgtggtgcggactcccgtacccgtctcgaggggagggcggccgtggtccgcccccgcccggggttccccggaagctgcttccgctaccccaacctcctccacccggaccagggtaaggaggagttgggggccgaaaattctgtcgctgcatatcaggagccaaagccgaaaacctcgcagccgcgttctcccaccggaactgtatcaaccggccctccgcagagaactgctagtcctttaccaaaacagtcctccgaccgcagccaccctacggcacatcagttccggcgtcacaaaggttccgccaggggcggcgggattacctaaatcactgacttggcgagagactcagtggatttaagtgaaaagaggaagaaaaggagacaggaaaggacggacacccaagcccagcaacaacctttccagtctgagtgcccttggtctgaccgacagactagaagctggcccagcaggcgactagtgctcagccccgcccggcgggggcggggtctgcggcgtccgtgggcgccccccagtggcggcgggtggcgccgcacggagttcgccgcttgcaccgggaccgatgccatctgagacgcacgcgatgctggcgacgctggcgagggtggcagctctgcgcagaacctgcctcttctccggccggg

SEQ ID NO: 38066 - DNA, 2300 bp, Homo sapien
ggtcattttattcaataaatattcaaatgagcaattcccaagcattaagttaaacactaaagacaatgtccagaaaggtgaatttttggccaggacagaactactgtatttaataaagtggataggctggagtcctccgaccttaattgtatcactaagccttaatggcaacgtgctaccttgattaagtctatcacttgtatctacagaagaaacgaaatgtagtgaattgaatttccacagaataaacaaacaaaaaaactgtctgtgtgtgtctccattcatcaaggaggatagaagctgagaagataccacactcgtcagcttgggatgtcacagaacatgtcaaagagacagcgaggagtagcagctacaagagggtgaatggaaatcacaggtccaggctacccgttaggctatgatttaatgagtcctaaagctcttttaagattctgtatcctacgccaggcgcggtggctcacgcatgaaatcccagcacttcgggaggcagaggcaggcggatcacttgagcccaggaatttgagaccagcctggccaacatggtgaaacccgtctttactaaaaatacaaaaaaattagccgggcatgtggcacatgcctgtaatctcggctactctagaaagctgaggcaagagaatcgcttgaacccgcgaggcagaggttgtggtgaaccaagatcgcgccactgcactccagcctgggcgacagagcgagactgtctcaaaaaaaaaaaaaaaaatcctgcatcctgcaactaatttcaagattcatagtgggccgcgcgcataatcatagagattacgtctgtaatctcaacactttgggaggccgaggcgggaggataacttgaggtcaggaattcgagaccagcctggccaatatggcgaaaccccgtctctactaaaaatacaaaaattagttgggcgtggtggcgcatgcctataatcccagctactcggaaggctgaagcaggaaaatctcctgaacacgggaggaggaggttgcagtgagccgagatcgcgccactgcagtccagcctgggcgagacagcgagactccgtctcaaaaaaaagagaaaaaaagaaaaaaggaaaaaaaagattcatagtggattaccattcccaaattcagagggagtaaagaaagttctataacactgtagtaaagctaaatttcatcctctaaataaaattctgcaacaggtaactgtacaagggcatcttttattgtacatgaagtgtcaagttattcaaagcagcgggctaaagtcctttctgaaatgtggcttggtgtgcattttcgaagttacttaaacttggcggacgaaaggacaggagtaaagaggccccaaacgcgagccgcgggacgcgcaggagcgggaccccacggcgcacggagccctcggtcacaacaacgcacgggacagaggcgaccctgggcggccagagcggggcaggccggccgcaggcccacggaacggggttgcagggaggcgagcaaagccaccgctaaggggtcagcagagacttcagaccctaattgctctcctcagggcgcccgaggaggcaagctggggcagggatccctttagccacccagaccgaatctcggagggtacctgactgcgggcggccagtccacagccccctcccgccgccccggccggagaagaggcaggttctgcgcagagctgccaccctcgccagcgtcgccagcatcgcgtgcgtctcagatggcatcggtcccggtgcaagcggcgaactccgtgcggcgccacccgccgccactggggggcgcccacggacgccgcagaccccgcccccgccgggcggggctgagcactagtcgcctgctgggccagcttctagtctgtcggtcagaccaagggcactcagactggaaaggttgttgctgggcttgggtgtccgtcctttcctgtctccttttcttcctcttttcacttaaatccactgagtctctcgccaagtcagtgatttaggtaatcccgccgcccctggcggaacctttgtgacgccggaactgatgtgccgtagggtggctgcggtcggaggactgttttggtaaaggactagcagttctctgcggagggccggttgatacagttccggtgggagaacgcggctgcgaggttttcggctttggctcctgatatgcagcgacagaattttcggcccccaactcctccttaccctggtccgggtggaggaggttggggtagcggaagcagcttccggggaaccccgggcgggggcggacca

SEQ ID NO: 38067 - DNA, 2300 bp, Homo sapien
cttgaatatagaggccccaaggaaagagctcagtgagggcctccgggtaacaaggtggttattaggcaatacactcaagtcaattattgcatgtttacttaaaaactcaatacaaaaatataaaatatgatacttcccttcaataaatagataagaagacatggattgggtgtccgaagataggaaaggatgaataggaagagccagcgggtttttaggggaatgaaactattttgtatgataatacactgatggatatgatacatgtcattatacactgttttaaatccatagcatgtacaacacaaagagtgagttctaatgtaaacaatggagtttgggatgataaggatgggtcaatgtaggttcactgattattgcaaatgtacaactctgggggtgggggaatgctgatgacgggacactatggatatgtgggcacgtggtatatatgagaaattctgtatctgctgctcaatttttctgtgaacctaaaacttttctaaaaaatagtctactaaaaaaagaaaaagttgggtgccatagttcatgcatgaaatcccagcaattaaaaaggctgaggcaggagggttgcttgaagacaggaggtcaagatgcacttaagcaacaaagcaagacctgtcttacaaaaaccgttaaaaattttaaaaaattagcagtgtgccatggggtgtgcctgtagttccagctattcagacagtttagcggggaggagcatttgagcccatgagttcgaagctgcagtgagctatgattgtaccactacactccagcctggacaataaaatgagacctaatcacaaaaaaaaaaaaaaaaaaaagaaagaaagaaaagaagaaagaagtttatagcttatttggaggattaaaattaaaacacacaaaaagtaaagaatgcgaaacagtataaaactgaggtcactaaatgaaatacttgtgttaaaaagttgtagaaaatatatctaagattataaggctaaaaggagacaaaatagttaagagttgacatgataaggaaaataaaaatcccacttgtaagaatttgttttaaaagagtaaacagacatgtgcaaagctctatgtatgaagctgtatctcagcataaattacaaacaatcttgatattcaacactggattagttaaataaattataaaatatccataaagcaaatacaccaaaatgattaaaaataatcctttcataggtatatgtatgtgaatgaaaaatgataatatatcagagtattatttctaatattttataaaactacacatacacaaaattttaaaaagctataaagagaagtaacctctgatccttgaattaaggaaaacatttatttccttcttttgtttatctctattatctgcatttttatagtatgcatttactttttgtaattcaaataagagctgaaagataatcttagtatctcagaacaatctggaactcaatgttggcattccctccttttctctctgaatccaaaattagatataataagattaagtccataaaaaagttttgaaataaataaaacactctacttaaagtaataataataaaaaagacatagccattataagtttttaaggaaggtatgatggttattttatgcataaacttgacagggccacagggtgcccagacatttggtcaaccattattccaagtgtgcctgtgagtttgttgttggaagagattaacttgtgaatcagcaaactaagtacagtagctctcaaccaatcaaccgaagacatgaatggggacaaaaaggctacgagggaactttgcttgcctcgctgtttgagttgggacattggtcttctctgatcctcaaagtggaaccacatcaccagctttcctggctttcctgcttgtcaactgcagatcttgggactgatcacatgattcaattactcataagtcacatgcatatgactagtctcttctgtagttgtcagggttctccagagaaacagaaacagaagcaataggagatatatctcttattacattaagtctcctattgcttctgtttctctggagaactctaatacataaaagattatgattagaattatgcttgaagaaggttaatcttataatggcatgcagagcggagctgggcaaggccagaggctaaatatggagccagaaagatactgcagaaagtgagcaaaaaggatgagtggatggcctggggtggaatccgtgaaaaagggcagattgtcagtctcaggaaatcaacaggactgagttctaacttcagctggg

SEQ ID NO: 38068 - DNA, 2300 bp, Homo sapien
ataatttaaaatcaaagaatgttttcagttgccattttgcctaaacagttttctaactgatttgcatttccaggaactgctaacgctagatattttattcagcaaattcagaggctgtggatgtattctagtgatcagaggtctgtaggcctacctaggtaggtcaacttggtatgcttgaaagaataaccataatgttgcacattagaattttaggagaaagatgatagtttgaggaacaaattgcttaatgctgtttccataggtcccatgtaaacaaatagtcgaatgctggcaagtttttacaatcaaggccaatgtttaataaagacaggaaggagtaaaaaatggaaatattatttctggatttacattttgtcttatttcagtccaaattcctaatgctgaaataatccaaaaatgtactgaagctgtcacctgggctgccaccatgctcttataaacatgttacttaagtgaattggtttgtttgtgacacaagctccctttggaattaatcaggaatactacaaatacagtaactatttggccttacacatcttatttccctcttttgttggtctagcccctctttcttctggggtaactcctcccacacacatggagatcatgagcaaagattttaatcctgtcctctggccacacatgatttgtcaagggttggcctaagatgagtaaatatgaagcattgccacagaaaatttgcagttataatggaagaaacaattttttatgctctgatgggcaaagctgcattgatttaataaaaacaaagtcacattaaatctatatatctgtcttaagacatttctggactttagaaatatgaacatgcgcctgtgtcgtagaacaggaaggaagagtgtatatttttaaagtattactctaaagcagggtacagcagttaattaaggagttttatgggagcagtgtcatctgtgcacatcccaatcttgttcacatactcagagttccattatcaagaggatactaaggtagattacattgctcacagggttattgtcaaaagccctacattttctggtcttgtgttaaaaaccattcctttgatgagaaggatatttcaagggatctccaatttgtcttactcccttgttctgattccgtattgaccagcaacctattaattgccatgaagaaaatatgctgatgaaatatgctggacttgtagctatctggtccatgtgacaatggtttctgatgcaaacaaagtctcttcttgaaataatgcttccatgtagttgactgtaggtggagaatgggccaatcatgggaacacgaatagcagtgcttcatgtgacagcagtatacattaaggagtggtaatttggtacccatattagttttaaagacagtttgattttgagtatgtcagctttcatgggactgagaactaataagaatcaggtactgggcctttggagcacaaggttagatctagttggagttcccttagacaagttgttcccaaatttttccatgtatcagaattgcttaggaaggcttttaaaagtacaaattcctgtgctggagattctattcagtagatcaggcacagtccagctatttgtattatttaagaacactccttagatagttataatgcatatccatatttaggacgcattgtcttagactatctccatacaacattcatatatgccttgttttagctgatttttaaagccataattagatttcatgagttactggatttgcctgcattatacttataaatttgattctagatggaatttctggttgattttctaaggcacacatctctgggtttgcagaagaggtggaatggaggggtggcaacaaaaattggaatttgcgtctttgatgtggtaaatagtcagccaagctcactactcctgtccctagagactgcacttcagaaatgatgagtgattactcttaattttaatgacattctttctctagttagtcatttcattggtcagcttctgatactttttactttgttttcatagttataggatattatacaagactatttgcattgactagtaacatctatgcttgtggctgcattcttgctgttgagaagtcagcgttctaactgttgttacttcataggtaatcttttctctttctccttcgacttttaaatttaaatttttgtcttggactttattttttgctgttattgtttacttgttagttttgtttttgcagttttactaaaaatgtaagatgtatctaggtatggatttatttatatttttattatc

SEQ ID NO: 38069 - DNA, 2300 bp, Homo sapien
cttggatatgacatgatggtttaatggctaattttatgtgtcaacttgacggggccacaagatgcccagacatttggtcaaacacaagtgtggtgcttctgtaacaaatacctaaacatgtggagtaattttggagctgggtaatgaatacagtctgaaagagttttgagatgtatgctagaaatatggacattaacacagattctggtgaagtcttagatggaaatgaagaacatgttattggaagctggaggaaaggcaatatttgtcataaaatggcaaagaaccttgttggcttgtgttcatgttctaatgttttgtagaaggtggaacttgtgagccatgaaattggatatttagctgaggagatttccaatccaagtattgaaggagtgtcttggttcctcatgactgtttatagtaaaatgtgaagaaagagataaattgaagaaggaatttgttaagcaagaaagaaccagaatttaaagatttgaaaatttctcagcccctccatattgcaaaaagaaatgttctgaaaagaacactaagagtatggatgatcaaccatttaataagagatcatgcattcagtttctccatttaatcagccatcttaacagaagccaggaatagagatgagattataccagcaaagacactgccagtgtgaactaaaggggacagaaaagacacaacaaaatgcaccaagtctgtcagacttcttgggttttacctgatggaatcatgaaactatctggttgcaaacatgtgctatctttcaagaaaaggaaaaaaggaccccagagccacaattcagacttcatcagggctgccaatcctatcactggtccagagtgcacaggccaggggtgcaaggctgcctccacgtaagtttcagatggctggaccacaactctgcagaagcatgtgtgggcagagctaccacagagagccaaagaaatgagatgctgccatcccactgggcctggaaggtggaggagcaaaccaaagaggattattcttgagccttaaggtctaatggggccaggctcggtgactcacacctgtaatcccagcacttcaagaggccaaggcaggtggatcacttgagctcaagagtttgagaccagcctgagcaacatggcaagattctgtctctaccaaagatacaaaaacttagcctggcttggtggtgtgtgcctgtggtcccagctacttgggaggctgaggcgagaagatcacctgagctcaggaggcagaagttgtagtgagctgagatcgcaccactgcactccaggctgggtgacagtgagactccatctaaaaaaaaaatttaatggtatttgccttcctaggttttacacttgcttaggactactcacctcttttttccttctaatatttctcttttacagtacgaatgtctatcctatgcctgtcccaccattgtattttggaaacatacaacttgtttggtttcatagtttcacaagtggagagaagtttttcctcgggatgaactgtatattgagtctcatccatatctgatttacataatactgaggtgagactttggactttagagataatattgcaaatcagttaagacttttgcggctattggggaggaattaatacattttgtatgcaataagggcatgaatttgggggggcaaaagggatgcaatactatagactgaatatttgtgtcccccccaatatttatgtaccaaagtcttaacttgtaatttgaaggtattaggagacagggtctttgagagttaattaggggtggatgagataataagtgtggagctctcatgatgggattagtgaggatgaaacaccagagagcttcttctctgtctctgtctctctctctctctcttgctctctcttgctgtctctctcttgcatgtaaggacacagcaatttggcaagccatctgcaagccagaagagagccttcactggggaacaaaattggtcagtaccttgatcttggactttctagcctccagaactgtgagaaaataaactgttgttgtttatgtcacctagtccagggtatttcattatgacagcctgagcagatgaacccactcacctaggaagtggtaggattgagatttgaatttggaagccttacctgaggatttttcacttaaccaactacgctacacttttaacagtcccttttccccgcaaagacttccaaaaagaaagctaggtatcctcttttagggtatatttttgtctccaaaatttcccttataccaatggataagaaaaaaagtgact

SEQ ID NO: 38070 - DNA, 2300 bp, Homo sapien
ttgagtcatgtccagaattcacagatacaacaggggtaatttaattgaattgataagctacactactgtgcttttagaagctgtaggcaactttctaaagataaaactcctatgcttctatagttttcaaagagatttcatatataggcatggcatggtaggattgcagaaggggacaaaacacaacttctggaataagatgcagaatattcttccttacttaaaaagcaagttacaagtacatttctatgagtctaaaactggaaaacaagtacactagtgtcttattgccttacataaattataagtgcattgaaagcctgaacacttctttggtaaaaaagtattctgtgatgaaacaaggtgttttctattttatcattggggaatgtagcaaacctcaatctccacaaacaatgagatgatctgttcttaggtttttgaataaccgtagaaatgggccttccttgtcttaaaacttgaaacttacatttgtcccatctgagttccttgtttagaactgaaacccactagatccccacatccagaggatgagatgtcaaaccttcattcatcttgattgctttcttgcccctccctaattcctgttttccccactttccacgttacataaacccctaatgttagtttgctggagagacggatttgagacttatctcctgttctcccaattgacgttacccaaatataaagtcttctgccctggtaatactctttgtcccagtgattagctttctgcttggtgagcaagaagacctggacccaatctctggcattttggtaacattcttattttaaaaataattcattcaattgtaagcacatgggactaatttgaaagaaaactggaatcaagattttcttgctcatcgcacagaccctgagatttgatatttgtgttgatgtcaatggagccccatcagcttagacttgggaggtttgaatgatgccatccatcaccaatccaaccagcttaaggacattaagcccaaatcatcgtaagtttgtcgctaatatatctggagaaaggggacaaagttaattttagagaacagtagcatttgtaacatactctctgaaatgtggacatacatgatatttattatgatttatttcaaactatatttcccagagcactagtgttctccataggttacatggaactttcatagaggcccctagccagctccaagcaaaatatttctaatcttatccattttctatatttagatttcaaataagatttttttgaaaaggttatatcaaaagccacttctctatttgctatgcatgcaggattttgctgtatgtatactaggaaatgaaactcatagtctaatggggataatctctgtacgagtgttatacagtttctcaatctggggaggatgagtggagctcatcatgggtaccaagtttgtaggtaataaatcttaggaagttctgtgactcccttcccacctgatgtgctgtagagtttcatagttgaggttatttcactgggggagagacccatctgaccctactgagaggccattttctgcttcgggtactggaaaaagaggctaaacataacaacacccttttggcttgaggattattatttgacttgtggagctccctttgttggcaatttcttactgagaaggatctccacatacctctggaactcttttaagataggactatatttctctgttaggctttttatgtcatcaatatttctcctgctctatgattcaatggagagatgataagaaaggaatctcctggatttccatatatgggtaagctgcatggaaattctggaagtctcttgatgccgctttcaagctcctgacatattcaggagagcgagatctggcatgcatcaaggcagcaaggagggcacagactgcatttacagaactacattttgcttggcaatacattacaggagacatcggcaaaacacaaagacaaaacaaaggtcacttatagagtattaggatgaatgatgcccagcactgcctagtgtgatgtcagaattagaactgagtatagaagccaacttcagaaactgtgaaaggataggggagcaggatgacctagcttaatttgaagagacagtaacttgctggcatctggctactgaaaagaacaaaatggttgacctcctagtagtgccagggactatcttaaaagcaacaatgatcaatgggtcagaagttattaaaataaagagacaaagaagagggacattatgaagttaaaatggcaagatgtcatgattggttgct

SEQ ID NO: 38071 - DNA, 2300 bp, Homo sapien
acaaatagaggcgtccttagcattgagttctattaaattaagagagccacctagtacctctgaatcccccatttttgcctctgacccattacagggcagattaatgggcaccagaaacatatgtcaaatagcaatcgctgctaatggacaggaaatccccacattgtcagggcagttgaatttagcaaccactcagttccagcctaactctaaaattagaaagtcacctatttccttctcttttcctaagcaactgtatgtttaatgacacagcaacaattactatgaaagcaggtatccaaactaaaattttttgattaatcaaatattttccctcacttccatttttcccacttggtggcatatagaaacatatcctcttttccatgaccgtggacctccttacaactgtctgctgtacatgtatcccatgcacaaatctgggaacaatcttcaagaagttcatcttagaacttgcaactccctgggaggatctccctgcctggatttctatagttaacggaaatccagccatacttatcactcgaggccctgagatgtttacggtactataaattttaggcacagtttcaagttctctgcagcagaaggcaggcttttctgtgcattgcgtactgtggattctgttcttaatttaacacactctgcacactgtgattatgatagtggtaaattcactgaggcaagggccaagcagggctgcagatggataggaaaggttctctggcatctttctataaacttacgaggatgctggccatgatgatggtggcggtggtaaggggagttcctctgactccgacctcatgtctttggcaggagttgaaatgaataataaagctgggtttatgattagatagaataccagagcagagagagcagttagagggagaagctgtcttattttaggaagcatgatgacttattttttcaaaatctgaattcgatattcccctttgctaagaattggtgtgggttttgttgttgttgtttgtttcttaacaaaataaaagagaagaagattcccataagcagagcttaatcatttaaatctaaaaaggcaatcagcagttgattttagggtggcagggtcctgccaaggccttaggagaaggccgagggaaacctcccaagccttggataactagcctggagggtgtgcaggtttcctccagcttgggcacatctgccttgccccatagagaatgttaacaagatacctgctgttttcccttctgcctctatgcaggacagcttctgaaatcctaaactgcacagggtgtcactccaaaaacagacagatagtagctgctaaattagagaacccagagggcacaaggttgggttttgtttttctaggaaagagtgtaaaactggagtgtctgactagtgccccggatagggaggcttaataggtttggggtaactcatccccatgagctctgctctactctcatccacacctgccagaaggggtcagggtgaagccgatggacagcagtgctgacccgcatgcagtggactttccatgaataacacccaaggctgactacagatgtttaggtgggggtgccgagggagggttacttggctgactagaattagggacagccgtgtgcaaattgcttttttagggccagagaggctgaggctgctggcttccagtcacacagcctacaggacagcccctgatttcacaagagcaggtttctgatgcatgatctagccccaccccttcttcacaggcagctgtacttggaagcaaatgatttagtgttcctgagagaggattgtacaaagagagtactcattagagggggctcaatctgtcaggtgctgttatattaggatcagagagtcatcataaaatgactttcatgctggtcttggctgataattaactgcatggcatcgcctgcgtattgtagagaggcaagggtgctgatttatgcatccgtttaattatctgaattgaaagactctgttccctgtatttgcatccactgcctgcgtgctttctctctcccccatatttctgacatttggattttccccctactaattgacatgcctgtcgcctccttctcctggtgtccatttctggaactgctatttgtatattgcatgatattttatcaggaaaaaatataaaacagatctaatttcatgaaaatgctgttgccataatgctcaggagaacagggggaagagagagattcaagtcttcctaatgtctaccttatatgcaggtacattttacaagttctattgtattctga

SEQ ID NO: 38072 - DNA, 2300 bp, Homo sapien
gggaaaaaatagcacagaggatgaaaagaatattattagagagcaggtaatgaaaggttcgcaaagcaaccagctatatctggttagctaggtaatagtgcaggaacctaggtcgcacctgtacaaactaatgcagaacctgctcacggcgcactatgggaagacattcatttcaagagtttacagcatgagatatttgagtaaaacctgaaactgattagaaattgatcctgaacatcccagccttagtcaaccttccctttttcaaattgttatgcatggagattggaggattggggcatcttgaaagtgtcactgcagtatagcaatctctctcaggtaatatagagataaagggaatataataaattgacctgttatttattatctttttcatacctaggacattccgaggcttaatatatttctgaagcctacagccctgataaacatcaatcccacgtcagtttccagcagtctcatctccccacacccttctgcaatgaaagctaatgtaaaagaaagaaatatgcactgcttaataagtcagaatacaatagaacttgtaaaatgtacctgcatataaggtagacattaggaagacttgaatctctctcttccccctgttctcctgagcattatggcaacagcattttcatgaaattagatctgttttatattttttcctgataaaatatcatgcaatatacaaatagcagttccagaaatggacaccaggagaaggaggcgacaggcatgtcaattagtagggggaaaatccaaatgtcagaaatatgggggagagagaaagcacgcaggcagtggatgcaaatacagggaacagagtctttcaattcagataattaaacggatgcataaatcagcacccttgcctctctacaatacgcaggcgatgccatgcagttaattatcagccaagaccagcatgaaagtcattttatgatgactctctgatcctaatataacagcacctgacagattgagccccctctaatgagtactctctttgtacaatcctctctcaggaacactaaatcatttgcttccaagtacagctgcctgtgaagaaggggtggggctagatcatgcatcagaaacctgctcttgtgaaatcaggggctgtcctgtaggctgtgtgactggaagccagcagcctcagcctctctggccctaaaaaagcaatttgcacacggctgtccctaattctagtcagccaagtaaccctccctcggcacccccacctaaacatctgtagtcagccttgggtgttattcatggaaagtccactgcatgcgggtcagcactgctgtccatcggcttcaccctgaccccttctggcaggtgtggatgagagtagagcagagctcatggggatgagttaccccaaacctattaagcctccctatccggggcactagtcagacactccagttttacactctttcctagaaaaacaaaacccaaccttgtgccctctgggttctctaatttagcagctactatctgtctgtttttggagtgacaccctgtgcagtttaggatttcagaagctgtcctgcatagaggcagaagggaaaacagcaggtatcttgttaacattctctatggggcaaggcagatgtgcccaagctggaggaaacctgcacaccctccaggctagttatccaaggcttgggaggtttccctcggccttctcctaaggccttggcaggaccctgccaccctaaaatcaactgctgattgcctttttagatttaaatgattaagctctgcttatgggaatcttcttctcttttattttgttaagaaacaaacaacaacaacaaaacccacaccaattcttagcaaaggggaatatcgaattcagattttgaaaaaataagtcatcatgcttcctaaaataagacagcttctccctctaactgctctctctgctctggtattctatctaatcataaacccagctttattattcatttcaactcctgccaaagacatgaggtcggagtcagaggaactccccttaccaccgccaccatcatcatggccagcatcctcgtaagtttatagaaagatgccagagaacctttcctatccatctgcagccctgcttggcccttgcctcagtgaatttaccactatcataatcacagtgtgcagagtgtgttaaattaagaacagaatccacagtacgcaatgcacagaaaagcctgccttctgctgcagagaacttgaaactgtgcctaaaatttatagtaccgtaaacatctcagggcctc

SEQ ID NO: 38073 - DNA, 2300 bp, Homo sapien
ggatgatgttaagtattatagcacaaagattttttataaaaccattgtaacacaaatgtcccctgcctcccccattctctttcaccatccccgtaaaaaatatgaggctttttaggcaatgttgacaaagttttaacaataatggtggagtaattgatgtttctggagctgaaaccccaaaggtgttaggttacttgtaacagaaaaagtcttacaaatagttgttttggaaaaggggacagtatatataattcagaaagcattgttaacctgtgcaaactgtaattataacttagtgtcacaattttcttgccctcttccccttgcactcagatcttatcttgtagtaatgatatttattaactctttccacctaaactgcattgcttgactgtaatgctatgaacacactaggtgtcagatataagctgagtgtatcttcagaaaccaagagggcttatgtgtgggaaagaaaccgagagggaaggaacgctttaacagatggaccccttaaagattcttctgcaagataaaagcaataagacagaaaatgaaaaagaggggagggggaagaattttttttaagccttagaaaggcattgttaaaaaattcacatttttctttttctgtgcacactaaaatccatgatgatttcatctgcactgttcctttgagggaaaaagaagcagtcaaggaggctgtctatgaatgcactggtcgggacaggcttggggcaagctgaaaaaactaccacatgacagagaaaaataatttgccaatatattttagagagtcttttcccataggaccagttattcaagtcatacgagtgcactctttttataaaaggatgtgggaaaggccaagagaattttgcattttatctgtgaagtccggcgagtggtggtaggctgtaatgtgtgagagtgagtgggtccccggcagaagggggcagctgaacgcgacggggagaaagcgcttctggaacttgggcttgtgacaggctgcctgccctctggtccttcagtgccctgctgcatttcacagttgggaagagtggagtgtattatatgaccccaaacaaaagttccattgcgctctcctcagattgcctgccagtgttgatgacctgaacatttaaatatgaatgaattgggggaaaggaccatctcccctggatcccatcaggccagaacaatcctctgttacccctgagtccctcttccctgacctccactacctgtccactggacctccctgcaccctctgccccaccacgtggccaggtgggcgttctaccacctagggctgtggcttggctgggtggaggggcggtgggaacactttttcaatcaattcatccctattgattgagacactgtgtttgtttggggtttcttttctcccctccaaaaaaggaagaaggtgaaaccaggagactgggcagagaaagaaaaaaaaatagtgaacaaaattaggataatttattttagaagagaaagtagaacccccgaaaatggtgatatttgaagagaggtgtctgtgaggaagctaagagcagaaggagagcagcctgtcagaaaacgggctgtccctccctccctaatcacagccctactcacagcaaactccctccctctccattcactcacttacttagggccaatcctttctctctctctctctctctctctctctctctctctcttcctttccctctctccctctccccctcccttccctccctctctccctctctctcccccttctttccctctctcttctctccccctctctcctctctctctgtctctgtctccctcccatcctctctctctgtctctgtctgtctccccgccaccctgtctctccctccctccctgtctccctccctccctccctccttccttctctcttactcggagacagtcagaactctcctccctgacagccacaaacctacagcactgactgcattcagagaggaacctgcaaacaaaacttcacagaaaactttttgttcttgttccagagaatttgctgaagaggagaaggaaaaaaaaaacaccaaaaaaaaaaataaaaaaatccacacacacaaaaaaacctgcgcgtgaggggggaggaaaagcagggccttttaaaaaggcaatcacaacaacttttgctgccaggatgcccttgctttggctgagaggatttctgttggcaagttgctggattatagtgaggagttcccccaccccaggatccgaggggcacagcgcggcccccgactgtccgtcctgtgcgctggccg

SEQ ID NO: 38074 - DNA, 2300 bp, Homo sapien
aagagaaaccaaaccaaggaaggagaaggagattctggtcaggactgggctgaccagcttgtgccccgggcccttgagttccgcagggaaaagctgattcccagtctagaatattccacagaagctattttaacctgcctgcttcctccaccacccccaccttgatttgcaccgagggaggaggcattgccactgtggtgcaggtggttgcagaggggttgcagcacggctggtaggctggcctggcaggtgggcactcggtggcatcagatggccagcggagtttcagagtcacacttgtgttgtggctcctctggtcagagagctgcagattcctgtgacacccatgtttaagaacagccaccaggcttctcagaaatagtatcacttattattatctgacagctgcacttgacccccacaggttcatatcatggatcccattttatagatgggaacactgaggcctgagtttacacggtgagtgagcagaggaactgggatctgatctgggtttgttttgtgccccccacccccaccccacgtcacctacacacacacacacacacacacacacacacacacacacacacacactactttgtgtggaggcggaggggatgttttcaggacactagggttcatgtgtgggtcaggggtgagtttagatgccctgaaggtcattgactccactaattctcagcaaaaagggtggagaagtttctttcttataaagggtttgagttcacccagtgctaagctgaggggcaggtttggagttcaccatcattaatcctatttctgtcttcgccactcagattcactctcttcctctacaacctaatgatttttttcctacttcatttctgcatatgcagttcttagaatactccttccccccacccccatgcagctcagcacccacactttctctgtatctagccaagagagacccttttacacagaaaacttctggtgtcctaatggaacctgcttaagccacacatcaggaggccagagcctctatattttgcttgtgggcacagtgaaaagtttattttatgcatgttaaatcctgcatacaaaacaacatatctggtcatatggctctcattagctcccaattttgcacattttatccaacttgtcatgagaactgggcttatgcttcaactgtagtccttcaaacaacccttcaccgttcttgtcagaggaccccttcctcctgtgttatttaccagacttgccaacacccctcccccacaaaaaaagcctgaccagctttacccctatttcaaggagtgttcacttcttttcattaatctgctgttatatttgtaacaatttagaaattataggagttgaagttctggtaaaaaagaatgatgcatgagggtttttgttgttgttgttgttgtgtgtgtgtgtgtgtgtgtgtgtgtttggttagttagaatgagattctaaagacctgggaaggatacttatgaagttcatttaaagagaattactatttccaaagttcttgatttatgaagcaggcattcaatttcaagatgtaaaataatagtgtaagttggttggggtcgggggagaccatcatcatatgattatacagattttcccaatttttttcctcaatgaaatagcttattttaaaaatataaaattagaatccctataaagaacactaccaattttctttcctgaaagaaacaataaaatactttgtaaatagaagcaacttcatgaagtaacagatgttttatgtaaagacataaaactgaacctgaatataacgagacgtgtgtgcgagtagtaaaagttgaaagttggacacactcattgagacatatctatttgattccaatgtttttctaaaaggtagagtaatcctagccagaggtttcactggctcagtgcatcacccagtagtgtctcagaagccaggaagggctttccattagataatgaattatgaaatgtctcacactggaaaaaccagtcatccgctgatgtcatgctgattccaaccaatcccaaacaaagccccagccctcctctgtttcagtggtaccaatgtgtggtgtacaaataagtagtacagtataaaacttcacagtgccaataccatgaagaggagctcagacagctcttaccacatgatacaagagccggctggtggaagagtggggaccagaaaggtaatgctttttaactcttacttctgagctctttacacattcaaagataggaaagctaggaggaattttacaactaattggcatttccaatgtgca

SEQ ID NO: 38075 - DNA, 2300 bp, Homo sapien
cagagtgagactctgtctcaaaagaaacaaaaccgaaaaaacaaaaacaaacaaacaaaaaaacaagctttagtgaatctgacaattagtaacgcttgctaacattgaggttccgggtgccatcctccaaggcaaatgcattgcaggaatctgaatgcttagcaagcactgtagaaacactgatacaaatggttcttgtaccaagtgagaaacaatgatgccaattgtattggattattcttgtggcatactttaaagatgatatttaaatcaattttcaaggaccattacaaaaagtaattattctgagattgttagagctagaagggaccatcaaagatttctcctttaagggttctctgtccagattcttggaaaagcttggaaggtctgtgatcccttggaaattaaatgtatacttttaagtttaagggtattttctggggagaagctctttaacttttaacaccttcttaagatgttacttcctcccgcccaaagtaaaggtcagatctcactgcccgattctgtcatttgacagatgagatcactgaggctcagcaacaggttgttggcggttgtgcactggccagctagccccagggggcgccatgcaggtagccctgcccttgggactcacgcacggtggctgcactcggaagggaaatctcaagcccccttttctgttgtataatactttgtcagtgccctttgaggggtgtctctgaatttggagtggatcttacaattgatatgtaaatttaacttagtgcttcttttttcttttttattctacaaaagctgttcttaaataacttgtgtgttttacaatgaatgacactggataatctcagaaaagagatggaagtgagtggaagagccggtgctacagtgtgccatgtggcctctggttcttaagcattctagttacttgaattccagatcaaggaggaatttattatacaatgaagagcttgcagttcccttgcaaatatgtgttaaagtagactgaaaatattttatcttgtattttaacttttagttggtcaagcagttgcttatttcatttcactaaccactgctgtgattgaggatgtcgacatttactaaatgtagaaaaataagcaagatggccagacctaagaaatgctttccatgaatgttgcaatctagataacttgaagaaaacatgctagagagggtacttttcctcttttcttgtattctttgtaggtgtagaacatgactgcaaaaaggaacatgaaccagagtgaaaattgatgaatgatgagttagggcgattatcacatgaatgaagccagtgaaagacagacctactgaacctgcctttagctgagttttgatatttcctaagtgagcccagtctttgctaaggcacctttcaacttttccatgtggaatcaagagcgtgttgttctattacctttgtcttaaaagtgtaacttaaatgaactgaaatattctcatgctttaaagaggttaaagagtatagcttaccagaatgaattaggattaagaggtatattgcaattcagatatctttatgaaagaggcaaaaatcactgactacttggcctgaattatcctctgattcagaatttggagtaggccttcgatgttagaaattgtcggactctctttaaaacatctaattaataattaaaaaccttccctccctttggaatttgttcaaatgccccttcctgtaaagttggccacctgaagagacatttgcagacgtggctttaaaaagtaatgtgacacttgtttcacatgatagacacagttgcaaattgagatttttataccgtttgataccaaacgctcagtagggatttgggaaaagtaccatgttatgggcatttccctcggttctcttttttgcttgtgtagagtttcactggtttgttaaattttgagacttttttttttgccagaaaacctgtggagaagtgtcatccacattttgaatttcctaaagctctaggcttttctcagatgacaggtgaagtggacttttgaaagttttttttttttttccaccattttggaaagttgatggctctgttgttttctttagggcatttttggtcgaagagagctgaagtaatgagaagacatcatggaggcccagtcccacagctccacgaccactgaaaagaaaaaagttgagaattccatagtgaagtgctccactcgaacagatgtgagcgagaaagccgttgcctccagcaccacttctaatggtgagcagcacagggattaccagcagcccagcc

SEQ ID NO: 38076 - DNA, 2300 bp, Homo sapien
ttcctgcataatgtttatgatagtaaaataaattgataaaacttaaaagtccatcaataggaatatgcataaatatatatttttgtatatttatacagtgaaatactatataccagtttaaaagacaaaatgagagccacaacaatcagaataaatctcataaacataatgttgagagaaaagtaagttttacaaacattgacaaataggatgctattgattgttagtttaaaaaatagcacaatagcactatgtatatattatatatacacaaatatatgataaattgatcaaaaggtgcctaagaaagagaaacattaaattaatgatagtgatttatgctgaggaatgaaaaaggaaatgtgacaaggatagctacatgaggatctcaactttatctgcaatttttattttatgtaaaaaaattccgaagccacaagcaattcaataaaaaagatatgcaaaatatatcagcgagtgctttatagaaaagaaaacatagatggccaataaaatgatgaaatattccacctcattagtaaccatggaaattagaatcaaggccagaatgaaatgtcatttttcacctattttattgggaaaaattaaggaatctgactaaccatgtattagagtgtatggaccaactggtgggagtgaaaattgggacgaccgctttggaaaatgtcttggcagtctattaggaaggtagttattcatatatcctatggcccagaaactccactataagaagtacacccaggacaatctcttgcacagcacaccaaaagatacctatgagcatgttcaccagtagtttatctaatggtaaaaatggcaaacaaccccaaatcatgcaaaattgaggcaagtcttcacaacagaacaagccagcattgagtggaccagagacatataacacgcagttgaattttagtaatgtaatattgagtccctggaacgcgtgttagacgacttcgtgtaacatgatacgcttttaatgaaggtcaaaacaagtaaaataatgtatcggttgaaaacaacatattgactatatatatatatattatatatatatcatatatatgatattttttatatgtggtatatatataataaaatgttttttaaaaaccaagaaagtgacaaacacaaaaatcaggatagtgtttgtcccgaaggggtaggcaggaacacaagatagggtgaagcctagttattgttaatgtgttaagtttttggattgcattgtggattcaggagtactcatattattcaaaataaaaaaatgactacatgaataaagtaatctataactaattgaaagccatgaaagagccgaggatcatattgtgtcaagaaccaagaactctgattaatctgattttgtgcatctggagttcaataaaaataaatttaaaaaacagttaacagagaccaatgttattttgataaagcaggctggtgggtgctgaagtttctttatagttgtctgtaagaaaataccttacgatttaaaaaaataaaaattcaagcacatcatacaatcttttccaaaggttcctttatgttcttattttttgtgtgtgtgatataaacaaagccatcttacggaaataaagagacagtcagatgggggggcccagaaaatctccaacagacttgcgccctcggagcaatgagcactggggtggagctacggcagttcccgcagtttgcaatgaggaggagtctggcccctcctcttcctgtctgtagcgtgggattcaagcggtgaggcaggaagcgctctagcagagaactctggcctcgcggagagtctctgtgtcccccttttcttccttttcactcaaacccttctttactcttcaaaccatctgtaagcctaaattttttttttttttttttttttttttttttttttgagacggagtctcgctctgtcgcccaggccggactgcggaccgcagtggcgcaatctcggctcactgcaagctctgcttcccgggttcacgccattctcctgcctcagcctcccgagtagctgggactacaggcgcccgccaccgcgcccggctaattttttgtatttttagtagagacggggtttcaccttgttagccaggatggtctcgatctcctgacctcgtgatccacccgcctcggcctcccaaagtgctgggattacaggcgtgagccaccgcgcccagcctgtaagcctaaatttttgtggctgtgggatggacaaggacccagtctttagctgaactaaggaaaagtcctgcaacaataaatttcag

SEQ ID NO: 38077 - DNA, 2300 bp, Homo sapien
ttcctgttccaatccaggctaggtgcttgtttgaaactatctttattctccttgctttctctctgaattggctgggtttaaaaactctaagaaataaattatctccacattttgaaagcattactcccttctaaattccagtgttgctgataggaagcctaatactattgcgtatgtgatgccaagtcctttgtaagttttcccctctgcagctcttggtttttctcttatctgctgtgttctgaaacttcacaaccatgttcctttgtgtgggtttcttaatagtcattgtggtgagcactcagtgggcccttgcactgtgaaaaacgtttctgtttgctaaattttctattaagtttttgaaaaattttctcttcattttgtttttgtttctaaactcctgttaattggatactggatccttttgtttttgctccatttttcatctatttctactttctaaatttttccaactcattgatgttttgaaatttgggatatgatttttactacagaagaaccatttcctgtgctctgctgtctccttaaaaaaagaaatcctcttgtttcatagctgaaatatcttttatttgaagatgctagttatagaatactttttgagaccattttgttctgttttccatttccttcaaataacaaaaacgttgggaaatgctgtgttcgtgaggctcacactaggggatgctgaatgttggtattgccgagccatttctctagggtcttttgtctactcatttcttcagagaaaaatagggttatggggagatagtggtagggagcggtagaggggtgcctgcattatgggaggggcagagaagggggctgctagcattgcactattcagtaggaaaacatcatggcacctctcatcctttgttaggctttgtgtctggaatccctctgatgccctgtctttagcatcttaaactagtcttctgcctgaacaatttactgccctcccttctaccttcaaggcacctgaagctttctggggttctgctttgtgaatcagtggctaaatatccccttctacaagcagtttgctcagttctcctgacaccatctgcaaagagggtgcttgggttcaggtaacctccctatggctcacttatctgtaaagcatacttaatatctctaccttttaggttgtttaaaggagtgaacaatgtgtaaaacacttagaacaatgtctgtcacgctgtaaggactgaataagttattgctcttgtcctccaaaaatgtgttggtataaccggtctgcagtcatctcttctcttgttctttttgcctttgtttgttccctttgtcattgctttactgttatttggagaaggagcattgctttactgttaagtttggagaaggagcaggatacacaggattaattataactggaagtcctctttaatattttaaattagctttactttcttacagccctaatctttctgggtgactctggacactctactacagtaatatgaatatggcagcccctcggaagccatgcaatcatttcttctcttcagaaggacagcacactttctttggagggcccaggacaatgcagtggaaagtgctttggcttggaggcagaagtcccagaggcagtacttctcagctgtcacctctgacaagcttctccagcgtttcttctgttaaaatgagcccccaaaatgcctacgacccggttgcgatcgagtggccgacgcccccagtgggagtgaggcccagcacgcgagctcggtccctcttcctggagccaggtgggtgcgcgccttcaggctcacccggcggcgcaagcgggagaagccaggtgccctcaataaacatggccgccacgccagcgtcaacccggctcgggaggccgcgctgccgcttgggaatcgcaggtttggcgtcacccggcccggaaccacgtgatgcaggaggtgcccgaggcggcggggctcgcgcgggtggagccgcctcggcgttcgagcggggtgggggctgcccggttgagatttcccggcgggtcccggcctctgcgtgcacgcgcctgcgtgctcgcgctcgcggttctggcgctgccggtgaggagccggggagcgaggcggggaggctgggagcggggcgcctcttctgaggccagagggggctgggcagggccggcccggcgggaagggggtcggccgcgcgctatcagcgcctggtccctgagccgcggcgctggcggtgggggcttttcggccccggcccctcctggcagggcccggctgtgcaggtggccgggcagg

SEQ ID NO: 38078 - DNA, 2300 bp, Homo sapien
tgcgtagctgtcaccaatccttgccagattcccccaacagaaatttaacaccctctgcttaatattttcctcatcagtcagatatcaggcactctgtatcagttctcttccccacacctcagagaagtttctcttagaaccctctgtcttcctgttccaatccaggctaggtgcttgtttgaaactatctttattctccttgctttctctctgaattggctgggtttaaaaactctaagaaataaattatctccacattttgaaagcattactcccttctaaattccagtgttgctgataggaagcctaatactattgcgtatgtgatgccaagtcctttgtaagttttcccctctgcagctcttggtttttctcttatctgctgtgttctgaaacttcacaaccatgttcctttgtgtgggtttcttaatagtcattgtggtgagcactcagtgggcccttgcactgtgaaaaacgtttctgtttgctaaattttctattaagtttttgaaaaattttctcttcattttgtttttgtttctaaactcctgttaattggatactggatccttttgtttttgctccatttttcatctatttctactttctaaatttttccaactcattgatgttttgaaatttgggatatgatttttactacagaagaaccatttcctgtgctctgctgtctccttaaaaaaagaaatcctcttgtttcatagctgaaatatcttttatttgaagatgctagttatagaatactttttgagaccattttgttctgttttccatttccttcaaataacaaaaacgttgggaaatgctgtgttcgtgaggctcacactaggggatgctgaatgttggtattgccgagccatttctctagggtcttttgtctactcatttcttcagagaaaaatagggttatggggagatagtggtagggagcggtagaggggtgcctgcattatgggaggggcagagaagggggctgctagcattgcactattcagtaggaaaacatcatggcacctctcatcctttgttaggctttgtgtctggaatccctctgatgccctgtctttagcatcttaaactagtcttctgcctgaacaatttactgccctcccttctaccttcaaggcacctgaagctttctggggttctgctttgtgaatcagtggctaaatatccccttctacaagcagtttgctcagttctcctgacaccatctgcaaagagggtgcttgggttcaggtaacctccctatggctcacttatctgtaaagcatacttaatatctctaccttttaggttgtttaaaggagtgaacaatgtgtaaaacacttagaacaatgtctgtcacgctgtaaggactgaataagttattgctcttgtcctccaaaaatgtgttggtataaccggtctgcagtcatctcttctcttgttctttttgcctttgtttgttccctttgtcattgctttactgttatttggagaaggagcattgctttactgttaagtttggagaaggagcaggatacacaggattaattataactggaagtcctctttaatattttaaattagctttactttcttacagccctaatctttctgggtgactctggacactctactacagtaatatgaatatggcagcccctcggaagccatgcaatcatttcttctcttcagaaggacagcacactttctttggagggcccaggacaatgcagtggaaagtgctttggcttggaggcagaagtcccagaggcagtacttctcagctgtcacctctgacaagcttctccagcgtttcttctgttaaaatgagcccccaaaatgcctacgacccggttgcgatcgagtggccgacgcccccagtgggagtgaggcccagcacgcgagctcggtccctcttcctggagccaggtgggtgcgcgccttcaggctcacccggcggcgcaagcgggagaagccaggtgccctcaataaacatggccgccacgccagcgtcaacccggctcgggaggccgcgctgccgcttgggaatcgcaggtttggcgtcacccggcccggaaccacgtgatgcaggaggtgcccgaggcggcggggctcgcgcgggtggagccgcctcggcgttcgagcggggtgggggctgcccggttgagatttcccggcgggtcccggcctctgcgtgcacgcgcctgcgtgctcgcgctcgcggttctggcgctgccggtgaggagccggggagcgaggcggggaggctgggagcggggcgcctcttctgaggc

SEQ ID NO: 38079 - DNA, 2300 bp, Homo sapien
cacacacacaagtttggtttttttaaaaaaaacttttagatatggggtatcactttgtgacccaggctggagtgcagtggcagaatcacagctcactgaatcctaaactcttgggttcaagtgctcctctcgccctcagcctcccaaatagcttggattacaggcacatgcctggctaattttttaatttttttcagagatagggtcttgctgtgttgcccaggctagtcttgaactcctgggctaaagtgatcctcctgcctcagtctcctgagtagctgggattacaggtgtgagtcaccctgcctggccaaaagtttattttaataaagaaaatttgttataaaaagattcagtccctgaaggtatacggttgttttatgttttcagctccactaggattacactttcttcgcgataaaagaccacatttgcagcctgggcaacatcgcaagacctcatgccttaaaaaaaaaaattagcaggcagggtggtgcacacctctagtcccagctactccagagactgaggcaggaggatcccttgagcccaagagctggaggctgccaagtccctgtccctaaaaaaaggaccacatttgttttcttcataaataggaacagtgaatacatcctgcacacactattctgtcatatgtaatataatgagaccttttattgcataattaaattaatctcgttcaaaggttacaaaaaaactattacatacacccactgcttactgaaaactgccaagagaaaagtacttttggaatttaagacaacgttatgtaatggaaagtgtatttttgttatcagaaaaaaaacccagtttgaatgtcaactcagctactcaccgatgaccttagacaagttgtttaatttgtacaagctgcggttagttcatctgtaagaagctgagataacattcattatagcagtggaaagagatggagcaggttaaggttaagttgcacctaacaaagtactcaacaagttagatcccgcctgccttcagttgtcaggagtacattttaagtaaactgggcattactgatccttaagaaaatgggtaagtcagaaaacttccccagtcaatttttaaaagtcttcggcgatggttttctcacgttgagagccatggttcgccccaactgtattttggaaagtaaacttattattctaatccccttttctacaatagaaaaacctacaatcttgtttaaagtaaacatccccctccccgacgttccccccagtccaccaaaaaaagaccaaaactcaaacttgcctcgttgttaggggttcacaaaaaagtgataggggctttcggtttttagtccttatgtttctaattcgtgcatcgaagaaaccgaaagcgggaggttttgaaagacactagtgccaaatggagaccaagactccgacttaactgtaaagctgagagttttccaagaaaagggaaccccacatatttgaccaagattccaagtttcagaaaccaccgcatcaggtctacttgagccaggaaaaaaatcctgagttcggaacgggccacccagagatggttaagctaaaactgccttcttttctggtctccaaagtgaaagcgaatccttggctatgtgcctcaccgtcccgcagccccatgttaaccccgcaaaaccgcatccccccgaccctccagcagcctccgaccaaggaagctccaggaatcccgggtcggcctggcaaatgactttgcaaagccgcatttccaactccattccctactggaccctccagaagcaccaatgccgacgtcaggatgggaaaaactaaatcgacagagtaccagcaacctcgactacgctgaagacctcgagggccccttccatacctgaatgtagtcagcgaaaagctgtacccgcgctccgccatctttacccgaagagccaaagcacagccgcacacatgcgcactgtggccgatttcctttcatttccccgcccctcacctttcctttactctctatgattggaggagagtcagagctgctccaagagcatgcggggtgttgtagttctaagaagcgaggcttgcccgattctgtgcctgtgcgcatgctgaaagcaggggcgggaccggggcggtcttccagcagggaaaatggcgctggccatgctggtcttggtggtttcgccgtggtctgcggcccggggagtgcttcgaaactactgggagcgactgctacggaagcttccgcagagccggccgggctttcccagtcctccgtggggtaggtaaagaagggctccgtgg

SEQ ID NO: 38080 - DNA, 2300 bp, Homo sapien
ctatttcttagacgtgccatactttttttttttttttttgagactgagtctcactctgtcactcaggctagagtgcagtggcgtgacctcggctcactgcaacctccgcctccctggttcaagtgattctcctgcctcagcctcccaagtagctgggattacaggtgtgcaccaccacgcctggttaattttgtatttttagtagagacagggtttcacaatgttggccaggctggtcttgaactcctgaccttaggtgatggacccaccttggcctcccaaagtgctgagattacaggtgtgagccaccgcgcccagcccacatacttcttttgatcttaagaactcttaaaaatacacaaagttctctaacacttaacaactggcatttattttcagtatgtccacaagtattgccaagcatgccccggtgattaacaacacaggctcaggactgtctgtgaacttgggaccattgtgagcctactgtttcagttggaaagtgtatacacctaatgggactgttgtcaagattatcccaggaagtacatgtagaaagcttggcacattgcttggcatatagtggcatatattttcttggtatatttctggatattatcactttcaggctgcttagaaattgagtagaatgtaaatgccaaagccatgacagtttcaacatccaagatacttccaattaaaattaattccaagtgaaacatgggaaacagaattcagctcctcagagctcaaacaccacagaaaacatgtactgcgcgggagggagggaggaagggaggaaagaagggagggaagggaagggaagaggagaggggggagaggggaagcgggaggggaggtgagggcagggctggaaaggaaagacagatccagagagtggtgagccttgatgccaagtgagacctgcagaactgtcctctcaggacaactctgtacaaatccctgaactccacagacttgaccaaactctagcatagtttctagcagcataaggctgtatcctaggatgacctcggccccccctttaaagtgcctgcctgagaaagctcaacgctgcctggaaaatttcctatttattttggccaacataccccgatagtaggtcccgaactcccttagagcatttcctggaaagggcatataattgtaaatacgtatcccttgcaactaactcggaagcttttctttcaaggccctgagagccattccttcgaaatctaatcattaggaaggatagggcctttgtctcccagtctctgcgggaggatagaattctccctaagacaactgcgagctagcagacacagccggctaatcacatttgcactgacttcactatactacacttctctgactctacagagcccctacactcccgcctcgctcattctccctttaaaacgcccaaagtcacctctgcacaaaccgggatggagctcagctctttacctgcagtagttactgaataaaatctgttttcagcgctttacttactggctggctatgatttatctttgacacaagcttgggttacattctgtgtacgaatggaacaagcagaggaatttttttttttttttttttgcggtggagggagcgcaaaaacagtcgttctgttctcgctaatatgggaatgtcacgaactacgtccccgacatgaggccgcggatcagaaccggggctgagggcgaactgtgtaagctgcgtctgctacgctgcccgaggtcccgtcatcagccccctctcccacggagcccttctttacctaccccacggaggactgggaaagcccggccggctctgcggaagcttccgtagcagtcgctcccagtagtttcgaagcactccccgggccgcagaccacggcgaaaccaccaagaccagcatggccagcgccattttccctgctggaagaccgccccggtcccgcccctgctttcagcatgcgcacaggcacagaatcgggcaagcctcgcttcttagaactacaacaccccgcatgctcttggagcagctctgactctcctccaatcatagagagtaaaggaaaggtgaggggcggggaaatgaaaggaaatcggccacagtgcgcatgtgtgcggctgtgctttggctcttcgggtaaagatggcggagcgcgggtacagcttttcgctgactacattcaggtatggaaggggccctcgaggtcttcagcgtagtcgaggttgctggtactctgtcgatttagtttttcccatcctgacgtcggcattggtgcttctggagggtccagtagg

SEQ ID NO: 38081 - DNA, 2300 bp, Homo sapien
cataggtgtcaactctaccttcagcctttctcccctcccaggagactacaggatggggctgaaagtcccaactctctaatcatgcctaggtctctcccatgaccagtccccgtcctgaagctatttaggggctgctagacagtagtcattcattagcatacaaaagacattcttgtcactccaggagctagctcttatcacgtttaggagctgtatgccaagaaatggggacaaaacccaaatatatatttcacaatatcacatccacccacttgaattttgtcttgccaataaaatgtaagtgatgtgcaccacttttctgtgaaattgttaagaggaagcatgattcacctttctctcttttccctttgccaaggctacaaaatgttctagatggtggctgctcctttagcaaggatccaagtcaggatgacagggacacaaaacagagctcctggctgactagcaaagggcacgtaacatgagcctgacatagacctttgttgtataaagtcgctgagaccttgtgttagtttgttgccatagcttaacacagtatcctgacagatacataaacaggcacgcagaaatagaaagcgtttgggatatagaaaatgattctcccaaatatggcacttgggcatactgcatgcttttgaaaattgaggcccagtgcagtggttcatgcctatagtcctggcactttgggaggccgaggcgggaggattgctagagcccaggagtttgagaccagcctgggcaacatagtgagacctgtatcttaataaaaaggaaaaagaaagaaaattgaaaggactcagaaataagcctcagaatcaaggtccctctaaccctcttctccttcctttcgacagcagagagagggactgtctctgaaatttccttatctaaccaagaaagcttcttgccaaaagaaatacaattgcctgttccctccctgttacctcattatctacagcagaaaagaaggttgaagaatgtaaccacacctggataaacttttccacaagataatgcctgcctctccacctcacattctaaagataatcatcatttacaagttaatttctgtatccctggtccattcattttccctaataatcgtttaccaccctttaaagaactggctacattccctatatccttcctcctctatgaaaaagggtatagaagcttctgtaccccattaggagattggggtaatcactgtttgattccctcacccacatgttaataaatttgtatgctttttctcctattaatctgccttctgtcagttgattttcagtgaacttttacagaatgcaggggaagtttcccttggcccctacagttttgcactgtgagcaggatagcaaaactgctctgctcttctggaagccacagtcaagggagcccaggactcaacaaacccgtaggataagaaattcttaccagccaggctccaagcctctctttgtgcaatctggtccagtagacagtaaaagtcactgtccctttccctctccaaagtcttttttttttttttttttttttttgagacagagtctcactctcttgccaaggctggagtgcagtggtacgatcttggctcactgcaacctctgcctcccaggtttaagcaattcttgtgcctcagcctcccgagtagctgggattacagccatgcaccaccactacctagtggtggtgctaatttttgtggttttagtagagatgcgattttgccatgttggccaggctggtctcaaactcctgacctcaggtgatacacccacctgagcttcccaaaatgctgggattataggagtgagccaccgtacctagttgaaagtcttgattaatggaggaaaaggatttgtgagcctagtcttaggtgtagcaactctggtgtactttttggtatgaaaattcatattgtctttttcctcccagaaatagtcttgtcttttgtctttgtctttctgtgttgttctgtcataaagagggattgtgtcaatatgagataataagaagggtcaaaatctagttttaaagagtttaatcaagaagaaagctgggaatggccattctgggacacacagatttcagagaaataggatcagtgctctgaagttaaaagttaagtttttgcttatataggaagaagacaaagaaatttaacaggattatatttcctatatactggtttaagagttataacaaattaattagttagagtttgttttcttttctgtatggcttgttttattcatagctgattttcatttcctttccaa

SEQ ID NO: 38082 - DNA, 2300 bp, Homo sapien
acaaacaaaacaggccaggcatggtggttcacgtctgtaatcctagcactttggggggctgaggcaggaggattgcttgagctcaggagttcaagaccagcctgggcaacttggcaaaaccccatctccactaaaaatacaaaaaacaaattagccaggcatggtggcacacacctgtactcccaggtactcgggaggctgaggggggagagttgcttgagcctgggaggcggaggttgcagtgaatggagattgcaccactatactccaccctgggcattggagtgagacccctcacaaaaaataaaaataataaaaataaaaggggacaatacacaggagtctgtatatgctgccattgcacctgacatgtagaagctgctctacaaggcttctttatctactcaggatgtgaaactttgtgtactgctattttaatatcttttgtcttcagtataaaaaaagcaactcctcaggggaggataaagcacaccacaaggattgctacatcaataacctctatgagagatgtggacttgtcaagtcatctccatgatggatagaacagagagcaaacatctctgagccaagttgatgctgattcactgaaaataatgaggtgaacatcctggcaattagttgaggtaaaaaaattatcctttattgtggtttggtgacattgtgctaatttagaaaccatggatgctggtttatgtgaaagtttttgttttctttcaagtctctggttggaaacatcacatggttggttgctgttgctgtttactgccacagcctgttcaagtctattctcggagagttttcttcatataggagttggtactaatccaagtgtaaaatccggagaaatgtgtgcacagctttctgtgtggattcttagctaaggtttgaaaatggtctgctttgagctcatctgaccagaagatctgactgctgtcaggcaaagaaaagggtctgtcaggaaaggactgggcaccccaagtggaatacggaaagagaagggctgtgcctccttgcagaaaagagcacagctggtgaagctgccttcacatcgtccaaagtttccagttctggaaagttccagttgtaagagtgaaatcaatgccaagaggcaggtcagtggaatgagaggcactgagaaactagccactgtgggtggaaggggaaggagatttggttttgacaagtccgtactcaggtcttcagtaaggagttctgaagtcagggtgaagcctttgtttattctagaggaggcggagtttggggtctgggaaagaagataacttctcagaaagtgaaaaaaagctcatgtagaggatgctgggcaaaataatgggaaggaataaatcagcattgtagagaatgtggttggatcataaaatcccaggctatagagattatgtgctcaaagcctctgcattttatgtgaacacacacaaaccaaatgtcgaccagatgcacaaaaatgtgcatacatggagcagccaaccaccaatagtaaccagcatttcacttctctttgcatctcagttggctgtacctggaagggtctagactttgcctccttctcgttctagcattctgacactgtgtgcagtgtaatagaaaacgcggtttgggagctaggtttgcccaacaatagatattctggggtgattttcatcctttgcatttgtcattacgatgttttgtgtgcttgtgcaaatacaggacggttcctgaaatgtgtctctgagcgttcttaactgtgtgtaaggtaagcgaggaaagtgtctaagacagaggccaagaacacctgtcacagggtacccgcctagagtgtctgtaccgcatcctttctgctacactgtttgcacacacacaaaagggccgaggagccagggttggtgttggatatgcccagtacgcgtgctgggtgttggaaggatggggccggcggtaacaagaatcgatatatatttaccgcgggggcgggggtgggggtgcgcggaggctgcagggcggggcagcgctaatgagagcaagcccggcttgtggttggttctggagtctggtacccacagaggagcaggcagggagggaggggatgcaagcgggaggataaagcgatgaagtgtgctgcgttaccgcgcatcaggcgctgttgttggagccggaacaccgtgcgactctgaccgaaccggccccctcctcgcgcacacactcgccgagccgcgcgcgcccctccgccgtgacagtggccgtggcctccgctctctcggggcacccggcagccagagcgc

SEQ ID NO: 38083 - DNA, 2300 bp, Homo sapien
atgagaggcactgagaaactagccactgtgggtggaaggggaaggagatttggttttgacaagtccgtactcaggtcttcagtaaggagttctgaagtcagggtgaagcctttgtttattctagaggaggcggagtttggggtctgggaaagaagataacttctcagaaagtgaaaaaaagctcatgtagaggatgctgggcaaaataatgggaaggaataaatcagcattgtagagaatgtggttggatcataaaatcccaggctatagagattatgtgctcaaagcctctgcattttatgtgaacacacacaaaccaaatgtcgaccagatgcacaaaaatgtgcatacatggagcagccaaccaccaatagtaaccagcatttcacttctctttgcatctcagttggctgtacctggaagggtctagactttgcctccttctcgttctagcattctgacactgtgtgcagtgtaatagaaaacgcggtttgggagctaggtttgcccaacaatagatattctggggtgattttcatcctttgcatttgtcattacgatgttttgtgtgcttgtgcaaatacaggacggttcctgaaatgtgtctctgagcgttcttaactgtgtgtaaggtaagcgaggaaagtgtctaagacagaggccaagaacacctgtcacagggtacccgcctagagtgtctgtaccgcatcctttctgctacactgtttgcacacacacaaaagggccgaggagccagggttggtgttggatatgcccagtacgcgtgctgggtgttggaaggatggggccggcggtaacaagaatcgatatatatttaccgcgggggcgggggtgggggtgcgcggaggctgcagggcggggcagcgctaatgagagcaagcccggcttgtggttggttctggagtctggtacccacagaggagcaggcagggagggaggggatgcaagcgggaggataaagcgatgaagtgtgctgcgttaccgcgcatcaggcgctgttgttggagccggaacaccgtgcgactctgaccgaaccggccccctcctcgcgcacacactcgccgagccgcgcgcgcccctccgccgtgacagtggccgtggcctccgctctctcggggcacccggcagccagagcgcagcgagagcgggcggtcgccagggtcccctccccagccagtcccaggcgcccggtgcactatgcggggcacgtgcgccccccagctctaatctgcgcgctgacaggagcatgatctgtgcccaggccagggctgccaaggtaagcgggcgtagcgcggggacactgtctgccgccccttcccccccgcccttctctgggcggcttccccgccgcacgcgaggccccggcagcgccctcccttctcggggccgagatccaccctcctccccaccctctcgcttctcccgcgaggttcaattgtcagcctgggtcgcgccgccgcccggtccgggccggcatccccgggtggcgaccccggcttgggtactgcaggcgcacccggccctcctgcggggtacggagagaaacaaagaagcccccaagcgggttcgcagcgcctcccccgcccctcagcgccctcccagtggcgaggaggtgtcaggggagggggcggagagacctacgtaatcccccttcccagcccacacccaccccttgtgaaccaaagctctggatttgcgcttcgccttgggctcgcttttgaacaattgtgtcccatgcaatgcccgtggttagcccagagagcgcccagagcctccgcacgggctcgccggtgctcgctcgaggggcgcgtggccaggtccggcccttgctcccatggacgggtgcaggaggggaggaggcgctgtgtgggtgctcccccagcgcctccctgttaccggccggctgcgccgctcagccgggcctgccacctgagttttagcgggagcagtcatgtcgcctaccgtattgcgacttgcagacaggcagggagggagctgccggggcggggagggggggggaatgcgtccggtccatttttggctggaggtgcgcttcctgctacccccacgttcccgggcggtgacaatgcagcaaaatccgagggctcaaacaatgtggcccctccatccccggctccagggcattctgattgctctgccgctttgacgtcccggccacttggctgattttcagagccatgatgcgcggtgtctctgtcttgcacacagaggctgggcaccataacttcttccctgccgaatttcagcgcgtaggggga

SEQ ID NO: 38084 - DNA, 2300 bp, Homo sapien
taaccacttcttctcctgttttcccatagcctttttgttcatagagctaagatagcacttacaatattgcagttatctgagttgtaaatgtgccacagtctccttatcttaaatatgggatgagcttcttcagaacaaggacatgtttatattcatctctccagcacctagcagtttgcctggtacatcatgtgttctcagaaatgtttattgagtggatttcaggtcataaaaatgccctctaattgtataggcaggaggtaggtaggaatccttcactttgtgagtcagctgggggaatcagagaggttatgtaagatgcttaagggggaaccgagagccaggactcaaatccaggccttccaccacccaccctcagtaaacaaaaaaacacgtagagaatgagttcaaatgctgtaggttttggttatttatttttttccttgaatgatctggattatccattttgacaaaatttatctgataactgctctgttctgtcttgctctggccttagaaggaaacatggcccaagcactttaacctctaatccacacttaaacagaagacgtgagcacccttctgcccactttctctctaagtcctggttctatcaaccagagcttgctaggatgatggacacgtctagggaatgtctactcattatttgctcaagcaacattgaaccactgtaagtgcttctgaaatgacctacagttagaccagagacaaccatccttcctgggccagccaagcttgactgagtctcccaatggcaggtttctagactaacaggtgtgacttacagacatcaagacacctgcttctctcccatttacctgcttccttttccatcctaaaaaacaggacaagctacattaggaaaccaggaagttgcaatacccacatgtcctctctgtaaaacagccgttggcacatttgatgttcacggacttttagagaaaacagtatgaaatgctctgtggggttttcttcaggtcacttttcctctttgagggttagtttcttcttctttaagagtagaaagttgaatcaagtaatcccaaaggtcacttctaacatcaccattctgtgattatttttgttggtttattcagttgagcaagttgaaaggagaaaaagattagaaataatttaatttggcaatatgtagagaagaaataattaaggctacatggtgcagcctgtggttatctgataactactttgagccttctgttaaaactattctttatacatttctataatcctttcttatttgtaaaactaaatttactatattaaggggaaagatttgtggcatttcttgttcccagtgaggaatgcagtggtggaaaaagtatgcaatctccaaaatgtacaaagtgtttagaatttgggggtttaatagccaaggttccaagcatttttattctcaccactgagtatgtttcacagctgaataactcttatggtcaaagtgttccctgcaattcatccaacaaattcccctttcagtttctctctggttcctcattttgctctttttttccacttctttagctccactcaacttcctataacatcccccacatacataagccatatgccagtagtacactgccaccccccacccgccccaccaaaggcaggagtcagagcttcacaacctccttactcagctcaatcttttctactttctgaggtttattcattaccattgcttttccaagttaagacacaatgagatatagaagcaggtcgaatcttttaacgatattgtttatcgtttacgtctttttctcacagactttctgaccaccatttggaacctcaatgccatgcatttaggtgtcttaaagcctctttaaatattttaggaagcaaagcagcatattagcaattttatgtatcccatcccacagtgtttggatgtgtgggtattggtaagtagttgtactgttctgtgacatgggcactgaaaggagaatgataataatgcaattacttactggcaacatatgacaaagatcactaagctcctaggtcatctggattcccatagcaacaagtggtatacactgtttgcattatttgttcagaactgatacttttcctgatttattggtctgaagcttgatgcatatggaggcctgaaaaataaggatgtggcatacagacaggctctcctggtgttatcaggcatctatgcatgtgatatgcagggagaatttggtggatggaacttaagccggtaccaggggggcgggggaagagttgggaaaggacgccatctgtgc

SEQ ID NO: 38085 - DNA, 2300 bp, Homo sapien
tctcccctgagcaccagtatatagagcacctttacaaacacactaggctgtgtaacccttggcactttgattttgtaagaaaacctgaaggtttcttgaatttaatgcaagttcataagagtgaggactctggggtgacatgaaggaagcctgttcagtgacggagcctggctgagtgcccaggccctatgtctcagtgaggtttccttcctaaagcattaccagtaatatcttagcaagagatttttatttattgagcaggtactgtactaagaacttgacttgcattgtctcattaaattctgacaacagcccatttacagaggaggaaaccgaggtccagaaagattaaattgtccagtgatagacccacagctgggaagctggtagatgctgcctcagctttgattatggtctaattcataattattttgaatctctgtaatactgtaagatggtattagcccacttaaagtatgtgggaactaaacaaaccttgtgctcttgcagcagcctttctgtttggggattttacaaaggtctctggacagagcctcctggagggctgtcagtttactgagatcctccctgaactgcccagaatagccatggtgccttgagataggtgggtggttcctgcttccctggccttcagcgctttgccagtcttcctgagaggagggatggtttccaggcaacaccatggtccatctattttcatactgctatagtgacaagcattttgaaaaaataagaaatatggccccaataaggtgatgagatgctttttggagtctgtcttgtctgcctgtcataattctgcagcaaccatcagtagggccaaaggaattccaaacaggagacacagatgagtgaaagggcctgcctgccccatggccatagaggaccaagactcagaatgccaacgctgtgctttctcaggctaatagactttttacaacatcctggtcttggaggatggaaaaagtgcaggcctaaattactgctaactagattgatctaactgaaagagtagactattgctgtggtctgctcatcatagctggtaaacaaaaagtcaataatttgcatttgattaggtgcataagaagttacagttcctgggatctaaacttcatgagtcaacacttttttaggccttaatcttctcttcttgaaaactacatatagaacaacatgaacttcaataaccaggaccccccaaaaatgttcatttaaacgcaattttaatatactttgatgaagtcagaatcacccttgcttgtttctgcatgagttctatttgctgcctgtccttctgtattttcaaagttatctgtgcccaaaacgagttagtgctctgcatcaggttggctcattttaagtgctcaaagttgtaaacaatacaaaaatgcattttttctcatcaggtacaatgttttctacaataacattggctccaagggagatacagtcctctgagattggattttattgaaaatcatcgtattcaaagagtactaggatgtttgaaatccttcatagaaacttcatacagcccgaaggcattctgtagagtgaaagatgtaaatggaggagtgactgcctcacccagcagggaccactcctaattctgggctgtgtgtagggacctgaatgctgcagggatcactcagaggttaataatgataatcatcgtttgccttaaagaaggataaaatcagatccaatctaattgacgttggagaactcgagggatggcatttggttggggaatagtcacaccttcagggtcattctgcacatcccagtccttctggtatcaagtgggttagagccgggagaggcagagactccaacaaaacatggaaacgcaggacaccctggtgcacttgtgtttttgttcttgctgtccccgtgtgaacccagagctgcagcctttgtcacgaggaagatgctctatgccatgtttcatatctgcccagcagggcagctcactcacagcgcgtgtctcccagcacatctttcgttttcgtgtgatgacggtgactgagttgccggcgtgccctgaccctgctcactgtctctttgctcccacagaatctgtaccagaacaggtttttaggcctggccgccatggcgtctccttctagaaactcccagagccgacgccggtgcaaggagccgctccgatacagctacaaccccgaccagttccacaacatggacctcaggggcggcccccacgatggcgtcaccattccccgctccaccagcgacactgacctggtcacctcgga

SEQ ID NO: 38086 - DNA, 2300 bp, Homo sapien
acaaaggaggagtctaaggaactaaggaagatgaataaggggtatggcatccaatggtctagatctgggcatctggtgagtttcagtccctcacctgagagtcagtttcctgaggaaggaattccaatgagactgtaactgcccaaagggttcaccttgcccactgtctagacagagccgattcatcaagacaggggaattgcaatagagaaagagtaattcatgcagagccggctgtgctgtgcgggagaccggagtttattattactcaaatccatctcccggagcattcaggggacagagtttttaacgataacttggtggggcagggtggagtagtgggttggagggggtggaagctagtgagccaggaatgctgattggtcagagatgaaatcatagggagtcggagctgtcttcttgcagtgggtcagttcctgggtgggggccacaaaatcagactagccagtttgttgatcttgtggtgccagctgatccatcaagtgcagggtctatgaaatatctcaaacactgatctcaggagcaatttagggagggccagaatcttgtagcctccagctgcatgactcctaaaccataatttctaatcttgcagctaacgttagtcctacaaagacaatctagtctccaggcaagaaggagatctgctttgggaaagggcttttactgtctttgtttaaactgtaaactacaaactaagtttctcctaaagttagttcagcctatgcccaggaatgaacaaggacagcttggaggttagaagcaagatggagtcagttaagttagatccctttcactgtctcagccataattttgcaaaggcagctttaagacaaatgtaagtttcaagttttcataacacctcaggacctatgagagttttgactcaccaatcctggccatgttttactctgattcttatcaaatgagactctaagggacagacatgtgtcaaagaatttgacaatctcttatctggcctggtgccgagccccattccgtatgtcactccactggttggctccctctgctgaacagcccaggatccctgagatgcacatcacatttgggcttcagggcagtcataccaagatttgtctacaagcagcagccaagctcacaggctcaccaggggcacctgcttcagtgtgaaaagatgaataataatccctttgtactccccttgcctgaagctgtgagccctgtgatgcccagtcattactcccagtctcatatcaggcaggttgatgtgaatatccaatcacaacctatacagcatcaagaatactaagagaagaaagaaaaagactgaacccacacaatctacaaatagtgagactctgagcaagagattatggatattttcatttttctcttcctagtacagattaccttctaaaaaatggacactgtggatttgcttaatacccagagttttaaaattattttctgcaaacatacaacacatgcaaaggcaaataggaagagtcattctgccttcaaatactcaaaatcatttctgaataaaaccttcctagaagagaatggaagcaaaaaccctagctattttgattaacctattactaaatattgagcaatgatgaaaaacaaaacattttagcaacattgttttcaaatacctactagattctagataatccatgtaacaattgtgttctgaaatttccgaggaaggcaattgattaattaagagagacctcagaagagctccttaatgccttgttcaggctcctctccagcagtttcctggaaatccctaaataataataagtggagatgcagcagttcaacactctactttgctaaatggaaatacattataattacaatagtaaacatctattgacctatcattctagtgccttaggccctgctttaataaatactttttgcaaatttgaatgtgaaaagacatggtttgcataagtagttacaaagggtcttttctattacagtaattgtgtttgttgatttccattttcctgaaaagtacccatcacccccactagcagatcctctactactgggaaaaacattaggttgctagaaagttgttttaatcaatagttgcccagtgaaatcactgtcttcgttgcctgtagctggtaaaatcactgtgaataaccatgcttgtgttgaagtgtgaatatccatttcagtgcttgttttgtttgtctcccattttccttctttttacagatttttaaaagcattggtgctgatgagaccgtccaaggacaaggaagtcggaggctgat

SEQ ID NO: 38087 - DNA, 2300 bp, Homo sapien
ataataatgttagtatttgcttacttacctcacaggagaatgaaaagaaagagtaatttaatgttaataggttctttgaagatgaaaagtacttcataattgctaagttctattacatttttaaaaacccatctcaaagatacccctctttccttatccttctaactttgtttaattaaaaataattatcctttctcaacctcattatttaagtaataagacttcatgacgttcccacacaatgtatgtttccatgctttactcagtgttactgccttcaggtttggtcttctcatattttctaacttcttatatattagaaaatctagtgaaaacctgttgtgtctgcctggggtagatttcatttcagagtgtgaaaactgcatgaacagccagctttttttctcacactctttgaaagactcttgacgctgctaacatctaaggcaaaatttctcaaaggtggtggtgacccttccattggtatctgaatccctggggtgtttgttaagatctaggtacctggagatcagactctatggggtgggttatggaaatctgcatttaaaataaattctgcagttgccgactaaaatttgagaaccacccattccaagtccctcatctttttttttaagatgaaaaacatagtctgaaggtcaaaagtgaagttttttgccttaggcatcactcattgcatttcctcatggatactggaagaagggatggaggacagaggcttttctagaagctgagagtatgaatggctccacttggcctcctctcacaccaccgcctgcaggcacatgcatccttgcctccttacaccccactaattgggggggtcttctttttatctaatccccctcatatcaccagcctctccctccctctggttcttgctttcggcgcctctctcattagtaagtacatctgcaatctacacttgccatttatttccctcgatctcaaggaaaaaggggctgactcttttctttttttcgagatggcgtttccctcttgttgctcaggctggagtgcaatggcgagatctctgctcactgcaacctccacctcccgggttcaagcaattctcctgctggggctgactctctttcaaagctaatgtcttcacttgggctatctattgtctttccctgcctcctctgggctcttcttccatccactttttgctctctcttataattcaagatttctctctcttctgacattgtctcctcaaaggccttgcatccttctagcggccccacaaagccaagctcctagaaagagcagttttcagggctgtttgatgctggtgtttaaaaatacgagcaaggccaggcatggcggctcatgactataatcccagcactttgggaggccgaggcaggtgaatcaactgaggtcaggagttcgagaccccccccggccaacatggagaaaccccttatgtactaaaaacacaaaaattagccgggcctggtggcacacacctgtaatcccagctacttgagaggctgaggcaggagaattgcttgaacctgggaggaggaggttgcagtgagccaagatcgcaccattgcactctagcctgggggacaagagcgaaattccatctcaaaacaaacaaacaaacaaacaagcagaactacctttggaaagagaacacacagtacaaagagtaggcggaagtgccagcaataacatccccaccacggagctgtttttggaataaatattagggaagcagagttttgattctctgcagctccctgtcctcctggcacaatcaaatttccctgctcctggcttttataccaaggccagcattgctgtcattccctgtgctccgtgcacattcttgtgggctgagttcagggtttggccacaggctagtctcctgtctccacagctaatagggggtttggtgtaggccctggcatccccaccagtggtttgctttgtaatttttccctcttggcctgtgggaggactgaggcatggtgtctagaactcctgcgcagctgcaggcctgcttggagggtgaggtggctgttgtggggcaggtgagagcacgccagggccatagctaacctccagccttcatgaagagcccatggcaactctgtgggaatccttccagcagcccgcttatggctggagacagaggtgtggcttctatctaagcttttccctctgactcagtccaggaggcaactgtcttgggaagcaaatgataacagcatctgggagattctcttctggatggactagcagggaatcaggacatgaactca

SEQ ID NO: 38088 - DNA, 2300 bp, Homo sapien
gtgtgttagaatgttttaccacatatcacatgtgtcatagtctcctttctgagaccttatctcttttatagaaagttctttcatatctcttgtatgtcatttttcatattttgttttgcttattagcttcactaattcttgcttaagttgtatctcatctgttattaagcccataattctgtagtagttttagttagtgtgtttttttctccaattccaaaattccattgtattcttctttggagtttccagttctctgctgaaaactctttatcttgcaatttaatttcttgaagatatttaacagaattattttaaaatctgtctttaaactttaatatctggatcttctgtgtgtttatttctgttttctttttcccttagtttttaagacaattctgtgtcctttgtttaaattaagtttcagacatggtgtataaaatattatatgggtaatgtgttgctctgaatgatgctttttttccccagagagaatatttactgttgccatttgaagctggttttcagcccttgggtctatttcccgttcatccacacccctagggtatagctcttcggagtcccagctgaaagcctagttgcttaccagcccctcatcataaataggtcctaaactccaattttttttttgtctccccaaccccatgagatgactgaaagctctgcttactttctcactctttcagccatggctttaaaatcatcaaatacctcatgggaaaagtggtggctttctgagctgcctatctttccaggatttcagtcatccaagtccttgctgggagaggaaatttttaacttttgtcaacttttctattttttcttagtgagaatattgaacacaaataaactagtatatcagtgccagaagcaaaactccactgagacagtctgagtagagcagtggtgtgatttggtttcgatttttaaaagatcactctcattgccttgaaaatgaactatgcgacattagggagaaagaaggatggaagcaggtggtccagttagtaaactatcacaataatccaggtaagagataacgatggctcaggccatggtggtaaggtggaaatagagagaagtgatcaaacgccgcatctagtttgaaggaaaagacaagagggtttactgacaaactggagatgagcatgagagaggaatcaatgctcatcccaagatttttggcctgaacagctagaaggaaggagatgaagaaaactgagacggggaaagctgggtaggagtgcattcatgaagaccaatcagcaacttacttttgtgtatgttaagtctgagatgctaatttgacatgtaagtggagatgccaaatgcatagtcaaatacaccagtctgaagttcagggaatatttggaagctagagatacaaattctgtagtcatgagcatatagatggtaattaaagtcgtaagaccggatgagaggacctcgaaagtaaatatagagacgactacagacaatataatagtgtctatttcatagggccggtgtgcagggttaataatatttatacaactctgcctccagacccctctcccagtgtacggagatcaggatctcatcacccctccccaccacgtgaagtcctgcttacagctcaaatgccttttattaaccgaagtgcctccagacccctcccctcctcaccacgtgaagtcccgcttacagctcaaatgccttttattaaccgaaggtcagcttttgtgactctcagacgctcaacaggtgcgcaactctgctaacgcagtaggctgtcctggccaaagggtggtgctgtgagtcgcctccagcctccgggccgtcccgaaagctgcaccttctccccctgagctgcagagggcgcgcgtgaggcatcgggcgctcaggaccccgcgggagctcagcgagggggcgggcggccacggagtgaggccggggcggggtcgggcgcggggcggacgtggggaggggttggccggggccagaagcagggtgcagggcaggcgcggggcggtcacgggggcggggccggtcgcggggcgcggggcgggcccgagctaccggtagtctgcctgccgcagtccgagcgccgcgctggggagagcgggtgtttgaaggctccgcggaccggcactaggagccgggggcgggtccgtgaccctccggctgctcggagtgaacaggcggccaggaaagaagcgggcctgaacaccatgatccctttggagaagccaggcagcggcggctcctccccaggcgccacctcaggctcgggccgggca

SEQ ID NO: 38089 - DNA, 2300 bp, Homo sapien
gaaggtagcagcaagaaagcagctgaatgatgatactccatgggtgtaggcgtatcatcaaagaagtcaactattactttctttgatagactgaggaaaattggagtttgaaagattaatagtttgatggtctttttaaggtatctgtagaataaggctgtgaaactgagaggttgtgaccagagattagattattaatatttaggccaagtgcagtggctcacgcctgtaatcccagcactttgggaggccaaggtgggcagatcacttgaggccaggaatctgagaccagcctggccaacatggcaaaacccgtctctactaaaaatacaaaaattagccaggcgtgatggtgtgcacttgtagtcccagctactcgggaggctgaggcaggagaatggcgtgaacctgggaggcggagcttgcagtgagccaagatcgtgccactgcactccagcctgggcgacagagtgagactccgtctcaaaaaaaaaaaaaagaatattaatatttaaaatttcagtggtgaaatagctctttgtaattatgaggccttggatataaggctggaaaggcagttttttagaccaggaaatcaagaagctgtgaaggtaggctgtctgggtcatggacatcagtgtggaagtcacctaggctgccagcagacctgggagaagaggagggcggccgtggcaggaatggagaaggctgtggcctgggcctgagggaagactctgtgcctgagggtagaagtgtgaagtgagcaaatacaggctagaagagggggaatgaagagagcagggtctcctttcagagaagagggtaaaaggagtgtgtagttcttgaaggactgaggatgttacaagaaaagagctatccggagcacagaaagactcaggagggccgatagggttgaagaaaacaaacctgtatggcaatgatagttcaaaaaataattcagagattttttaaaagatccttagttaattagataataaaagatgccacaggcacagaaacaacctttaaaattttttatatattttaatgggccagaatacttaattttcagtacactgactaatatgcgtcatgaccactaagttagttttggggatgtgacttaatagtgtttctttagggaaaacagcaacccaagtgttttagccaaatttaatgggtaccattgtaagctcaaatacacaagactgcagaatgtaggtctgtgagctgaaaaatcaaaatagtaattattgccctgaatgaggtgggtttttgttttgttttaatgctttctttgttgttgtttgagagagtctcactctgccacccaggctggaatgcagtggcaccatcatagcttcctgcagctcccaacttgagctcctcctgcctcagcctcccgagtagctgggaccacaggcacgtgccagcacagcgggccagttttttgtttgtttttttggtaaagatgggtctcactgtgttgcccaggctagtgatttgttttagagctttctgttccttagtaaattttaaattttctatcaagagcctttccccatctcaaaacattataatggaagtacaagctcaatccaaaaagaaaaaaactaaaaatgattcaaaagtacataatacagaaaaacaaagggactctcctctttttccttccgtgactcaccttttaaaaggtgagtttatgcctcccacagtcattttacatacacacagaaactggtgtgagttctggccctgtacttgccatctatgtgaccttggcccttaaatctctttatacctcagattcctctgtccataaaaaggggctagtaatagtaccgacctcatagggaatttgtaaggatttcattggatttgctgtacaaagcccttaaaccagtattcagcacataataagcactcaaaaaagtaagctattggtatttcctgtacccttcctcccacagtcttgctatgtggtctgttttactgtttcttccccggtaatttggatgctatgcatttcatttttaatttcctagtcacttcttttgaaactttaacattcacaacctctgtttctcactcaaccatttcagaaatcaaaatttaggagattagcatacctcgcatttcctttccaacctcttcctcccactcatttattctatgggggtttgtcacaaatgagtagtagatacatgaccttgagtatttcgttttttcatagaaatagaacattttcattcctttttttaattgtaattaccacagtttttagtctttggtctgttttt

SEQ ID NO: 38090 - DNA, 2300 bp, Homo sapien
gtattataatactctctacaacccctgcccatccacccagcacactagctggtaaggaacttgtgggtggaggccctgcagcctcttctatagtaaagcacataggagtcacgctaccatttgctggctgtgatccctctcctgcagtctttacaagtctacagtttgtataattctaggaaacccctttctctggtctctgggctatcctgtctctttatgggatgtactgggggcccttcctcaaaaagtcaccttttcctctgatgcattatccaagacatcattaaggtagttagtggagtcgatggctgagtcacagtgatgaatggatatacaggaaacagtggactgcaagtgtacatcactgctatcctcaaagaacaggaaagacagtgtctactgcagtgatcaagttccagcctgttcagaatcacccataaaggcattaagtgcacaggaagtaaatgtgaacagaaaaaatacccgagatagcggctttcaaatagaaatcaaggagcacttcactacataatactatttcctatcaggtagattagaaaagcctctccattaattcaaactctacacttacttttacttcagaacagatggccaacctaagccctggttttctataatttggccatagcaaagaaacaaaattcaaacactaagataaagtaaaagttgtcagagaacagacagataggaagcaccacataaattcacaacatatagacaataggacagtgtgtaacttaaagagcaaaagcacaaaactgtacagtgctctgccatttattttaaaagactgtagagattggaatatttatctgaacacactgacaaaagtgctctcagggagacacttttcactgtataatctactcaaagaacacataaatatgtttttaaagaaacaactccagaatagagataacttgtaacaactgaagacctcatactctactagcatgtttaagctcattttttttttttttttcctgagaggcttctcttcaatgaatattaagaatgtaggaagagagctcatggctgtccttcattgtagacaaccacaatggcattaagcctgctaatgctaagagggttaaactgaccttttcaaagcagataccagatttctgtttttgtaggctctggtgcccagaaggaagttcttttgctttataatatgtttccttataagactaataaaacctaaggatacaattatctaacatgcggttaagttgtttggaaagcagatggataagaacctattagctttctttttcctttccttccctttcccttctttttctttccttttttttttttttttttttttttctgagacagagttttgctcttgttgcccaggctggagtgcagtgatgaaatcttggctcactgcagcctctgcctcctggattcaagcaattctcccacctcagcctcccaggtagctgggattacaggcgcccgccaccacgcctggctaattttttgtattttcagtagagacgaggtttcaccatgttggccaggctggtctcaaactcctgacctcaggtgatccgcctgccttggcctcccaaattgctgggattacaggcatgggccaccacacccagccagatgctgttagcttcaaactaactttcctaagttaactttatatgtatatgtacacatataaattttctaagctttcaaaatgtttggaataaaaacaattattttgcaaatcttcaactgggcagatggttggtgtctgaaatagaaataaataaaagcaaagcaaacaaaatattccaaagtgatagagaatgtccacaagctacttaacaacatgaattcaaggtagagtgaaaaaccagtggtcttcctcatcattctcaggtcaataatttagaaaaaatcccttcagtgctactaagcttcaggctttgtaatgaggactgaaaattccaggggaaaggaagaggaagagaaaggaaagaaatgagaactagcaaagatcaacaaacattttattaattctgattccttttatcatgtgcttttttatacaaagcactttcaaatacattacattatcttaaatttataataggagtttctttcggattcagtttaaaaatgacaaatagcatttgttgtgcccaagttagaattacaccaaaattaccatgtgctggcacataccatcatcccactggtggctggaaaactgggttgcaggagtgtctgtcactgagatgggccaccaccccagtggccatatggtagag

SEQ ID NO: 38091 - DNA, 2300 bp, Homo sapien
tttacagttgaaaattcctgagtaagacagggtgagggaaaccctgtcactattgtgcaggcctaggggaagtggctcgaggcctgggagatggctgtgaggactttgaaaggtggagaggaacacccggctgaggagcagcatgcctgggaaagttcatcactgtgtcgcctgtcagtgtgatacggcagtggaggcacaggtgggcgaggtgggtgtgggcaggtaggaggggctgcggccaccaggggccacagtgtcatcttggaaggtgtgtgcttgactctggcagcagaagcccgtaaagtatttggaggatgagtgaggtgatccgacctacattattttttgttatttttagtatgttcttaatggacccagctctaatgagacttttttctaactacaaaagcaattcatgctctggtattctgattaaaatattcggttttaaaagaaggtggatttgtgtagattggtaatgcccagggactggctacggggagccatctttaggagagagatgtggccacactggtgtgcagtggtgagagcatgaaccagaggtgtggcctggagaagcaaaagacggatgtgaagccatcgtggcatccaagtgacagaacttggtaacagtcatgtatcaggagcgggtgggtcagaggtgatggtccagtgtccagcatggacgtgagtggaaggacggcagcgacactgcgtgagagaggacatcctggaggaggagcacagggaagggctgggcatgtgtggagtgctcactctgtgccaggccaccggattgctcccatggtgtggcggagcctgtctgttgcttccttgcctttggtcacttggctagaccccagcaatcctgagaacttggaaaagccactgggtaggtctggctgttgcgtttctctcagcacagagcccagctgtagcactgaggaattgtgtgccaaaggcgcctttgctggggctggttgatgcagcatccatgatctggtgctccaggaaccccagtgagagtagggtaaggccatggtggttttggtgggagctttgtcctgtccagctttcactttggccccagtggtgctgagagggcgccttcctgggcttccccacatccctggggccttggccatgctgtgactatgttggttgtggtgctaggttctggcttctactgcggccaaatgctgtgactctgcagtgacaggagttcagagtctgctgcatcatggccacctggagcctcagtgcacgccttccaatttgtggactatttttgacattctgtcagggtcctttctttataatcagcggtttgtgaggatgcctgtatacagcatatgccctcttatcccaaattcctttatttgcaatttttacagtttttccagaggtgagatgtttcagttgttcatgaagtaattgtcatacattgggattttttcccaagtatgtgtgtgagatagtcaccagtgaccaacactttgctttaccagaactcctgctttaatctttggcaaggtctggctggtgaaggaaccaacctgtaaagtgtcacatctacccatggaagcacagctgcccacagttcagacattggcccctcagagtttgctcttcttcagaatccttcttgcttctgcccatttctttctccttcctttttaaatttttttttaaagcatccagagatgctcagtgtatactctgttgcttaattctataatttccagagaaaagctgtagcttgactcaaacagtgggaccctgaaaatttgttcttttttaaaattttttcttgagatggaaccttgctctgttacccaggctggagtacagtggtgtgatcttggcacactgcagcctccacctcccaggttcaagcgattctcctgcctcactctcctgagtagctgggactataggtgtgcgccaccatgcccggctaagtgtttgtatttctagtagagatggggttttgccatattgcccagctgatctcgaactcctggcctcaagtgatccacctgcctcagcctcccaaagtgctgggattacaggcggaagccaccatacccggccaaagatttgttcttgaagtgtgactaggtgactgcctattcacctgagttatggagccatgttccaaatcttgtgccttccttcaggtgtgtttggaaagcacaaatgtgtacctcagtagtttcttctcttggtggcaacttggaatgggtgggatactccccgccccaattccctcccctgcccctgccccgggaggtatc

SEQ ID NO: 38092 - DNA, 2300 bp, Homo sapien
cctgtttctaggcctgagggttttgttgttaatgttgtggtctttctattttatgtctcaacttagtggaacaggcagtgttgagaagtcaggtatcatggattctggcctcggctttgccatggaccagctgtgtcactttgaacaagtcatggaatcatagtaggactttagagcaaacttagagacttgagaggaaacttagagaagagctgaccaaacctcttaggtgtcaaaataaggcaatgagtgagggtagaaatgaggtgaagcagaaagggtctgcatgaggtcaaggcccaaggtcatctgcacatccctgcaaaacactgcctgcctgtgctttggtttttgagtctgtaaaatggacaatttagagtagatggccttaattattcgtccatccacagatttcacgtttctgtttctaccctgtacgtcagttggattatttaattttctgtgtagtagattctacctgaccaagttcaataaagaaaataagtgtgtctttcgtccttagagtttcattccagggctttatattacaagttggcagtggagcagctgcagagccatcccgaggcacaggaagctctgggccctcctctcaacatccattatctcaagctcatcgacagggaaaacttcgtggacattgttgatgccaaggtaatgtgctttccctgcgaaccgcaggctggtgcctgctgaaggagaggagagtctactgtctcctggaaagtcctggagttaaggatttgggatgggaaaatccactaagtaaagctaggtttggcacctttaaaaaaagtttttctattatggattttaatgtttatataaaatatattttatattatagatatttctgtatacttttcttccattctggggaattgatgtggcagggaatgcagtgggtatgctgatgtcgccatcttgaattgaaggtagtagagaaatgaccagtggtggtttgctaccatgttggctttgatagctctcagcactttgggaggctgaggtaagaggattgcttgagccctggggtttgaaaccagcctgggcaacacagcaagaccctgtctctctctctctctctctctctctctctctctctgtctctctgcctgcctgcctgcctgcctgcctgcctgcctatctatctatctatctatctatctatctatctatctatctatctatctaatctatctatctataatttagccaggcgtgatagtgcacacctataatcccagctacccaggaggctgaagcaggaggatcgcttgaacccaggagttggaggctgcaatgagttatgatcatgtcactgcactccatcctgggtgacagagtgaaattgtctgtaaaattaaaaaaaaaagagaaatgcatctatatccagtcagtgctcattcaaatgtacccaactctttaaactttgatttttaaagtgtatttatttacattgcttccacagaataccaacccatttttttagctataacttatctttttgtacttgatcacactcacttgcatgtaaaacacatttgttctgtttaacaaacatattttgagtatatgctctggtttgagaaatgattctaagctatgtggggaatagaggtgcagaaggcttttgggggtttacagttgaaaattcctgagtaagacagggtgagggaaaccctgtcactattgtgcaggcctaggggaagtggctcgaggcctgggagatggctgtgaggactttgaaaggtggagaggaacacccggctgaggagcagcatgcctgggaaagttcatcactgtgtcgcctgtcagtgtgatacggcagtggaggcacaggtgggcgaggtgggtgtgggcaggtaggaggggctgcggccaccaggggccacagtgtcatcttggaaggtgtgtgcttgactctggcagcagaagcccgtaaagtatttggaggatgagtgaggtgatccgacctacattattttttgttatttttagtatgttcttaatggacccagctctaatgagacttttttctaactacaaaagcaattcatgctctggtattctgattaaaatattcggttttaaaagaaggtggatttgtgtagattggtaatgcccagggactggctacggggagccatctttaggagagagatgtggccacactggtgtgcagtggtgagagcatgaaccagaggtgtggcctggagaagcaaaagacggatgtgaagccatcgtggcatccaagtgacagaacttggtaacagtcatgt

SEQ ID NO: 38093 - DNA, 2300 bp, Homo sapien
gtcactccctgaatagttatgggcttctcctggtctttagggttcacttgtgctttaacttcacaggagggatgggcattttctgcattgtttcccactctgtctttctctcgtgtctcatgctggcgttggaagctgtaacactctgggaacctctccataacccagtctggctgcctcaccctgttgagctctcttcaaattaagcaagatctgactaatacattcttcagagatgctctgaccgttttcattatgagaactaaatgacttttcccagatcacattactgtaattaactttacactcattttgatactcttacatattataagagtggatggatggtatgctgtatttaccgagctggcatccctccatctgttcattcagcctgagtcataaccagagtttcctcatcccaagggtggtgcatttttcaaaatatgaaaggagccagtgacagctccagcccattcgcaggcttacaggaccagccattgccacaaaggataagcttcctgtttaccagttggcctgagacaaagtggttgtgcttcctggccatgcggggcttggcacacagtctgggctgtgtctgtcaggatggtgggctgaatgctcgctctgtgctgggctggctgggggtggcagggcccccacagcatgggtcctggacatgggccactctcgagagggcaccctcaggagggcactcagtttggcttcagaaccaaccctggcatttggaaaggaagcaaatgagggagggcggtctggcctcctttctggcttccttaatgcttctttcctttaggggtccaagccgggcaaatccccttggcacaaaactgggaatcctacaataaatttgtatcttttgtttttaagtatgcaggaagcaggcggtcaatgcctctgggagcaaggatccttttccacggtgtgttctatgccgggggctttgccattgtgtattacctcattcaaagtaagtatcctgctagccgcctgcggcctgacctcctcctagcctgctcctgctcctccatcagaggaaatacttgagatgctttgtttagattagagaaaggaggagagggtgattttaaaggctagtccaccatttcgttggctatagcttcctctgtatcctgtaatctcagtttttccaggagcaacgagtacaaataaaaggaccaggactaatatgcataagaagcccagcaaagcacgatgggctttcagtccagtgcacacacaggggctccatcaagattctgagattatataaagaagggacagagggaaggggaataccagatggttcacaggtggggaaagctgtggctgtgcgtccagcattgtcagactttttttgcactttcattctctgctgttgatttaatggaggagggaccatgagcaaggaactctggcaggggcagaaaataaaagcagagaccacgatggcaaaatcccgacagatgccgcttccagccccactgcactcaaatttgaatttgtaaagacaggccacaattactgtcagcagccaggacatttaaggtcattttaatgctactggtggcaaagcggcagcagttttttctagactggctttttttaggctcctttatccccacccagcttggctcgtcatccactctgcaacattttcacttcttcccaggatgtgagtgtcaccagcagacaagcagacaggctccagtgtcctctccagcctttctgcaccatcctgcagagttggtggagttgcagagtctggagggggcctgagatgagcgttcccaggaatgattcagactgaataatttggcctcctcttccctctgccaaagggacaggggcaggacatgagagggatgggtgcacttttgggtcagggttcagctttctggtgtgacagcctttctcccttaggaggctgctaagtcggtgagacctgggcactgcagccgactgcctgggttgaatggttgaatctcggctccagctcttgaccagctatgtggccttatgggggagtccgtcacctttctgggcattagttaccttattggtgtgatgtgtggtaatgttagtgcttgtgtatgaggtgagaattgaatctcacaacacaagagctgttgaacattgtgagatgtgtggaatattgagaacagtgcctagccatagaaatcactcaataaagattagctgtctggaccctgcttctgtcccttcttttcctatcatagctggcaccgtgttcatgcctgtggtattccctgtatccc

SEQ ID NO: 38094 - DNA, 2300 bp, Homo sapien
gagtagtgcatatcaaacatcttgcatggtgcctggtccgtagtagttacccagatgtaggacaagccaggccagccatgttacccagaggaacagaggtgaagtgaataggttatgcttggcaaagcgctgatttagaggactctgggtgttaataggtctgctgggaatgtcacatggcctgtgttcatagccaggcttttggccctgctcctgcttcaggtacctgtaatgctgctttatgtgctttgttcccagtataccactggttcccaagcccggctgcagattgcgactacttgagaaggttaaaacccaccattgcctgggtctttccgctgtcaattctattttaattggtctgggtgtggcctggacatctgtcttgtttgtttgttttgaaacagggcctcgctctgttgcccaggctggagtgcaggggcatggtctcggctcatggcaacctccacctcctgggctcaagccatcctcctgcctcagcctcctgagtagctgggaccacaggtgcatgcaactacatctgactgatttttgtattttttgtagagtttcggttccaccaagttgcccaggctggtcttgaactcctgggcttaagtgatcttcctgtcttggcctcctgaaaggtggggattacaggcgtgagccaccgcacctggcctgtttttttttttttttttttttttaagctcttcctgtgattctgatgtgcttcccaggttgaagttgcaccaccttcctgcttccacccttgccttgtgggatcctgtctatggcttgaactccctggctgttctgttgatccgcctggtgatgcttcctctggtcctggctgaggggaggctgacaggaggatcctccagcctgtgccagcttgagcagctgctgcatccgtttagcagactgtgctttgactctagaaagggtttagtactttggaaaaggtttataaactatttgcctttggaggccaaagtcacccctttgtgtatcagagcagagttaagactgctttcctcagagaccttggccagtgctttgtgccaccttcctgtggctaacaagttccttgattttcaatacagatgcaacccttgccttttggcgaacagttaagcaagtaaatctgcccttatttggcaatgtagtagactgattgaacttgagtttattgcagagaatggcacatcacatttttaaattttcacttcttactagaagactagttctaagaggtaatattcgtgcagttagcctaaactccatctattcctctacagtgcctttttgaatatttgtttttttgtgaggtcgggggctacctaacactctttgaaaggcagctgaaggggcaggtaaactgaagctagttgaaaaggagcccctgctgccccccactgacccctgaacccatttcctgcccaccactcacaccccaacccctgctttgacgtggaagggctctggggagacttggttgatcctcactgcctgagcactcttgagtcctcactctttcggctgcttgtaaaataattcttctgtttttttttttttttggtggtgggggagtatgaatgtggctttcagagttggatgttataaaacatagtcatttggaagttgggaactttttatttttgttatcttgtttttaatacaggatgtttgccacacgagtcactcgagagaatctctgagtcctggcgagggctttctgaggcttcgtgtgttagcagctgttgtcttccaactcagcggcaggtttgcctttccccacggacactctggaccttgtagctcctcaagcttccctgtctattgagcagataggaagccgtgtcaaatatgtggcaccttgaggaaatgcctagtgaatgacagtatgtcctattgtgctctaactttatttcagccttatttcttttctgaatattatttttcatttatcttcatttccttacctattttcttttcttctaaagtatgtatctttgttagctccatcatcctttttggaatgagcaagtataaaaataagtaaataaataagacccatcctaagtattttaagaaaccacccttttgcggcacacttgctaccttggtcttagctctgggctttggtgtcctctggcagtcctgctgcattgccttctctcccccatctgcccacccctgtcccagagagatttttctgtagcccctcatctgcagagtccgacagctcagggtcgagggtctttcttagcagtaatcacccactatgctctcacccc

SEQ ID NO: 38095 - DNA, 2300 bp, Homo sapien
aaacaaaaacaataaggaaacttattagacattcctacaaggcattcagatacagggtgagctccaggtttggaatgatgtcaccaaggacattgttttataacttgttcagttgtcctcagcattggtccatcagttttattccttgtgatgggcaagatggctactaatgacagtgtgggatagatgtttcgacgtcaagaggacagtatatcagaaactttctcctgagcatgaaatagaggtcctttccttcagtcagattgcgccaacctgggtcatatactcgttccttgattagcaactatttccaaaaaaattctgtgtgaagactggtttaatcagtatcattttgattctgggaacagggcagctatctgaataaaataaggattttggtacaaaggagttagaggaaaatgaatattggataggtaacattattcactatagagttttgtttttaatgtaaaatttagacgacaaaaaaattctgtgtgatgactggtttaatcagtatcattttgattctgggaacagggcagctatctgaataaaataaggattttggtacaaaggagttagaggaaaatgaatattggataggtaacattattcactatagagttttgtttttaatgtaaaatttagacgaaaactttagcagatttaagtccagtgatagaaatgttaagttctgagttttcaagcaaatggtcagaaaagcctatttaatgttttattacttacaaagtaaacatatttctctttctggtacagaacgggagctaattgatctcgggttcattttcatgaacgttgtatgaaatgcacatataccaaacctcataagctttttattagttgatttattctttgaaatattaagcttggtgtaaggtattataacctcaatctctttgaaaatgtaataagtcaataatcaatgttgcatcaatgaatattactcagtggatgcctattttatttcttctttttctctaagaaccatttaaatagtccttatggccgagcacttcacaatctgattagtttctattaattctttggaaaagaaacattctgggaagtcagaattcagcggtaggttgctttgataatgtgctcatttagctagtggattccagagtgatagaatgtatgtttggcaacctaattgttgtggaggaagaaaagaacttctgttagaagtttttaaaaaagtttaaaaattgtttttacctcatcaaaagtttgatgtcttgtgagttttatagcatgcataatatattaatgccatacatgacacatgtaaatatatatatattttttctgatagggatgtgtgagcaagagtttaaagaagaatgccccagtctaaagttaattagtcttggagtgatggcttcgcagaggaaagatactggatttcaagcttgacattaaggtgataatagtggtgactatggaataatcaatataaaaataataacagctaacagttactgagcgcctacaaactgccagacactactctaagtgcttcacatcctcataacaaatttatgaggtaaatgctattattatccaccagccttctgaaattttcttaccccgttactccctggtgttaactgggtacttaatttgtcgaataaaataaaatttagtgctgccaaatttgtcagctgaacggggcggcaggaatttcagtgctagagtggggggccagacggcccggggcttcgtgtccttggaggccagcggaagcgccgcatacctgtgaggagcaacgtgagccggtggcttatatttcctgggctagtgctactggactgaatgcatttgcaataaccggacgcagaaaaaaaaaaaaaaagcggggaccaggggaggcgaaacccttcccggcgcgagtccgagcgtctgagaagcagaagccacacgtcccggcgacctaagttctggatcagccggccggaggacccgtgttagcatttacaatccgaggtgagctgaagcctccggttgtcccggttcgacgctctagccctgcgagcagccgacgccggaagtctctactgctccccgctggcgcgcaggaccgcgggcatttacccgtgctttcccaagcctggaagaactcgtcatgctctttgtagcgtggtgcttctgttgctcacaggttagtctcccgcggtataagagtctccgtcttccccccagcaagaagcgtttgttcctgcaattcggggggccgcctttgcgcgcggggtgcgctgcttcttggagagttccct

SEQ ID NO: 38096 - DNA, 2300 bp, Homo sapien
ctactttgtagaatgggaagctcttactcaaaaaagtagaaactgaatacaaaactagactttagaaggataagataaataaatcaatgcattcataacacatcattacaagaaagtgagggggttagaggtctcatctttaaattctgctctcaaggacatggagggcccctctcacaggctttcccaaagctcctctgggtgtactggtctgactcagcaagtgaacatctgtggttttgcctagccagcatcccttctcctagcagcagcactcagcatgtccttttggggaatcactcttttctcttgtggtttatttaaagtgactgcacaatcagaccccagagtttggcttatgtcctaggccttgccagtgaaaatatggtacctcatcagtggcagttatttttccgagaaaggacatatcatgacccaaggggcagcagcagggaggggtggatggaagagacagataacaaacaataagctaaataaacaaattcagtcaggagctaaagaaataagtcattcaggagtggggcaggtggcaatttcaaatggagtggttagggtagttctcaatgaggcagcatttgagaaaatatcaggaagagtgagaagtagtcgagcattccaaacagacaggagcctgtgcaaagaccctgcagcagagccctgtctgccttgcataagaaatagcagggaggccagagtgactggagcagagtgagccagtggggaggcagtagcagatgaggttgtaggggtaacagaggagcagatcaggcagggctttgggttttactctgagtttgggaaaccactgggaaggttttgggcagaggaggaatttgatctggctttctttttttaaggtcactctggctgctttatggggacaggctgcagggatatcagggaagagaccactgtcatgacccaggtagcagatgatggaggcagaggtaagaagtggtcaggctctgggtatgctagggagatccaaccaacagaatttttgggccctggaggtgggatgtgagagaaaggtttctgaaacagcaaggtttctggccttgacaactggaagatggagttgccatcgagatggtgatgctatggggaagagatcaggggcacagatttggatgtgttgagattgaaatgtattttagagatccaagaggaggtattaaggaggcagctggatagaggagtatggagttcaggaggcaggtcccgcctggagataaaaattcaaagccaagccttctctctttgcactcaacaaaacctcacttaaacaggcttgtcaggtcatggaatacggtactagaactctttgttggggaaaatgccagtcaaccttacccgtcagaacgctgcctttaagatcagagatctctttccttcagcctaatccacccctctccctgttttctcccctagccccactaggctagaagctccctggcttctcccacatcaggatccccaacaaacccattcccaggtggataagagcccaggcagttccctagaccacgttcactacttcctagctacccaagagcaggacatcgcagacaccggcctcctggaatattccctccgctcctcacatttacaggaaggactcaggtaagcctcggcgccagttcagtcggcccggggccactaaataccaatgggatccagtgggttctacgtggtgagtggggggcggataagagagatgcgacaccccccgggcctgccccccccacgccggggccaggcacaccgtgagggggccaggcacaccgtgagggggcccagccacttccatacgccctccggtcggccggcacccaccacccacccctcgccaccaagctgggtgcagagaacagggcaggcgcacggacggttcttacggccccaggcgccagacccagggcacagaggccaggatctcacgcgcgaccgcacgaggccgggaccctccctccccttccgtccactcccttccccaccgcctccggtcccctcccggtctccgccaccccgcttcggggcccccgccccccagccgggcagccaatcggagctgggatcccgccccggtccgcaaagccggtggcgcccggaggctgcacggagagcggtgcccgcgtcaggtgaggcgcgcgcggggaacgggggtcgcgcgcaggggagcgggggtcgcgcgcggcttccatagagcgctagggcctgagctcgaagccccaggcccgcaggaggcccgggcccgcggccgccagagccgggacgca

SEQ ID NO: 38097 - DNA, 2300 bp, Homo sapien
cctgtctgccttgcataagaaatagcagggaggccagagtgactggagcagagtgagccagtggggaggcagtagcagatgaggttgtaggggtaacagaggagcagatcaggcagggctttgggttttactctgagtttgggaaaccactgggaaggttttgggcagaggaggaatttgatctggctttctttttttaaggtcactctggctgctttatggggacaggctgcagggatatcagggaagagaccactgtcatgacccaggtagcagatgatggaggcagaggtaagaagtggtcaggctctgggtatgctagggagatccaaccaacagaatttttgggccctggaggtgggatgtgagagaaaggtttctgaaacagcaaggtttctggccttgacaactggaagatggagttgccatcgagatggtgatgctatggggaagagatcaggggcacagatttggatgtgttgagattgaaatgtattttagagatccaagaggaggtattaaggaggcagctggatagaggagtatggagttcaggaggcaggtcccgcctggagataaaaattcaaagccaagccttctctctttgcactcaacaaaacctcacttaaacaggcttgtcaggtcatggaatacggtactagaactctttgttggggaaaatgccagtcaaccttacccgtcagaacgctgcctttaagatcagagatctctttccttcagcctaatccacccctctccctgttttctcccctagccccactaggctagaagctccctggcttctcccacatcaggatccccaacaaacccattcccaggtggataagagcccaggcagttccctagaccacgttcactacttcctagctacccaagagcaggacatcgcagacaccggcctcctggaatattccctccgctcctcacatttacaggaaggactcaggtaagcctcggcgccagttcagtcggcccggggccactaaataccaatgggatccagtgggttctacgtggtgagtggggggcggataagagagatgcgacaccccccgggcctgccccccccacgccggggccaggcacaccgtgagggggccaggcacaccgtgagggggcccagccacttccatacgccctccggtcggccggcacccaccacccacccctcgccaccaagctgggtgcagagaacagggcaggcgcacggacggttcttacggccccaggcgccagacccagggcacagaggccaggatctcacgcgcgaccgcacgaggccgggaccctccctccccttccgtccactcccttccccaccgcctccggtcccctcccggtctccgccaccccgcttcggggcccccgccccccagccgggcagccaatcggagctgggatcccgccccggtccgcaaagccggtggcgcccggaggctgcacggagagcggtgcccgcgtcaggtgaggcgcgcgcggggaacgggggtcgcgcgcaggggagcgggggtcgcgcgcggcttccatagagcgctagggcctgagctcgaagccccaggcccgcaggaggcccgggcccgcggccgccagagccgggacgcagcctgggcgccgcctgccccgccccgccccgcccgggcccggagtgaggacgcggtcggaggcccagcagcgcgggtcccggcaaggggctttctcaactacacaaaagacagtctaaaaaattaagtctccatttcggttaagactgcccgtagtttcggtttttatgtagacccaagagggcaggctcggcgtccgcgtgccgcgtagtccggcggctccaggagcgcgagcggctgggcccgggcgtagccaccgcagggccgctagctcggccgggacccgcctgggatgccctggggtctgctccgctggggcgaatcctgaggcgccacgcgaggcacttggcctctcctagccccgctttcgtttttggaaactggaaactatcacttatttcgtagacggtgtgagggttacatgacagtgttctgtaaagtgcactctacatatgaagtgctcagaaatatggctaataatgagggtatttataaactacttaaattataaaaagaatgagacatcagacttacagttttggatactaatttttttcacttaacgttcattatgtgataggagttttccatcctattataccgctgtgcgatctgatcttgggcacgttaaccaacctcttgttgcctcgattttctcacctgtaaaagtgggggtaa

SEQ ID NO: 38098 - DNA, 2300 bp, Homo sapien
tctcctaaattgttataggatatagttatcataagagaaaaagtttctttaaatccagaaaatagaacattaaagaaccagcaatagttgggtgtggtggcgtataatcccagatactcaggcagctgaggtggaaggatgcttcaacccaagagtttgataccagtgtggacaacatagtgaggctccatctctaatccatcaaaaaagaaaaaaaaaaagcctggcgtggtggcatatgcctgtatttctagctacttgggaggctgaggcgggaggattgcctgagccccaaaattccaggctgcagtgagctatgatgatgccactgtactacagcctgggacacagagcaagatgccgtctctaaaaataataataataggccaggggcagtggctcacgcttgtaatcccagcactttgggaggcccaggtgggcttgcttgagatcaggagttcgagaccagcctggccaacatggtgaaaccccgtctctactaaaaatacaaaaattagccaggcgtggtggcaggctcctgtagtcccagctactggggaggctgaggcaagagaatcgcttgaacccaagaggtggaggttgcagtgagcccagattgtgccacggcactccagcagcctgggtgacagagtgaggctccgtctcaaaaaaaaaaaaaaaaaaagatataaattggctatggttaagatctaatgaaagttcattataatgcaaggaaatttggttgtttctgtggcatacaacatttaaaatactaactgaaattatgacttataacattacattgggacatatcttggatagggaggacattgacaaatttccagggacttgacacaatttctgaaacaataacattttacccatacaaatataacctagagaaggttagtatctctttctctctctctcttttttgagagaaggtctcttccaccaaggtgggagtgcagtggcctaatcatggcttactgcagccttgacctcctgggctcaggcgatcctcccacttcagcctccctagtagctgggactataagtgtgtgccatcacacccggctatggtgtgtgtgtgtgtgtgtgtgtgtgtgtgtgtgtgtgtgtgaaagcaagtttattagagaagtaaagaaacaaaagaatggctactccacaggcagagcaacctaatttttgtattttttgtagaggtgggttggttgcagggtgcaggggtgtctaggctggtctcaaactcctgggctcaagcggttctcccacctcagccgctcaaggtgctgggattaaggtgtgaaccactgtgcctggctaagtagttctcatttgacattgctttccatgtgatttaatgtaactttagaatttttatagcttgtattattatttttttgagacggaatttcgctcttgttgctcaggctggagtgcaatggcgcgatctcggctcacagcaacctccacctcccaggttcaagcgattctcctgcctcagcctcccgagtagctgggattacaggcatgcgtcaccacgcccggctaattttgtatttttagtagagacgggggtttctccatgttggtcaggctggtctcgaactcccgacctcaggtgatccgctcgcctcagcctcccaaagtgctgggattacaggcgtgagccaccgcgcccggccagctttgtattttaaatttaagtcaatggactattttgaatgaatttttgtgaaacttgtaaagtttggatctacatttatttcgttccgattaataatttctttaacatttttgagaaagacacaggatagtgggccccattttattttgaacgtccgtaatcatggcattgaacgatctgaatttaattaattcaaccagacagccaggagggggcacgcggccaccgctaaacagtgagcgagcgccgagggccccgcgctgccccagatgaccagcagggggcgtgcgagccgccttgtcggacccctgagaagcccccaccgcctccgtgctcctactgcggccgccagcgccgggcccgcagtgaggaggagaacctcattttcctcaacacagatctaaggggacaccgcctcactttgagacaacttgaggctgcgtcagtggtgagtaaaatccttcctgtcacagtcctgactactgaggagcagttggtcttcagaacccccagtagaggaagggcttcatgtggaattttggaaataaaaaaccccggtttccaccacacaggaggtccttctcaacagctaagacacagtggc

SEQ ID NO: 38099 - DNA, 2300 bp, Homo sapien
gacacgtcccctttcccccaatcacagtataaacaaagctaataaaggatagataacaagatatttgaaccccagaaatgtctgccactgaaatggccattgtgatgcttggaaagatctagatcggtttggaattccagagagagatctcaggcataagggagaatggcttgaatagaggaaagcataaatttgatcatttgattgcctactgctttatgggctaaacttgattcccaaccacagccttcgtggtgtggcccctgcccaccttgggccccaataggtgttgtgccattgccacctctgcctctgatcagcccaaggatcttgtttccctttctccttcccctttcctctgattagggtggtgttgctatgagttctcacagaaccctcaatagctggctcatctccctaacgggatatgtggctatcagggactcgttaaaaacaacaacaaaacccacaactgctctctccctctgccaggcacatcatactgtacttctcacaaccaccattattgtccccagtttacagatgagagaaaccgaggctcagaaggttcagtcacttgtccaaattacacagccaggaagcattgggtccacgatttggactcaggcaattcagatgccacatcccatgttcctcaccaccttggagcaaattaatgaaacttaacaattataaaattattgaacattatgaaaactttaaaaaataattgtcagttgaaaaggatttcttaggaaatgttgaaagttcttacatttgcaaagtatgcattggagggcacctcatccctgttctgtccctttattcaatatgcataacagttgggggccgcagttcctaaaaagtaagaataaaacatttctggtgaagtggacatggaagaccttgtccttttattacgggttttttgagaacccaccttcatgtaatcagaggaatcttggtcatgggaaatgggctggactgaagtcaagagacttgtgtcttggtccctctttccctcttctcagtgtggtcatgggcaactcatttccaccgttcttccatttccccttcccatggatcataatccagtcctccccctgacaggaaaccgcagcagtatgcaagtactgtaccattaaggggaatgatgtagacccagaacggccaaaacattggcaatttcacatcactcaaccaaacacaacccatcattgattaaatattctcttgatcctaatagctctataaggtagtactattattaaggcccattttatagataatagaactgagtcttaactgtacaaagattgttatacatgggtctgactccagagcccgtgttttttccatgaccgtggtgacttctaaaataaaatatcccgcgttgctatttttccgtttgacattaataattactggataccaataatagtggcgacgcactggtttcagcattacaggccctgcgatattctcacgaatctccttgccctccggccccttccccgtacttaaaattttccttcctcaggggccagtcaccactgtggtcacatgtggcaaacccattcttgcataactgcgtaagtcatccttgaagaattgggtgacgttttaaccaaaatatgtttcttctttatttgtggataaaagtctggagggtttttctgttttgtttttctacgaatattatttggaggcataactaggacctggggaaacgcttggctcctcttcgagccccgagggtgcaggttgggcagggcgggctccggtgggccgcacacccatcacccgtactagcgtgaggttgtcgaagagaaaatctcacgtttcgcatcctcaaatttccggatctgaaaccctatgcaagcagcaaccgcgggagagcgaacagcggcgggatgagcattcacaaggctgagcattcacagggctgcggggaaggcgggagtaacagctagcagcataccgcggccccgccccgcagaggccctgccccgcccccgccagagtacagagtacgagctccgacttggtctcgtccgcggtcgtccccacccctcagcgcgctgtggtacgtcccgcgctccgcttggcccaagatggcggcctccgtgtgcagcgggttgctggggccacgggtgagtggggcgactcggcaggtccctgcgagtcggaggtggggtccctagtttccgcctcacgcgccctccctccacaggtgctgtcctggagccgagagctgccttgcgcttggcgcgccctgcacacctccccggtctgcgcca

SEQ ID NO: 38100 - DNA, 2300 bp, Homo sapien
atgtattccttatgtttaaaagaatgcttatttaggccaggcatggtggctcacgcctgtaaccccagcactttgggaggctgaggcaggcagatcacctgaggttgggagtttgagaccagcctgaccaacatggggaaaccctgtctctactaaaaatagaagaattagccaggtgtggtagtgggcgcctgtagtcccagctactgggaggctgaggcagaattgcttgaacccgggaagtggaggttgcagtgagccaagatctcgccattgcactctggcctgggtgacagggcaagaccctgtctcaaacaaacaaagaaaaaattcttttagtttgatctccttcatttcattactcccttgaatcaggcatttaggatttaggatttcccattcctcaaactcttcctaactctggtcctcctggatttgtccttattttgggtgtcacaagttcgcgtggctttacctatcagctcccatttacagagcattaattatcttctgaactcaaggtagcagttatgaatttctttaccgaagaggacaaggaggctcagaaacattgactggattctcccaggaggaaaagagaccatgcatcacgcaatgtttactaacatttaaaaatagttacaaatgtttacaaatattaattcatttaatcttcacagagaggaagggacttatttttagccttatttttcaaataaggaactgtggccctggaaaggttctatcttgcaggggctcctggggctggtaattggtggagcccagattccaacacaggtattctggcttcagagctaaggttttaatcactgctttgctgtcttgtattcttaatagtagtaaacatttttaaatagtggttgttaatgatattttacttttaactttaattttatttttaaaaatgaaacgggcggggcgggcagggggtcatctcaatatgttgcccaggctgatctcaaactcctgggctcaatcgatcctcctgcctcggcctcccaaagtggtgggattacagacgtgagccactgcgttcggccagtgatatttaatataatactaaaaatgttatcaacaatggtttacattgtccagagctttttattaagcattttcacttagatcatttttggaaactcattttgcagagagaagaactgaagctgaaaaatctacctgcctaaggactcataacttgtaagaatagttgtgaaacctcactggaggaactgcagattcattatttttcttaataacacactataaagaataataaaagtgcttcgcattgcctagagcttcacaaggccactttatacacattttacaatgggtaccgtctcagagaggccagcaactcgtccaacacagcactgcaagtaagaagtaggaaagttattgttttgcttaataataaggccttacgcttcagggctaaagaaaagccttttcttacagaaattaaactccaattacagaaaggtgtgaagttcagtaaggccctggggcaggttatcctacagcttttggcaccgcaggcaccgcccggcgagttccggcctccaggcacctgggcaggtgggcgttgggcgggctgcgggctgacctgggccgccccgcccccaccccgccccagctgtccccgggctgctccgagaggaccccgggcccaccttaccccacctcaccccacctccacccctggagcgcgtcccggagcgggcgggcggccggcgggccaggcccctccccggcgccgagccgcggccgcgcggaggaagcgaaggaggcgggagcggagacctcgctgcgctcatggcgtcgcccgggtgagtgccgcctcgcaggccctgcgcccccgcggctgccggcaggaacgggagcgggacccggagcggctctggcctgcgggctctggtctgggatgcggcccggacccggccaggggcgcccccgcccgccaggcccaccaggcccacggcccgctcgcgccgaccttgggcggaccggccgcgcgggcgtggggggcgggcgggggcgccggcggaggacagcggtcccccgggatgcgggggtccgggtacgcgggcctaggggatccggggagggcgcgaggcccggaggtgcccggggcgcggcgggagcgagggcccggcgagcggctggggaaccggggtgcgggtcctcgccgcggcccggggcaacccgcggaggcctggaaatgcttcgctccggcgcctggtatcgatgttcctgggttttaaacttgctcgcgttgg

SEQ ID NO: 38101 - DNA, 2300 bp, Homo sapien
agaggaattctttcaaggggcaataaaggattactagggagaaggaatggatcagggcacagagattaacttgtacgctatcctatgaaagggtcttttcaggtgtggttacattcttggtcttacagggagggcaagaaaaacagttgttctccttggagggtctggactttaagcagataaagacattttctgttttgggagaaaccagtggggagggagatcagagagaccttgagacttcttcagttcagcttgttaaagtgccatattttggggttattggtttctgaaccagattttatgtcagtaaacatgtattccttatgtttaaaagaatgcttatttaggccaggcatggtggctcacgcctgtaaccccagcactttgggaggctgaggcaggcagatcacctgaggttgggagtttgagaccagcctgaccaacatggggaaaccctgtctctactaaaaatagaagaattagccaggtgtggtagtgggcgcctgtagtcccagctactgggaggctgaggcagaattgcttgaacccgggaagtggaggttgcagtgagccaagatctcgccattgcactctggcctgggtgacagggcaagaccctgtctcaaacaaacaaagaaaaaattcttttagtttgatctccttcatttcattactcccttgaatcaggcatttaggatttaggatttcccattcctcaaactcttcctaactctggtcctcctggatttgtccttattttgggtgtcacaagttcgcgtggctttacctatcagctcccatttacagagcattaattatcttctgaactcaaggtagcagttatgaatttctttaccgaagaggacaaggaggctcagaaacattgactggattctcccaggaggaaaagagaccatgcatcacgcaatgtttactaacatttaaaaatagttacaaatgtttacaaatattaattcatttaatcttcacagagaggaagggacttatttttagccttatttttcaaataaggaactgtggccctggaaaggttctatcttgcaggggctcctggggctggtaattggtggagcccagattccaacacaggtattctggcttcagagctaaggttttaatcactgctttgctgtcttgtattcttaatagtagtaaacatttttaaatagtggttgttaatgatattttacttttaactttaattttatttttaaaaatgaaacgggcggggcgggcagggggtcatctcaatatgttgcccaggctgatctcaaactcctgggctcaatcgatcctcctgcctcggcctcccaaagtggtgggattacagacgtgagccactgcgttcggccagtgatatttaatataatactaaaaatgttatcaacaatggtttacattgtccagagctttttattaagcattttcacttagatcatttttggaaactcattttgcagagagaagaactgaagctgaaaaatctacctgcctaaggactcataacttgtaagaatagttgtgaaacctcactggaggaactgcagattcattatttttcttaataacacactataaagaataataaaagtgcttcgcattgcctagagcttcacaaggccactttatacacattttacaatgggtaccgtctcagagaggccagcaactcgtccaacacagcactgcaagtaagaagtaggaaagttattgttttgcttaataataaggccttacgcttcagggctaaagaaaagccttttcttacagaaattaaactccaattacagaaaggtgtgaagttcagtaaggccctggggcaggttatcctacagcttttggcaccgcaggcaccgcccggcgagttccggcctccaggcacctgggcaggtgggcgttgggcgggctgcgggctgacctgggccgccccgcccccaccccgccccagctgtccccgggctgctccgagaggaccccgggcccaccttaccccacctcaccccacctccacccctggagcgcgtcccggagcgggcgggcggccggcgggccaggcccctccccggcgccgagccgcggccgcgcggaggaagcgaaggaggcgggagcggagacctcgctgcgctcatggcgtcgcccgggtgagtgccgcctcgcaggccctgcgcccccgcggctgccggcaggaacgggagcgggacccggagcggctctggcctgcgggctctggtctgggatgcggcccggacccggccaggggcgcccccgcccgccag

SEQ ID NO: 38102 - DNA, 2300 bp, Homo sapien
aaatgatgcaaattctctgtagaaattttagagattaacacattagtaaacctaccatccaaaagtaatatttttgagatttgagacttcaaaaccaccatatacattattagcacataaataaccatttatatattcttacacaaatatatcaacatttataaaatctagaatcacttgttttatggggagggaaggccatgtcaataatgtaggaggatggatggcccatggactaacaaaaatttctgttgtcaatgtttgacaccaaggggaagtgcttgacttgggctgttcaatgggtgatgcttgagctggctttggaaggtgaatgctctagtcaaggaatgtagatgctgtggtgatggaaacacttgatagtcaggtgggctggaggtaggaaggagaaggtaaagctggaggatactttgagtttttgtttttttgagacagggtcttgctttgtctcccagcctggagtgcagtggtgccatcacaactcactgcaactttgatctcctgggctcaagtaagcctcccaagtagctgggactacaggtgcacaccaccatgcccagctaagttttgtattttttgtagagacggggtttcaccatgttgcccaggatggtctagaactcctggactaagggatccacccacctcaacctcccaaagtgctgggattacaggcatgagtaactgtgcccggccgaggatcctggattttgaaggcccctggatgacagtgaatgtgatgctgtaggccacggggcttccttgaagagttctgggtaaggatgcagtgtggtaagctttatatttcagacagttcatgaagttgtgtggaggacagattgggggaatgggagcgtgaaagccagggacaaagctgggcaactattgaaatgtctataatacattttatatgctgactgagtacaaacatagaggtgaccatgtgtcttggctggctggagacaattctagattacagcgttggtcccagagtaattatattaacagccactttcatgctcaaacatgtctcagtctgaagattaaatatcatctacatacacacaccaacaaaacttccacaattcttacctttactatgtgaaatgcactgatattttattctgtttttttatttttattttttattatttttgagacagagtctcgctctgtcacccaggctggagtgcaacagtgtgatctcagctcactgcaacctctgcctcctgggttcaagtgattctcgtgcctcagcctctcaagtagctgggattacaggcatacgtcactacgcccagctaatttctgtatttttagtagagacggagtttcagcatgttggccaggctggtctcgaactcctgacctcaagtgatccgcctgcctcggcctcccaaagtgctgggattataggcgtgagccacctcgtctggctttttttttttttttttcaaaaaaatgttggttgcaacctattaaattgatttcgtgacacactagttcataaccctcagtttgaacaactctgacctagacgcctgccaagtcttgggaaaataggaaggagacagataattaagtttgggagatgcatagtctaaggccagggttctcaatgttggcagtgcaagatcacgtgaggtacgactgaacacggagatctccaaaactgcggagagttttgcgtgtgaacgtatgcacagacatctacatggaaatggctgtaacgcatccagccataaggcgtacgagggtatatatacttacagagttaagaaccactattctcaggagttatatgacagcctgggaagacgcccaggatgtaggaacagggagcaggcgagcgtgtggcaccttgagggtgctccgcgcgtctccgtaaagccaacgagcccctcctcttcgctggcctctccggggccttgctgactagtggtcgaagccacaggaccaggtgcgggtggccagcgtaacccgggcagccccgctgcttcccctcggccgcgccaggacgctcggcacgcggcgacgacggccccacagtgccccgcgcgcgcaagcgcaggctgcggctcccggcgtgcagcttggtggcggctgagccggcagcgggccgcctcaggcagccccggccgggccgcccgggtccccggcagcggggtaggatggcgctaaagcggatccagaaggtacgcactttcccaccctccaactctttgggtgtccgaagcgtcgaggtgtgggcggggcgccgctgccgtgaagtgaaaggtgac

SEQ ID NO: 38103 - DNA, 2300 bp, Homo sapien
cccaccaccacgtccagctaattttttgtatttttagtagagacagagttttgccatgttggccaggctggtcttgaactcctgacctcaggtgatccacctgcctcggcctcccaaagtgctgggattataggtgtgagccactgcacccggcctctattttattttttatttttattttttattcatttatttatttatttttgaggtgtagtcttgctccgttgctgaggctggagtgcagtggcgcgatctcggcttactgcaagctctgcctcccgggttcacgccattctcctgcttcagcctgccaagtagctaggactacaggtgcctgccaccaagcccagctaatttttttgtatttttagtagagacggggtttcaccatgttagccaggatggtctcgatctcctgacctcgtgatccacccgtctcggcctcccaaagtgctgggattacaggtgtgagccaccgtgcccggccttttctttttttaaaaaactatataaaaattgtaaaaacaataacacaaaacaatgtctgcatcccagaaataattgaaagggatctccagcctggactggctctaggccaacccttcagacttaggacacagtagtactagggcccagatggaggagaccccatgggttacagaaggagctggcctgatttggagaaggggtccctatgcttcagcaatagagtgtaaggaggccccttcttctgccagcagaggcctcagattccacccatagcagcccctcttcaccctagggaagaggcagtaacaaccaggcttgggaacatgctgcagaacagaggccaggagtacagaacgtggccccggcttctggggagagtagaaatggctttccctgagcaggagaccagacggagcctagaggggaggtctctgagtgggagggaggccagggactgggcagaccagtgcgggagggaagggagaacttacccttagggtgagaagctatggtgtcccttgtaaggcagacctttccgataacgtcgtcccggctagaggagggagatggaggcagagctgggcagggcttcagtatctgccctctgggacctcccaccaagttcagggcccccccggggggagcagggtggtggacaccgatgtcatttccagagtaacccaacagagctggacctgtggcccttctgtaggctgtgggttctggaccctctagggggatgtgataggtttctcacatgcccacacatgccaagctcacactctctgggtgcccatctcacagctcacacctgcacgcacacgtgtagtccatgcacacttgtgcccgcatgcctgcacacacacgtgtgtatgtggtgcatgcaccatggagccacgcatgtgcacacccacatgctcaagcctttcgccctcccaggcccccaggctctgcctccctccaggctgcaaagaggatgccaaaaaggacccaggagtcctggtggtgaaatgggccagggagcaatcagatggccaggtctgggtcccagctggagaggggggcactcacctgagggcatcctcatccatgacgtagaaagccacagcgtggaaggtgggcggcaggtgcacttggtactcctcaccccagaaggggcacagggtcttccacactgtggctgtcctgcaggagagaaccctcagcatgtgcccaggccacccccaggccctgggcttggaccttccttgtatctccccctacccctataacaactggctctgccactgatgtgttttccctgtgccagaccctactgttcaccaccaatcactaccccctgacattcctctctgctctggatggggcacagggctgcctctctctggctgttatttattttattttatttttttgagacggagtctcgctctgtcgcccaggctagagtgcagtggcgtcatctcagctcactgcaacctctgcctcccaggttcaagcaattctccctgcctcagcttcctgagtagctgggattacagacgcctgccaccacgcccagctaattttgtcattttagtagagacagggtttcaccctgttggccaggctgctctcgaactcctgacctcaagtgatccgctccccttggcctcccaaaagacatgtttgggaggctcagtgctcatttctcatggggagatgtctagaagcagaattgctggggcctggggcaggcgtagaacactggattctaaacaggccggttcttactgtgcctctccgagcatttcacacgcgttcccaccacc

SEQ ID NO: 38104 - DNA, 2300 bp, Homo sapien
atgagtctcccaagtagttggaacacaggtgccagccaccacacctggctaatttggtttggttttgtttttttagagatgggctcttgctatgttgcctatactggtcttgaactgctggcctcaggcaatcttcctcccttggccacccaaagtgctgggattacaagcatgagccactgtgcacagctgaaatttttcgacttagtctttttgtacatgtgatattttattcatagaatccataaatggaagggaaatttctgagttcagagcaatacatatgatacaaaacttgatatatagactagagtttcttagccgaactggaggggctggcttaggtaatccatggattccctgaaattggggacaccattggaaatatgtgtgagctccattggaaatatgtgtgagctcaggggcagtttcctatgatttttaggcctcaaaatgtctcttggactcaaaattgccttagggcagaggacgtatgtacccccagtacagaatcttggacagtgaatgtgagtaaacattcagcagaaaagctctgccaaactgagtgctctgatgtgactttttcatcaagtcagtattcctgggatctcttgtacatgataatctcactcttgtacatgataatctcactcttgtacatgataatctcactcttataaggtttcatcgtttctgcttaccctagttttctttcccactctgttccctctcccaccagactggactctgaaatgggcacgtacagagacgaagagaccccaacatgcttcaggctttgagtggagaggacacagcctctgctgggacagggaacagagggatgtggagtccctgaagatgcttttggacaatggtctgaggttgggacagtggcaggagataccattcacccaggatctccaggacaagagatcagcctggcagttacatgtgtttttttttcaaactggttgccaggttggcatgaacgatgacatcagagattccgaccttcctgattggagggaccggactccgtggtgcctggagatcagttggacaacagtatcttctcagagctgttctccactcctgacttctcctaggcttgagaattgataacatactcttctggatcctagcagtgtccagaagaaggccatggacagaacggagactaggttccgtaagaggggacagattacgggaaagatcacgaccagccgtcaaccgcaccgccagaatgagcagagtccccagcggagcacctcggggtaccccctccaggaggtggtggatgatgaagtgttgggaccatcaggtgaggggactggtggaagaagaggtgggataggattgactaagacgaaggaagggggccgggtgcggtggctcacgcctgtaaccccagcactttgggaggccgaggcgggcggatcatctgaggtcaggagttcaaggccagcctggccaatatggtgaaaccccatctctactaaaagtataaaaattagccaagtggtagtggtgcacacctgtaatcccagctactcaggaggctgagacaggagaatcacttgagactgggaggaagaggttgcagtgagctgagatcacgctactgcactccaaaaaaaaaaaaaagaaaagaaaagaaaagaagggtcagcggtcaggaaggagaacctgaggagggtgtgtgggaagaatggagaaattcaggctgggtgcggtggctcacacctgtaaccccagaactttgggaggccaaggcaggcggatcacttgaggccaggagtttgagaccagcctggccaacatggtgaaaccctgtctctactaaaagtacaaaattgagctgggcattatggcaggcacctgtaatcccagccacctgagaggctgaggcagaagaataaatggaatccaggagatggatgttgcagtgagctgagattgcaccactacactccaacctgggtgacaaagcaagattctgtgtcaaaacaaaacaaaacaaaacaaaaaaggagggactcagagagccagggaccagggaaggacatgaagcagcgttcggaggacagagagagagaagaatggggaggggaaggagcggcacatggggttgagcagaggagaaaatcagaaagatggcttagagaagtcagcagtctgcgagtctggggaggatggagagtggtttggggttttgggtcggggtctaaggtgatcagatgcagaagcattacacagtggcctggtttctttactcagcccctggggtagatcccagcccc

SEQ ID NO: 38105 - DNA, 2300 bp, Homo sapien
tggttcctctcctccttcctggtgtctgccattagcattggaataaagttcctgctgaaaatccacatctcccctgggtccggtgttctggaagggagagagacaatgtcacacttcaaggaggcagctctctagacaggaaggttattcacatcccatgtcaagtctagagttcagagcaattgagaaatgcaattttatctgctgcctttcattctataccctgcttctgaaccatcgtgttcaactgtgaaactcacactttggtgaccatgactccaaaactcacttaatacacccaaggtcagccccagtgatctgcttcatagcaaggactttgggtgggtctgcccagggagtagggcaccctcagagaatgtggctttggacttcatcacagctgaggccttttgtgtcacttaagatctaaacttgtaaccatgctagatgtgtttctaatgtgacaacatcacgaaccacaagtccagaagcctaatccttaatcctacctcctcatgatgaagtctcatgctctgtgctcaacgtggttagctgcacaagatgtaaaccaaagcttcactgaaccctcgacccaaatcggtaactcaagtgcgtcaatcataatgaacctccccaaactcagtatttatgattatttttgaggcagggtctcactctgtcgcccagactggagtgcagtggcaggatcagggctccgtgcagccccgaccttccaggctccagcaatcctcccgcctcggcctcctgagtagttgggagtagagatgcgtcccacattgcctggctaatttttgtatttttgtggagaggggatctcgccacgttgcccaggcttgaagccggatcaagcaattgggttcttcggatttccgaaatagaccccaatattctgcctttaccccggaggatgcagatgtaccttctctcaggccgatgacctcaggcctccacggtccctggagctctaggaaaggcgagcgcgatctcgcgcccacacccagtgctctgggtcataagcctggatctggaaaaacaaacgccctttgagaagacggggactcgccaggatacccctctctcccctcatccagcctccagcccacccaattcctccccacctcctccacctccccaggccccactcacctcctccaactcctctggggaaacccaagccctgcagctcatggaacagaagaagtggaaccgacgtttctggaacaggactatctgagagcggttcttcctggccctcgggttcatgcaacggcgtaactggaaccgacgcttacggaccaagggtatgtgagagcggttcttcctggccctcgggttcatggaacggtataactggaaccgacgcttacggagcaagggtatgcgagagcggttcttcccatacaggaagtggaagatgttttgtttggagtcctcgtcgtcctcctccatgtcattggccaggtagctgaggacaggaatcaggttgctgctcaggggcaccaccaggagagacctccggctgaggtcagcttcccagagaggaaggtaagggaccgttcctagctcaggactggcacccaccctgcagagagccatgccttcctcaggagggctctgctggacagagacctgatcaagagcgtctcccactccttcaggatggagacaaaaacccaactggtggccaagagtggtggcttacgcctggaatcccagcacattgggaggccaaagcaggaggatcacttgaggccaggagtttgagacgagcctgggcaacatagcaagaccctcgtctctattaaaaatataagaaatatgccagacacggtggctcatgcctgtaatcccagcactttagaaggctgaagcaggtggatcgcttgagaccaggagttggagaccagcctggtcaacacggagaaaccccatctctactaaaaatacaaaaatcagcctggtgcgatggcacacctgttaggcctagctactcaggaggctgaagcataagaattgtgtgaacccaggaggcggaggttgcagtgagttgagattgggccactccattccagcctgagaggcggagcaagactctgtctcaataaacaaacaaacaaacaaactgtccaggtgtggtggcacagccctgtagtcggagctaataaagaagctgaggtgggaggatcgcttgagcccaggatatggaggctgcggtgagctatgatctcaccactgcactccagcttgggggacagggcaagtctgtctcaaaaaaataa

SEQ ID NO: 38106 - DNA, 2300 bp, Homo sapien
tcacatttcaaacatagatgaaatatcaaataaaaatttatttttacaagaatttaggggaactactacatagctataaatgtaatatatatgttaactaagtatcatagataaaaaccatgctcccttcagcagcacgtgtaataatagatacaaagattgaaaggtaaaagatttaggatgaaaagaatcctctcttaaaaaggaaaacaaaattatatgtatgtgtatataacagttataataccatcacacagctttatagaaacagcatctattcaaaaataccagtatttccaaaatatttaaaataatatttaaagtaataataacatttaaataaataaatatatttaataaatatttaaataaataaaataatatttaaataattctatacccatgtttttcaaaataaaccaataaaatagtatatattagacgtgttagtatatatatctgacacatgttaaaaatcacaactgaattctcacaattcagtcacaaacctaaacagcaaataaaaatttctatcgtcagaatttaggggaactaccaatagctataaatagaagagattattatggaagtatcatagataaaaagagtgctcgcttcaggagcacatataataatacagaaacaaatttaaagatgataaaatatttaggataaaaagaattgtctcaaaaatgaaaagaaaattatctttatgtatatataacaactataactctcatcaaaaaactacaggaacagcatgttttcaaaagtacaacaatttccaaactatttgaaataaatctatgaataattcaatggccaacattttccaaacaaaccaataaaatgcagagtgtgcatgaagctatctgttacaatctgtggcactgatatttcacaaaagaattctgtgccaatctgagcccctgcattgtgccttcaaatgctcctggactgtggcaaccaagtccgtaagaaacaggacctccaggttccgccccagggaggttggaattcagcaatataaaaagggtggtggtgccccaggaaagggtggaactggaaacactcctggtttcttacttttctccaaggactcctagaaggaccccatccccctccccccacccctgctcctaggaggacaacgtgatcactgtattcagctccatcaagaatggtccaggttcttctagatgatctgcacaaatggttcctctcctccttcctggtgtctgccattagcattggaataaagttcctgctgaaaatccacatctcccctgggtccggtgttctggaagggagagagacaatgtcacacttcaaggaggcagctctctagacaggaaggttattcacatcccatgtcaagtctagagttcagagcaattgagaaatgcaattttatctgctgcctttcattctataccctgcttctgaaccatcgtgttcaactgtgaaactcacactttggtgaccatgactccaaaactcacttaatacacccaaggtcagccccagtgatctgcttcatagcaaggactttgggtgggtctgcccagggagtagggcaccctcagagaatgtggctttggacttcatcacagctgaggccttttgtgtcacttaagatctaaacttgtaaccatgctagatgtgtttctaatgtgacaacatcacgaaccacaagtccagaagcctaatccttaatcctacctcctcatgatgaagtctcatgctctgtgctcaacgtggttagctgcacaagatgtaaaccaaagcttcactgaaccctcgacccaaatcggtaactcaagtgcgtcaatcataatgaacctccccaaactcagtatttatgattatttttgaggcagggtctcactctgtcgcccagactggagtgcagtggcaggatcagggctccgtgcagccccgaccttccaggctccagcaatcctcccgcctcggcctcctgagtagttgggagtagagatgcgtcccacattgcctggctaatttttgtatttttgtggagaggggatctcgccacgttgcccaggcttgaagccggatcaagcaattgggttcttcggatttccgaaatagaccccaatattctgcctttaccccggaggatgcagatgtaccttctctcaggccgatgacctcaggcctccacggtccctggagctctaggaaaggcgagcgcgatctcgcgcccacacccagtgctctgggtcataagcctggatctggaaaaacaaacgccctttgagaagacggggactcgccag

SEQ ID NO: 38107 - DNA, 2300 bp, Homo sapien
cgtgagccaccgcgcccagcctatgtgatgcaattctgatgtcaactccctgatgttacctcaaatgccacaggttaaggccaccagcccccactaggctgccctcgctttagacacacctgcaggcttgggtgtcctcagaccacatgtacttctcaccaactggctgcaaatttggaggttcccaccatgccctcaagttcgataactcactaaaacaattcacagaatgcagaaaagcatgatactttctttctctttttttcttttttttttttttttgagacggagtcttgctctgtcgcccaggctggagtacagtggccaccatgcttgggtaatttttgtatttgtattagagacggggtttcgccatgttggccaggctggtcttgaactcctgacctcaggtgatccacccgccttggcatcccaaaatgctgggattataggcatagccaccatgcccggtcgacttctagagtttcaataacagagatgtgattcaagaagggagacatgttttgtagatggcaggagcttcatgaaaagaagccaatgaagggcaggacgtgtagctgtctacctacaggaaaccagccaggagcctccccacagggacttcagcacagacggccgggaaaatctgcattaacctgagctctggacctaagagaggacaaggccttgaccatttctacagactcacaagatgcaatctctgtggtccatgcccgtggtgtgatctgggaaacagggggccttctaaatgccaacaacaaggaaatcaaatgtgcaacaaacagaaatagcggcattgacgtgggccatggagaggcctaaacagatgactgcagtccactgctaaggtcatcaaaggggtgactctgaaataataaatttcagacgccacggcccaaatagctgcatgagctggggaagtcctccacatgcctctgcttccttcagtacctgtttatgaaatcagccaaggtacttccctggggaatttcctttctctttctttctttcgagatggagtcttgctctgtcgcccaggctagagtgcagtggtgcaatctcggctcaatgtaacctctccctcctgggttttagcaattctcctgcatcagacctctgagtagttgagattacaggtgcatgccaccatgcccagctaatatttgtatttttagtagagacagggtttcaccatctaggccaggctggtcttgaactcctgacctcgtgatccacccgtcttggcctcccaaagtgctgggattacaggtgtgagccatcacgcccggactttttttttttgagacgacgtttcactcttgttgcccacgctggagtgcaatggcacgatctcagctcactgccacctcctcctcccaggttcaagcgattatcctgcctcagcctctcgagtagctgggattacaggcacccaacaccaaacccagctaacttattgtatttttagtagagatgggatgtcaccatgttggccaggatggtcttgaacccctgacctctaatgatccacctgaattggtttcccaaaatgttgggattacaggcacaagccactgcgcccagcccctcccatacctcttttggccaaggcagcacaattcagaagaatcttgccagggaagactggtaaatggacgtcaacgtgatgcctatggctcctggtggatttagatacctcctggtgcttattgatatctttaccagttgcacgggggcttttccatgccagactgaaaacgcaggagatcaaggatcaaccttcaactatttactagcagaacactgaggggactgtgcggtcaccaatacctcctattgcacttggataaacacctcccaggaaatagagatgaacagaaaggacatagtcaaacaagcagaatggctgcattccttcaaccagaagggtccattagtctgttttcacactgctataaagaattatgagaaactgggtaatttatgaagaaaagaggtttaattgactcacagttctgcaggctgtacagaaagcgtggctggggaggcctcaggaaactgacaatcacggcagaaggcgaaggggaagcaggcacgtctggccatgttggagcaggagagacagagagagtgaagtgggagggctgcaagcttttaaacaaccagatcccacaagcgctcactcaatatcacgagaacagcaagggggaagtcggcccccatgagccaatcacctcccaccaggtccctcccacaacactgggaattacaatttgaca

SEQ ID NO: 38108 - DNA, 2300 bp, Homo sapien
caagaactcaagtaggaaatgggccttcccagaaggggtagatgctccagatttcctcagcactgtagctgctgcccagccttggagaaacagctgccaaactgttagggctctggtagctcccctgagaccccagtccctgttgcttcaaacagcttaaggagggcctttatgctaaactgtagtctgcaaaacaaccaaaccaaaaagggtaagatacacttatccacctgtagggtccagccccacagggtcggtgggtttctctccgtgtgcagagacgagagagtgcagaaatgaagacacaagacaaagagataaaagacagctgggctggggggaccactaccaccaagatgcagagaccggtagtggccctgaatgccaggctgcgctgatatttattggatacaagacaaaggggcaggataaggagtgaaccatctccaatgataggtaaggccacatgggtcacgtttccactggacagggtgcccttccctgcctggcagccaaggcagagagagagaggagaaagagagagagagacagcttacaccattatttctgcttatcagagacttttagtactttcactaatttgctactgctatctagaaggcagagccaggtgtacaggatggaacatgaaggtggactaggagcgtgaccactgaagcacagcatcacagggagacggttaggcctccgggtaactgtgggcgggcctgtggaggagcagagtcttctctaaactcccccggggaaagggagactccctttcccggtctgctaagtagcgggtgtttttccttgacactaacgctaccgctagaccacggtcggcttggcaacaggtgtcttcccagatgctggcgttactgctagaccaaggagccctctggtggccctgtccgggcataacagaaagctcgcactctttgtcttctggtcactcctcactgtcccctcagctcccatctctgtatggcctggtttttcctaggttatgattgtagagcgaggattattataatattggaataaagaataattactacaaactaatgattaatgattcatatataatcatatctaagatctatatctagtataactattcttattttatatattttattatactggaacagctcatgccctcggtctcttgcctcggcacctgggtggcttgctgcccacatccaccaactgcactttgggaggctgaggctggaggactgctggaggccaggagttcaataccagcctgggcaacatacggaggccacccccccacaaccatctccaaaaaaaaaaaaaaaatagctaggtgtgatggcacatgcctgcagtcctaactatcgggaggctgaggcaggaggatctctggagcccaggagttggaggctgcatgatggcgccactgtacttcagcctgggcgacagagggagacactgtctctaaataataataataatatataaaaagatatacgtaaccctacgggctcccctctcactgctgtatacacctgcctccttctgcatccctcacccaattgtccctcccggctaacaagccagctgcaccccccaggcagaggtcctgcagcagtcggtataggcagcctgggcagggggcttatcatagatctgcctctagccacgagatcttctgctccccctacggctgctagcggcagctgtccactaccccttagctttattctctctattcaggggcctcctgctgcgcactccaagggggtgcacgtttccaaagagagatcaagggacatggggaaaggagaaaggtacagcttgaggttcccgctcagccaggactaggaggcctctgtaggggcagaacagccctcccggcgctctgagcatgcgccgaaaagcgcccacgggggaaagccaagccggggtgcgggtgggggcggtgcgctcgccactgacgcatgcacagaggcactggcctctctcggggttttctcgcgcctgcgcaagatcctccagcccgaaagggggcgatgagccgatccttgcgcgggtttgccccgccggagtaatccggaagaggcctcttattagggctctggtggcggcggcggcagacacttggggtctggacgcaacggaggcgggagcgtgaacgcccctccagccttcgagtcgttcttgctcttcgagggcgagaagaagtaagtgacgccggctgcggcgggccgaggtgcgcgggcctgcggctgtcgcattctggggtgtctcctgcccatctcttgcccctggag

SEQ ID NO: 38109 - DNA, 2300 bp, Homo sapien
gggctacaaagtcaatccagccgtggccaaggctttgtgactttgcatttattaattttccaacttgcttttgtagtcccaagctctaacagtcatatcctgaccgggcgcagtggctcacacatgtaatcccagcattttgggaggccgaggaaggcggatcacctgaggttgggagttcgagaccagcctgacaaacatggagaaactccgtgtctactaaaaatacaaaattagccgggcatggtggtgcatgcctgtaatcccagctacttgggaggctgaggcaggagaatcgcttgaacccgggaggcggaggttgcggtgagccaagatcgcaccattgcactctggccggggcaacaaaagtgaaactccatctcaaaaaaaaaaaaaaaaatgggaccagaattaaataatgcccatgtagtcaaatctttcaaccctggcaaggaagatgtataataatcatctgagtgctttgggaggctggggcaggaggattgcctgaggccaggagtttgagaacagcctgggcagcatagcaagaccccatctctgcaaaaaaaaaatgttaaagaaaattagctgggcttggtggcacgtgcctgtagtcccagctactcaggaggctgaggcaggaagattgcttgagcccaggagtttgaggctgcagtcagctatgatcgcaccactgcactacagtctgggtgacagagcaagaccctgtctcaaaaaataattatcatcatctgaggggtctttggtcggaaggggcgggcccctcatctggtgggacccctgagctggttgagaacagggtgggtgatgagctccttcacctactcctagcctgctctcacctgcccagggctaggctgggtactcctggaagatcatccccatagcctgcatgactaggggcaggtgtacagcaagcagtcaccaggtccatggaggaagtatgtcctcagcccttcctgggagaagagagcttgcaggagaggtgacccatgactcagagagggctgtacaaggtgatctttgagatcccctcccacaccaagattccatgcttctatattcctgcccgttccaggaagcctcccctgtttgccctagcctcctactcatctagcagcccaggtgatgtactatctttaataataccatttgcctaaatagtactacctgccaggccctgggtcaggacccttagggagatcatctcatttaatcctcaacaacctggtaaggtcggatcaacttcctccatattcatttttttttttgagacggagtcttgctctgttgcccaggttggagtgcagtggcacgatctcggctcactgcaacttctgcctcccgggttcaagcgattcccgtgcctcaggctcccgagtagctgggactacaggcacccaccaccacacccggctgattttttgtatttttagtagagacggggtttctccatgttggccaggctggtctcaaactcctaacctcaagtgatccacccgccttggcctcccaaagtcctgggattacaggcgtgagccaccgtgcccggccctcctaggttctgacaagcagtacagatgccacacacctggctttcttctctgaccccgggggtacctcaagtgggctccaaggaaggggacaggtgcctctaaggtgccccacttgccggcctctcagagccccacttgccggcctccctccttacccaccttggagctgggcgtcttcgcgaagctgagggcctcggtagtgagggagaagtagagcttcttgaaggaggaggacatgagggggcccttgcccttggtcctgtggatgaagagtggcccctccttcacaggtggcgcctgcaaactcagcgtccgctgcaggtccagctctgccaggccagggagggaggggaatagagagcccagggaatgagggcgggactggggggggggggcggagcagtgggcggggccatggggctcaagggctgagcaaatctgaacagcaggcagtggacgtagtcatggggctcaagggcggagcaaacatcaacagctggtggtgagcggggtgacaggtggactgaggaaggcagggccatgggcttggaggcgggacacgcgtcagtagcaggtggcggcggggctatggagctcaaggatggagcaaatgtcaacaggcacagatgatgggaggtgaggccatgggtctaggggtggggcaaacgtcaacagcaggcagtgggcagggtcacaggaagcacaaacagtggtgcgtgggtc

SEQ ID NO: 38110 - DNA, 2300 bp, Homo sapien
ggccggggcaacaaaagtgaaactccatctcaaaaaaaaaaaaaaaaatgggaccagaattaaataatgcccatgtagtcaaatctttcaaccctggcaaggaagatgtataataatcatctgagtgctttgggaggctggggcaggaggattgcctgaggccaggagtttgagaacagcctgggcagcatagcaagaccccatctctgcaaaaaaaaaatgttaaagaaaattagctgggcttggtggcacgtgcctgtagtcccagctactcaggaggctgaggcaggaagattgcttgagcccaggagtttgaggctgcagtcagctatgatcgcaccactgcactacagtctgggtgacagagcaagaccctgtctcaaaaaataattatcatcatctgaggggtctttggtcggaaggggcgggcccctcatctggtgggacccctgagctggttgagaacagggtgggtgatgagctccttcacctactcctagcctgctctcacctgcccagggctaggctgggtactcctggaagatcatccccatagcctgcatgactaggggcaggtgtacagcaagcagtcaccaggtccatggaggaagtatgtcctcagcccttcctgggagaagagagcttgcaggagaggtgacccatgactcagagagggctgtacaaggtgatctttgagatcccctcccacaccaagattccatgcttctatattcctgcccgttccaggaagcctcccctgtttgccctagcctcctactcatctagcagcccaggtgatgtactatctttaataataccatttgcctaaatagtactacctgccaggccctgggtcaggacccttagggagatcatctcatttaatcctcaacaacctggtaaggtcggatcaacttcctccatattcatttttttttttgagacggagtcttgctctgttgcccaggttggagtgcagtggcacgatctcggctcactgcaacttctgcctcccgggttcaagcgattcccgtgcctcaggctcccgagtagctgggactacaggcacccaccaccacacccggctgattttttgtatttttagtagagacggggtttctccatgttggccaggctggtctcaaactcctaacctcaagtgatccacccgccttggcctcccaaagtcctgggattacaggcgtgagccaccgtgcccggccctcctaggttctgacaagcagtacagatgccacacacctggctttcttctctgaccccgggggtacctcaagtgggctccaaggaaggggacaggtgcctctaaggtgccccacttgccggcctctcagagccccacttgccggcctccctccttacccaccttggagctgggcgtcttcgcgaagctgagggcctcggtagtgagggagaagtagagcttcttgaaggaggaggacatgagggggcccttgcccttggtcctgtggatgaagagtggcccctccttcacaggtggcgcctgcaaactcagcgtccgctgcaggtccagctctgccaggccagggagggaggggaatagagagcccagggaatgagggcgggactggggggggggggcggagcagtgggcggggccatggggctcaagggctgagcaaatctgaacagcaggcagtggacgtagtcatggggctcaagggcggagcaaacatcaacagctggtggtgagcggggtgacaggtggactgaggaaggcagggccatgggcttggaggcgggacacgcgtcagtagcaggtggcggcggggctatggagctcaaggatggagcaaatgtcaacaggcacagatgatgggaggtgaggccatgggtctaggggtggggcaaacgtcaacagcaggcagtgggcagggtcacaggaagcacaaacagtggtgcgtgggtctatggcctgggggcctggcaaatgtcaacagcaggcggtgggtggggccacgagaggaacaaacagcggtgggtggggccgtggggctcaagggcggagcaaacgtcagcagtaggctgtgggcgggtctgtgcagggcggcgctcaccgtccttctcctcgatgtccacgagcttggtgatgaagtccttcagctgcgccacgccctggcgcacggtgggctgcagcggctccatccaagcctccttggccctggaagccggcgtgtccatgttgcccacgttctggactgcctggaggtgacagcaggaaggaccaggttctgctaggttaggggcctagccactgcacc

SEQ ID NO: 38111 - DNA, 2300 bp, Homo sapien
tgtgacctgcggtggtccccaggtggccgggatgcagtacctgcacggcgtcctgggccccatcatcaacaaggtgtttgaggagaagtacgtggagctggaccccagcaaagtggaagttaaggatgtagggtgaggccgggggtaactccgggggggtgcggggcgcagcggcagcgggttgggatcaggccctgtcagcatgtgtgtttgtgcttctgcccacccgtgtattgtcccctgtgtccgtgtcccggctgctgtgagagccactgttcctgtcgtggccctggcgctgaccgtgacctcctctgccaacccgccccgttccacgcaggtgttccgggctgcaccgcccgcagaccgaggccgaggtgctggagcagagcgcgcagacgctgcgcgcccacctgggggccctgctgagcgcgctcagccgctcggttcccgcgtgccccgccgtggtgcgcgccaccttccgccagctcttccggcgcgtgcgcgagcgcttccccggcgcccagcacgaggtgcgccctccacccgctgggctaggctgggccgggttggactgggctggggcgaggggcgggcgaagagcggtggggaaccagggagcgctggggaggaccagggaggctgtgtcccggcgagggtcagggacggagcctaaggggagggggctgccaggagccctggtctgggggactccagcccgcgctcttccgcacccctccagaatgtaccgttcatcgccgtcaccagcttcctgtgcctgcgcttcttctctcccgccatcatgtcgcccaagctcttccacctgcgggagcgccacgcggacgcccgcaccagccgcaccctgctcctgttggccaaggtgcgggccttgcggccacgggcgggatgcacagctgggtgtcctaccggggccctggcctggactgcagagtgttccctaccggctccggcgaggccactggcacgcccacgtaggcactgcacttcacagtttgcaaagccttcctgtggccaccttgtccgagttccatctcatggataagggaacaggcctgcgaggggtcgggggttgccaaggccgcccatcctgtcggtggtgaatcgcgggaccttccaacccaggtctgcttactctcaggctgcacctatgtgcccggcaccggggtggggtatccagtgcagcagcgtcagttaaacctacagaggaaggcccaagtggtctcagttatcataaggcatcaaacttcatgatcctctcctccctgatccctagtggggctggagggggcccgtgggcatggcctctgtcgcctctgcctccatcgctacagctgagtagcaaagacttggggagggggggtgggagggggtgcagtggctaggcccctaacctagcagaacctggtccttcctgctgtcacctccaggcagtccagaacgtgggcaacatggacacgccggcttccagggccaaggaggcttggatggagccgctgcagcccaccgtgcgccagggcgtggcgcagctgaaggacttcatcaccaagctcgtggacatcgaggagaaggacggtgagcgccgccctgcacagacccgcccacagcctactgctgacgtttgctccgcccttgagccccacggccccacccaccgctgtttgttcctctcgtggccccacccaccgcctgctgttgacatttgccaggcccccaggccatagacccacgcaccactgtttgtgcttcctgtgaccctgcccactgcctgctgttgacgtttgccccacccctagacccatggcctcacctcccatcatctgtgcctgttgacatttgctccatccttgagctccatagccccgccgccacctgctactgacgcgtgtcccgcctccaagcccatggccctgccttcctcagtccacctgtcaccccgctcaccaccagctgttgatgtttgctccgcccttgagccccatgactacgtccactgcctgctgttcagatttgctcagcccttgagccccatggccccgcccactgctccgccccccccccccagtcccgccctcattccctgggctctctattcccctccctccctggcctggcagagctggacctgcagcggacgctgagtttgcaggcgccacctgtgaaggaggggccactcttcatccacaggaccaagggcaagggccccctcatgtcctcctccttcaagaagctctacttctccctcactaccgaggccctcagcttcgcgaagacgcccagctcca

SEQ ID NO: 38112 - DNA, 2300 bp, Homo sapien
agcaacaatcatgtgaacagaaagaaaaatgggcataacaaatgaaccatgtttttgtccaaattaggttcacaagcccttatctgcaccatccagactcaaacaccttaagattttggtagttcatttggtagcaaaaactgaccttaattgtcatgaggatatttagagtcgtcttatattccacttagctgattattcacacatatcacacacttagctgattattcacacatatcacagcaaaagcatgaacatgtctgattaccagttcctgtccagatcctgtgataagggcttacccaggacatacatggtataacttttctgaaatcttagattgaattccaaagcacatctggacttaagggattgtggatatatacatatatatactatatgtatatatatacacatatgcatatatatacatatgtgtatatatatacatgtgcatatatacatatacatatgcatatataatatatgtatacatatacatatgcatatatatacatatgcatatatacatatacatatgcatatatacatatgcacatatacatatacatatgcacatatatacatatgcatatatacatatgcatatatacatatatgtatacctatacctatgcatatatatacatatatgtatacctatacctatgcatatatatacatatatgtatacctatacctatgcatatatatacatatatgtatacctatacctatgcatatatatacatatatatgtatacctatacctatgcatatatatacatatatgtatacctatacctatgcatatatatacatatatgtatacctatatctatgcatatatatacatatatgtatacctatacctatgcatatatacatatatgtatacctatacatatgcatatatatacatatatgtatacatatatacacacatagtatatatacatatacactatgtgtgtgtgtatatatatacacatatatatactatgtgtgtgtatatatgtatatatatactatactttttttgagacagagtcccgccctgtagcccaggctggagtgcagtggcgctatgtcggctcagtgcaagctctgcctccctggttcacgccattctcctgcctcagcctcccgagtagctgggactacaggcgcacgccgccacgcctggctaattttttgttttagtagagacggggtttcatcgtattagccaggatggtgtcgatctcgtgaccccttgattcgtccacctcggcctcccaaagtgctgggattacaggcgtgagccaccgtgcccggcaggatttatattttaaggaggcaggggagttattctccatgggaggaaataagccgtgagctgccttgcgctttggcatgtttctctatcatacagataagaagctagttcagtcaagtgtatgcagatttgtggatggaaaaactggtgctcccaggaggaggggagcagattgaggaattactgacaccttctaggggcgaccagccagatgtgcaggtgaagcacaagacaggttctcttcatgcctccactatcctggcctcgaccaaactgcagagggaaaaactcaggtgagagtgagaaagcacagtcactttcagttaggtttgtagcggtgtgatcgtcacttagcactcatttattcgtgtattcatacatttatgcatgtttctttcacagatcaaactgttgagggtccacaaacaggctgaagacctcgtctggagggagactgcagtgaacccaagatcgttcaaataagcgcatcgacataacaagatttagaaaagaataagcacggtgctgtgagagcagctagcgggggctggactgggtccctgcggccaggcttccaagtcgagctgccgtttgggtgggaccagaagacgggctagtctgcgccccaggatccctccctgaggacaaacagaaggccgggtcctcccttctcccgcttgtccttcggcattcgcgggacctgcatgctagaccagctggccggacagctcgctaggacccgcgggtgcggctggcccctaccatttccgcttcctgccgtggggcggggtttccggttgtcggaggcgaggcttgtcggctgtcaaaggggcggcccggcccggcccggaagctacagcagcggcgcggagactgcggggcgggccatggcggcgaacctgagccggaacgggccagcgctgcaagaggcctacgtgcgggtggtcaccgagaagtccccgaccgactggtgggcggcgag

SEQ ID NO: 38113 - DNA, 2300 bp, Homo sapien
ctgaactgggaatgagcctctgcgctgggaacattcttaaaggtggcctggggtagagagggatcaagtcagagggataggtggcaggcattgagcttggctcttattatattagctgctgagtccctttttttttttttttttttttttgagacaagagtcttgctctgtcgcccaggctggagtgaagtggcacgatcttggctcactgcaacctctgcctcccaggttcaagtgattttcctgcctcagcgtcccaagtagctgggattacaggcacccaccaccacacccagctaattttgtatttttagtagagacggggtttcccatgttggccaggctggtctcaaactcctaacctcaggtgatccacccgccttggcctcccaaagtgctgggattaccggcatgagccatcgcagctggttgagtcccttcttgcaagagctgggttgagctgccatcttctgttacctgctgcttgtgccagcttgctatcttctgggagccagggctttgtggccatcaagaggaatgggcttctttcctccagggagttccccccagctcatgctggcagtgtgccacctcccaaatctttctcttgtttttctgtgttcttttctctagttccttttctctgagtgtttctcattcagtgtttctctcctgtattctgtctcccctcctggtaaggagtgccttttcccggaggcctgtctcctccctaccaaccagatccactgggcctgggtctaatttcttccatttttctgaggcataagtatctctgcccagtggcactggcaaagccctggggaagccaagttgaagctgatttggttcctgtccgactgtttatccctggagcttctgtctggcctgcctcagcaggcctgtgctttagagcctggggagatgacacacactggactgggttttgcctttgacttatagtccagtgggtcagtgcctccagcccatgtccagcagccctgctggggatgttcagttgctgcaaggttcatgctattagcaagccagaatgaatctttaccagagttttgtttttgtttttgtttttaagagttggggtttcactctgttgtttgggctggagtacaatggcatcatcatggctcactgtagcctcgacctcccaggcttaagcaatcctcccacctcagcctcccgagtagttgggactacgggcatatgccaccacgcctggctgatttttgtatttttggtagagacagggtcccaccatgttgcccaggctggtctcaaactcctgggctcaagcgaccctcctgcctcagcctcccaaagtcctgggattacagacacgagccacccacctggcccagagttctgttcttttttttgagatggagtctcactctgttgcccaggctggagtgcagtggcgcgatcttggctcactgcaagccccgcctcccgggttcatgccattctcctgcctcaacctcctgagtagctgggactacaggtgcctgctgccacgcccagctgattttttgtatttttagtagagatgggatttcaccgtgttagccagaatggtctcgatctcctgacctcgtgatccacatctgcccgcctcggcctcccagagtgctgggattacaggcgtgagccactgcgcccagcccaaagttcttatgaataattaatctttcaggaaaagaaagccatggccccatgtcacccatggagagataaggctctgctagatagaaaacttgctcatgggtacctgtccgtgaggggcttggcaggttcatggctttaactgtgtgatttcatgtcgtgtcattcctttgtggtttctgataaacacaacctgtggtagtctgtgtttaccaaagagtctcaagcctggaaggacctgctgccctacccaccaggcttcactggagccagggcagacgtgcacaggagtggtgggcagccttccaaggggcccagtgtgtgtatttctccgacttgcttctccttttgggtgctctgggttcaggaatatgtagatatgttttgtctcttcaaatccatatacctagtggccaggtgagtatttgacacatgaatgtatagcagtcattgggaaactccacagctcatgttttcctcatagtagatgtgtgctcccatctccatggctttgtccctcacaacccccaccccatggtaagtcaggccagtgtcctcccagctgcagagctgagaaggctgcacagttgcctactgagaacctgcctagtgggtcagagcaa

SEQ ID NO: 38114 - DNA, 2300 bp, Homo sapien
tataatttcccttctgtactattgaatactagaatttattccttctatttaactgtacttttgtacctgttaagcaacttctcttcattttctctcccccatgcccttcccaacccctggtaaccagcattctactctctccctccatgatacccacttttttagctcccacatgagtgagaacatgcaatacttgtcttctgtgcctggcttatttcccttaacatcatgacctccagttccatccatgttgctgcaaatgacaggatgccattctgttttatggctgaataatattccctcatgtttatatactaaattttctttaccctttcatccattgatggacgttttggttgattccgtatcttggctattgttaatagcgctgaacttcagagttggatatatccccagcagctggattgctagatcatatggtagttctgcttttagtaggactaaaatactgttttaaaaaccatactgttgtctaggcgcgatggctcacgcctgtaatcccagcagtttgggaggccaaggtgaacagattacctgaggtcaggagttcaagaccagcctggccaacatggtgaaaccccgtctctactaaaaaaatacaacaattagccaggtgtggtggcgggcacctgtaatcccagctactcaggaagctgaggcagagaatctcttgaacctgggaggtggaggttgcagtgagccgagattgtccactgcactccagcctgggcaacagagtaagactctgtctcagaaaaaaacccaaaaaaccatactgtttttataatggctgtactactttacattcctaccaacagtgtataagaatttccctttctccacatccttgctagcatttattttttatgttttttataatagccattctaactgtggtgagatgatagcccgttatggttttggtttgcatttccctgatgatggttagtgatgttgagcatttttttgtatgtagttagccatgcgtatatcatctttcgagaaatatctgttaaggtcttttgcccattttaaaatcagattattatttttttgctactgagttgtttgagttccttatatattctggtcactaattccttgtcagatggatagtttgaagatattttctcccattctgtaggttgtctgtttactttgttgattgtttcatttgctgtgcagaagccttttagcttgatgtagtccaattggttgatttttgcttttgttgcctgggcttttgaggtcttaacccaaaaaaaatctttgcccagatcaatgtccaggggcatctacccagtgttttctttgagtagtttcatagtttcaggtcttacatttaagtctttttaacccattttgagtttttttttaatatggtaaaagatgaagatttagtttcattcttctgcatatggatatccaattttcctagccctgtttatgaaggagaccgtcctttccccagtgtatgttcctgtcacctttgttaaaaatgagttggctgtgtgtgtgagtgctctgttagtttccattgttgtgtctgtgtttatgcctgtaccatgctgttttgcttactgtagttttgtagtttaatttgaaatcaggtagcatgaagcctccagctttgtactttttgcttcagattgctttagctattcagggtcttttgtggcttccagatggcatttaaaattagttttcattgattagaaggaaggcctttgatgcaaattatgcctgggctgtctattgatacacagcagggaacagctacagaaggaaccactggatagcacagtggaggtcaagggtctcacgtgaactgggacaagaatgaggggtttgctccaagttggtttgtttgagcccttgaggggaactcgtgcctcagttttcagcagccagacaggtgccttctagtttcctgattccagtcctgtgtggtatagtagtggcccgtgctgtatggactgacaggagtttggcccatctcctgggcttgcaaagcccttctttcaagtgctgctcctgctgcagggggcccatgtgaccatcaacgcacgggccgaggaggatgtggagcctgagtgcatcatggagaaggtggccaaggcttcaggtgccaactacagctttcacaaggagagtggccgcttccaggacgtgggaccccaggccccagtggtgagtgctgcttgcccatcgccagcccttttgttgctcagggcctgaggcagggggccaggaatatgcacttcccagcacccgggctg

SEQ ID NO: 38115 - DNA, 2300 bp, Homo sapien
cctggatggaggccctgagggtggcttttggttttcctacccctgtacccctccaagaaagctctggcacactgcagaggccagcaactacttgtcaaatgaatcaaaggaaagtcaagccggagccaagggtcagaagcaggggcttgcttccccgaagtccagcccttctttgggctcccctttcctttttgacacctcctgcttggttggcagtgaggtctcccaggtctgggggatccttgccactgcttctgcacccagccctggctaagcggccttgttctcatcaaagctgccgagacctgcagggtactcagcttctacttccactcctacacagctgcaagtgacttgaaaatatgaccatgcttcaaagtctccagtgattcccactgtgttgggacacaaagcccacctctctgccatgtgcccctgatggtcgctgccccagcttgtttgctttctgtagggcttgggtctttgccaacccctctacctgaattgctctccctgtaggactcatcatagctgaggcctttgcactccgctctttccactcacatgtcacctcagggctgtccccggcctctcctttcccatctctcccagtacattatggtccttccttcctagcatctggtgctatctacggtaggcatgtttagctgctggtacgatccctcctccactgaaatatgggcttcatgtctggcccctgtgggactgccagagcctggtcctcagtcatgtttagttgggctagtgaatcaactcttggtcaaagggacaaaagcagatgaggagatgtggcttcaatcaggatcagtgtggaacagtgagacctgcgcatggcactgctaggagggatgggttccacctgccagccttgggggtcctggcagccgacaggactttgcccactgggacttgtctgccaacctttgggtacagagccttagcttcacaggccccaagccaggagcccctccccaggtaggccagcagggatggagggaggcctgtcgagggtttcttgcacactcagatccaagtctcagagtggtggtccctctgctggcctctcacctacccgctcctgttatcagaagtgtcgcaggtgacagtgtggtcactggggtgggaggaaatgggaggccctggatggggcccatgcccaagggtctggccatggccccttcattagggccccaattgtgactttattgctcatagtctcttccctgccttggtggctctcatcccccaaacctgaatgcagaagtcttggtcctagactcaactccgtgccacccttcagcctacgttgtgggttcctgctaagctgagcatttacctaacaatcaagacttctgacagtcctcagtcctgcccccaaacccccttggatttctctttttcaaggtggtttcggctaggagagtgagcgtggcttgggtgagggcagatagggtgggagcatggggcatgtatggatgagaccttgacaaagggaccccggaggaaagacaggggccctttccccctttgtcctggaaacccggctcagccccagcccttgcccattctgctgctgctgcctggtaccttccacaaggccagactcctctccacaaagctgtggtctgcaccagctcctctggctctcctcctctgcctgctgagggccgcctcctagcctggctgccaatcacaggagaaaggggttgggattttgtttgtgcctctgtctgagcagagaatggctgataggccactgagcgttgccctggagagcccctctgtccctgctatccccatctcccctggcccagacttctgcccttcacgcccatccctgaccagcagccccactcagtctgggctctgggtgccagctggttatagacatgccacctgaacccaggccaggagctggtggatgcgtggggctattttaagcacagcctcttggcctgcacactcccctggcccccagcccccagcagctcagctactggtcacctgccaccgcctggaatgctgattggcagttggctggggtgggtgggggctgggaagacactattataaagctgggagtgttgggaagcagccgtccccgtccagagtcctctgtggtccctgctgccaccatggccactcaccgcctcgtgatggtccggcacggcgagagcacatggaaccaggagaaccgtttctgtggctggttcgatgcagagctgagtgaaaaggggaccgaggaggccaagcggggagccaaggccatcaaggatgcc

SEQ ID NO: 38116 - DNA, 2300 bp, Homo sapien
acctcctcaccccttcttgcccccactggccaatcttcatgaatccttcagccccatgttgtcctagcagacactttgcagcaaccactcagagggcctggctgatttctaagctaggcagtttcttccactgtcatttggatgagattccttgcacaaacatttttgcacagttgcccagtgttttaagtattcaggtctcatagtcttaaaaactgcctctgccttcccaggagagaacaagggctccaaggggagcccaggtgctctggccagacagaggacattaaaaggaacagaaatggttttagacagctagagggatctgctcaggggatatttgggcagagcctcctccttgagaagggtaggagccagatccacagacgaagacccttagagcctgcccatccctgctggcacaaggggaggatggggagagagggaccatacgcaggcctcctggcttctgtatgtgggtcctgaggcccaggaagctctacagccctgaagaggtagatgaattaggaggctgggagatggtgtaggaggtcaagaggatgcctgggctgagccatctcccccactcccctcagccctgtgctctgagtgcagagatggggaagagccagcccactaaagatgtcagagaggagccaaagaaaaaggataggtgctcaaggagtctggggctcaagactgaggacgatggggcagtgatgaggagaggcatgtggaagggggttgcatctgatctggtgtcccatcagttaggctgagcagtgccacactaccgtaacagaggttacaaatggagtatatctaaataagatagacagaagacttgatattatcaagacatcagatttccccagcttgatctatagattcaatgcaatcccaatcttgggaaaggaattgctggatcaatgtgtattattttgttttcattttgttggatgtggttgccacattggcttccacagtccttcctatggattgccaattacctcgcaccttcaacatgtgtggtcaatttttttgaatgtttgataaacccacaactgaagatattctcatttaggtattctgtaacgactggacaggttgggcactctggtcataaatttattgaccaggatttcttctaagaatcatctacgtgagtttttttgctaatttttctattaaattattgtctttttatctatggacaatttgataagattatcatgagataatcttaattccaaaatatctcacactttatcccagtttatcttctgactctaatttttaatcagatttaaaatttgtctgtagtccagtttatcattcttttcctttagtgtttccaagtttattgtgatatttagatcataaaaacattcaccgacttttttccagtacgttgttggtttcctttttagatggaaatgtttgacccatctggaatttattttggtgttaaggaatgaggaagggcaccaacttctatttttccaaatggcctgccagttgtcctaatgccattcgactgaaaaatcttcccgcgtgtttgaagcgaccgccccaccagcgcattggaaacccgcgtgtcggtcctgcgcccgccggcttccgtgtgacagtcccgagcgcagagggatcgggcacagcccgcacgcgtccgccccgagccgccggctcaaccctagacccagccccggcgccaaggacacagcccaccccgctccgcccgggcctaggtcccagttcaccctccctagccggggacgcccccttgaccccgcctcctccaccccctccaacaccctccccgccccgctccagcccagcctctcctcccggaggccaatggggccgaacagcgctttccgagacattaatttaaataaaaggcgggtcctctgccgttatttgcatggaggcgggtcttccggagcggccgggacacccaatcctgtaggagcccggaccctccccagcgctccgactggcccaagtagcgagccccacggagaggcctcatttgcatagggcggggccacgtcctcttccagccggcggccgcccgcccgcccacccgcttccgtcagcctcactggggcttccttccgtctcgctcggagtttccctctgcgttcgctccgcgctgctggaggctgtcgtcccaatgctccccaaacggcggcgagcgcgggtcgggtcccctagcggcgatgccgcttcctccacgccgccctcgacgcgcttcccgggagtcgccatctacctggtcgagcctcgcatgggtcgca

SEQ ID NO: 38117 - DNA, 2300 bp, Homo sapien
ttgtggcccagctctccatgagagcttttgcacatgtttttgttggtgactcgctgtgactgaagaaaagcctccttctgttccttttttgttttcttatggcttctattttccctggcagaggatgttggacccaaatccaatccatgtgtgagttgttcccagggaagtgacgtgccacgctgcttcaccccagccttgggccgccgggcttgacatgctcaactggggcaacggagcaaattcccagaacaagttttgagaaagatgattcagagctttgcagaggatgaggaaaggggagagcttgcggatccttgctgccaccaggactggcctgggggcacgtggcaggcagaggcaggctcaggtgcacagggagcctgggtgttggggctcagggtctgctctgagcgccccagtgggcacagctcaggttgatctctgagggcaaatgatgagagctaaaaggcagcagtgtgagtgccaagaatgtgtgctaggcacagcacatgcatgatcctgtatgaacgacaaggagaacagggacacaggtggacggcactgaggctacctgccgagatgtggtgcctgggaggtagagccagaacctgacacagtcccactgctttttcaaggagatgcagtgagaaagcaaaggcagggtcttggcaggaccaggtgtgagaggaggcaaggcctccttgtggtcctgctcccagggggtggcatgtatcccaggcccagcagcctccactgtggcctccccggctgctgcctgctccaactcactcggggctgctctggggacccaggtgcttcctgacccacttttcctctttccttttgaccccaggtccaaactctgccctgtcaatcatcccaggggctcctaggcttccctacctgactacttcactggggccaaaccccgcagacaatcgtggcttagggctgtctgcctctgcacttggcccatggactacctgtgagctttctcttgtgtcctcattcctttaagggggaatgtcctcggagctctgtccttagctccccattcctccagtatgagacagggactaggcttgagtcacgggggactgtgctgtgtcacgccctgccatactaatgggaccactctgcctgttgatggccgttgtagggcagccaacatttgccctggagaagccttatggcaaacaccaggcaccaaggtgcacatccctgatggatcctgggatcagttgacactcaatccacctgccttctgggtcctctgggccctctgggtccatgtggcagctggaggtatggtagacactttttaaaaaatgagttctggtaagaagaaggtgataaatggctatttgtccacgttgggacccggaggggagggatggcatgcccttacatgggactcctacccccagcggggcagctggccactctgagggcagttttgcacctgcctcctggctggaaagtgagttcccactgtgctgtccctccctggggcccagcacggggcccggccccacaccgacctgaagaggttggtaggatgactgaatgaattgacgctgggatgcagcagggcccatgggcagaggctccagagcctgggaaggatggggtggcctttctgtggccctccgaattgagagaggtctcagaggcctgacaccacggctttccgtccagggttcctggtcacccgcggagggctcagagccccggtggactcggggtcccgccttaaggggggtgcctagggcagaaggaggagggatgtcggccccctcagacccgcaccccaggccctccccaccacctttccttccctcaggccctctgtcttcccagtcgccccgccccctgcccctctgtcctaggcgcaagtctccgggcttgggacgctcgccgccagcgcccgcccgcctgccccgcccctagccccccgccccccgccccccgcccccccgcagcccctccgtccactctcggctcctccttctcttcctcctcctcctccccgggggtggggagccggctccggaagccccggcgcccccgccccgggccccgccagcgctttggagacggctatccgcgcgggagtgcgccacgcggggccggagcgcctattagccgccaggacctcggagcgccccgaccacccctgagcccctctggcttcggagccccccagcaccccttcccgggtcccctcgcccaccctaatccactctccctccctttcccggattccctcgctcaccccatcctctctcccgcccctt

SEQ ID NO: 38118 - DNA, 2300 bp, Homo sapien
cctttcccatgccctgggcctcgagtcctttccccaggccagatgctcctggaaggccgggctggtgacttcagcagggtcttgctcagctgcccctgagctcgggctgctcctgactcctgcaagaccctctcccaactcagctgtcccccatctcccgtcctcctcccctctggcgcggtcctgtcctgctgagctcctgtggacccaggagctgaggccccgcagcagggtcagggcagcctcagctggctctccctccccatagtggactattactttgggcctcctccgccccagaagcccgatgctgagcgccagacagacgaagagaaggaggagctgagtgagtgggaccaaggacttcccacaccaggcctgccctgaaggccacctggggcctgcctgatccaccccacatggtcctcaaagcccagagccaggctgactggcccctcctaccttgcaccttccagagaaacccaaaaaggaggacagcagccccaaggaggagaccgacaagtgggcagtggagaagggcaaggaccacaaaggtgtgtggctggggcttggggcctgggtccctgtggggcagcatctggactcctgattgcctcccgggcccttggtgccatgtcctcccttcattgtccctagagccccgaaagggcgaggagttggaggaggagtggacgcctacggagaaagtcagtaagtggggggcacaagggggtgagggtgggggccacaggatgggggtgctgggacaagtgactggcccaatgtcacaaacaggacccaggtccccggaaccctttcctactcagattcttgggacccagaagggaggggccccgggagcccaggatagcctcgcttggctgccccagccctggaccccaggctggcctgcttcaggagggtggcagctccccagggcccctagtggctgggcgtggtagggggaggacctggggccttggtggggagtgaggacctcaggtaccttcacaggtatccctgcagggccattgtgcagacggtccccatctggatgacatctgtggctgcgccctgggggagctctacctgtgatttcacgtgtgtcccctgagagctgggcatggtcagcccgttctccagatggggcagctgaggcccagggaggggaagcacaggctgggattggaaacagctcctggcctggctttgagtcgattccaggtgggctggtgcagggcaccagggagccaccagctgaccagagctgccctctgactgtgcccccgatgtgccgggagtgggctctgggctccttggttctgggtttggtggagggaaggatggagctagtgagccaccattctggggtacgcgtcctcagagtgtccccccattgggatggagtcacaccgtattgaggacaaccagatccgagcctcctccatgctgcgccacggcctgggggcacagcgcggccggctcaacatgcaggtgggcattgggatgggcccatctcccaactgggataagggactcctccgcccatgctcagcctcccctgccccctggacagaccggtgccactgaggacgactactatgatggtgcgtggtgtgccgaggacgatgccaggacccagtggatagaggtggacaccaggaggactacccggttcacaggcgtcatcacccagggcagagactccagcatccagtgcgtggccaggctcatggatagttggcagaggggagtggctacataggcatggctctgtgtcccattaaggagattccagtgggcccttctttggcccagccaaagaaggccaaaaagatcagtgagggactcaccctgcccatccccactcctcagcctggtcagtcagcccctgtgtcctgatagcacatgagtttagggacagatcacctgcccatggctatgtgacgggcataggacccaggctcaacacctgggccgtgcagcaccaccctgctagctcttaaattcttggggctcggaagagggaggctcaggccacctgagggcctgggagggggaagacccttgctctgaccactgtccactccacagtgacgattttgtgaccaccttcttcgtgggcttcagcaatgacagccagacatgggtgatgtacaccaacggctatgaggaaatggtgggcaccatgcccaggctcttggctctgctcccattgtctgggcgaggggtgggctctcagaggggctggcagtactgctctgaggcctgcctctccccagacctttcatgggaacgtg

SEQ ID NO: 38119 - DNA, 2300 bp, Homo sapien
tgagtaacggggacaacgaggacactggagattggggagtgttgggctggaagctggtgtgcagctgtgggcaagctagggaggaccccgaaaccgccaatgcgtttcccggacgcagacgctggcaggacgggaggaaccccgagaccccgcgccatcccttcaggaagagttacttctccccggccaagttagtgggccttgggccttctttctgttgggatcctcctcgcgtgtcgccatcgctacaagtgggcagctctgcggggaaagctgggacgctgggggcttcaccaaggaggctggcggccgaccactgggaggtctggcggggtgacgaccactgggaggtttgggcagggcctgacggggtgacgcggtcagcccactggaggccgacaccccccgtcagcccaacccctgcacgcgcggccgccaaccaaagacccgcggcgccggcctgcgagcccccgccccgcgttgcccaggaaaccgagggtgtggctccgcgttctctgggcgtcccagggactgggcgcacagtggtcggcgggatgaggcgcctggtgacggacggggcgaggagggcagcgattggtgagattaggcgatgggcggggaagccgcgcggggattagcgagttgcggcgatgggcggggcaggcgcgcggggattggcgggatgcggcgcgccgcgcggtgagtggggtccagggaaacggggtcagctgggggtggcagttccaggccgcgaggccgggctcctgggtcggtgggctggtgtcttggcggacgtcccgcagctgccgcgtggatccgagccggggcacccgccgtgactgggacagcccccagggcgctctcggccccatcccgagtagcgcggcctggctgctgccgccatcaagcacgttcgagccaaaagctcctaacgagtcactcgttagacacgtgtgcggagcctgtgtcccaggccagtgctgtcccgtggagatagattgcaagccgctagggaattttttaactttctagtaggtgtacgaaaaaagtaaaacgaaacaaatcaattggagtaaatccataaatatattcaaactattatttcaattgtatgtgaaaaaattattgggatattctttgtactattcttagaaatccattgtgtgtccaacccaaacatcacagttggactcaccacatctcctgtacttcgtagccctaggtggctagtggcataagacacaaaaatctcagctctcctggagcttatggtctagttggagcaggcagacaatacatttaaaatatacagtttgttagaaggtaaatgttgtaaacaacaataacagttgaagtactggggagagttgcagttgtaaatcagatgggcagggcacaaggtaacatttgagtaaagatgtaagaacttgaaggagatgggcaagtgagctctataagtatacgggagaggggcaagcaagagttcagaggccccttgctgtggggagggatccaaggtggaggagtgggaaccaggaggggagaggaccagtggagcagatctcataggcagttgtaaggacttggggccttattcaatgaaatgaggacactttggagagttttgaacagagcagtgactgatttatgttttggttttggtttagttctattattatttaataataggcttattatttcacagaagttttatttaataaggcagacctcttgtctggaaatgagacaggtgccggagagctggatggaggcagatcgggaattccatttggggcaaactgaacttgattgagaccctggtagttgtccagatggaacaggacacctgagtctagggttcgggaagaactccagatgggacaaacactcctagctttccttttctctttttggatgaccgctacagggtgagacatcggtatccaggcacgataaatttccaagtggacacaatgtctggtgtcaactacagctgttctccttcttttcccagtatcctttgggtgcagtgagacaccaggagagctgctgctttgggggatggacaggggcagcaggaatgcctttgtgttttcgcagtgaacctccttggcctgggcgaagctgtgtggaccaagcaagtcaggagtgtggccatgttttctgagcaggctgcccagagggcccacactctactgtccccaccatcagccaacaatgccacctttgcccgggtgccagtggcaacctacaccaactcctcacaacccttccggctaggagagcgcagctttagccgg

SEQ ID NO: 38120 - DNA, 2300 bp, Homo sapien
ataaaaatcaataaatgtaatagaccacattaacagaaaaaaaacccacacggtcatctcaattgatgtcaaaaaagtatttgacaaaattcaacactcttttgaaagaagaaaaagctcaacaaactaagaataggaggaaactacctcaaataataaaatccataggccaaatccccaaactcacagctagcaacatatttaatgctaaagactgaaagcttcccctttaagatccggaataagacaaagatgcccactttcaccacttctactcaacatagtatgggaagttctagccagagtaatcaggtaagaaaaaagaaataaaaagcatctgaattggaaaggaaaaagtaaaattatttgtttgcccaatacatgtacaatgtttcaggtgaaggctcagaacagtacaaccttaccagcaagagtcctgctgtctctgtgtgaatcccagctattactcactagctacatgatctctcttgccctccctgcctcaatttcctcatgtgtaaagtgggagaaaaataatagttcatgcttcaaaggttttttgtttgtttgcttgctttgagacagcgtctggctctgtcgctcaggctgaagtgcagtggtgcaatcttaggtcactgcaacctcagcctcctgggcttaagcgatcctcccacctcggcctcccaaagtgttgggatacaggcgtgaaccactgtgtctgacccaaaggattatttgaggagcagatgaattaatgtgtcataacctcaaagcagttgcaaaggcgtttaataattaaaatatcacattttaaattaaaatataaggctgggcgtggtggctcatgcctgtaatcccagcactttgggaggctgaggtgggaggatcacttgagcccaggagttccacactagcctgggcaccattgggagaccctgtctctacacacacacgcacacacacacacacacacacaaacttaaagtagccaggcgtggtgctgcgcgcctgttgtcccagctactcgggaggctgaggcgggagaatcactggagcctgggagttcgaggctgcagtgagccgagatcgcaccactgcactccagcctgggccacagagcaagacgctgcctcaaacaaacaaacaaaaacaaaaattaaaatattaagtaataattaacgagtgttaatatccactcgttgtggagacaagacctggacttaggaaacaggcccagggaagtagcagaacagtagcgctagaggacgcctgggagaatcagcgcgcggcgggaagagcccgggaagcttagtggggaagcgtctcttgatggggtgaggaattctataaattagtggagatggaaaaaaaaaaaaaaaagtattcccaaagtgggagacagcactcagaaagacgtggtggtaagaacgagtatgagtaacggggacaacgaggacactggagattggggagtgttgggctggaagctggtgtgcagctgtgggcaagctagggaggaccccgaaaccgccaatgcgtttcccggacgcagacgctggcaggacgggaggaaccccgagaccccgcgccatcccttcaggaagagttacttctccccggccaagttagtgggccttgggccttctttctgttgggatcctcctcgcgtgtcgccatcgctacaagtgggcagctctgcggggaaagctgggacgctgggggcttcaccaaggaggctggcggccgaccactgggaggtctggcggggtgacgaccactgggaggtttgggcagggcctgacggggtgacgcggtcagcccactggaggccgacaccccccgtcagcccaacccctgcacgcgcggccgccaaccaaagacccgcggcgccggcctgcgagcccccgccccgcgttgcccaggaaaccgagggtgtggctccgcgttctctgggcgtcccagggactgggcgcacagtggtcggcgggatgaggcgcctggtgacggacggggcgaggagggcagcgattggtgagattaggcgatgggcggggaagccgcgcggggattagcgagttgcggcgatgggcggggcaggcgcgcggggattggcgggatgcggcgcgccgcgcggtgagtggggtccagggaaacggggtcagctgggggtggcagttccaggccgcgaggccgggctcctgggtcggtgggctggtgtcttggcggacgtcccgcagctgccgcgtggatccgagccggggcacccgccgtgactgggacagcccccagggcgctctcgg

SEQ ID NO: 38121 - DNA, 2300 bp, Homo sapien
aattctattcgtaggtaggttatatgactgaattgaaatagataaaatgaatttcttttctagataacaaaggaggtgtcataaaacacttgttatgggccagtgtgatggctcatgcctataatctcagtgctttgagaggctgaggtggaggattgcttgaggccaggaatttgagaccagcctggggcaacatagcaagaccccatctcttaaaaaaaaaagggtggggcgggggggcactgctgggcgcggtggctcatgcctgtaatcccagcactttgggaagccaaagcaggtggatcaaaaggtcaggagttcgagatcagcctggccaacatggtgaaaccccaactctactaaaaatacaaaaattagccgggcatgatggcgggtgcttataatcccagctactcaggaggctgaggcagaagaattgcttgaacccaggaggcggaggttgcagtgagcagagattgcaccactgcactccagcctgggcaacagagcgaaactctgtctcaaaaatgaattaattaattaaaaaaagaaaaaaaaaacactgggcagggtggtgtgcacctgtagtcccaactactccagaggctgaggcaggaaggagcacttgagcccaggaggttgtctgcagtgagctctactcatgccactgcactccagcctgggtgacagagctcagtggcttacacctgtaatcctagcactttgggaggctgaagcaggcagatcacctaagatcaggagttcgagaccggctggccaacatgataaaaccccgtctttactaaaaataaaataaaataaaaaatatatataaaaattagctgggtgtggtggcacatgcctataatcccagctgcttgggaggctgaggaacaagaatggcttgaacccgggaggcagaggtggcagtgagctgagatcgcgccactgcactccagcctgtgcgagagtgagactctgtctcaaaaaaaaaaaagggaatttaagaaatttaaaagaaaactcttgttatataaaaagggtattgggtctgacagataagagctcctgcactctaccagccagctactgacagacataggtctggctccagtggaggggcagcagccagtgagcccagcctggggtggcccactcctgctgcctccaggatgtcccctgtttccccagcccctctgctgtgccctcggccccagaagctggcgagactgcttctctggaacagcatcacgcaggcctgcccatcggcccactgtgcaccaggccttctggggatacagatgtcaaccaggtggggtgctcaggaggggcacagaagccaggaatgacaaacacatcagccaccaggcaaatgggaaatgtgccccagaagctccctgctgaggatgttagggagagcattctgaagtagtgtggttgagatgaggcttgaggaaggcaaggctccaaacagcagggcagactgggagcaaggtagactgcatgggagggcagctgatggagctccttaaccctctggaattgccccaaagccaagcaaagtgttcttcttggggtcacagctagctcagggatgccttctgccccttggtcagaggggcaaaaggtcagagcctagggtcaccaaaacctctgggaagccccgggggtctcaggccacagaccatcctcagaactacacactgccctcccatgcctggcgggggccctggactggccctcaccagctgtcttcttgcactggccagggttctggctggactggcaaggaggggtggtcagatacaggagtaactggatcccttcatcaggacctagggtggtgagagctttgagcctgctctgctccaggcagacattgtgtctggccctgccaggatggatagacagcaggatgttacacgttgaggacatgaaggtcatcaggaatgtggctggaatctgttaggcctcccccagcccaggcgggggctgccaagtttgggcctatcctctgttcctctccttatttggaccttcaggtgataaggctgagacataaaggaggctgggccctgccaccacgacagcagccacacctctgcagagagaatggtgagtgcctgctggggaagaaaggctagcggtctcccaggtgctggcctttgggctgggggagcagagttttctgtgcttgtgttgggttgagggtggtccccagggagaggaagaggatcctggccctggctctcctgggaatgctctgggactgtgcatgatgggtggggtggggagactct

SEQ ID NO: 38122 - DNA, 2300 bp, Homo sapien
gcagaaaccacagggtcttttctggcttaggctccaaagtcatactccaccatttctgcattatcatattagttacacaggctagacctattctgcatggaagagactataccatggggtgaataccagaagcagggctaattgaaggccagcttcaagggcggctacacattccctttcaacagtatgtcatgaacatctttccatgccaatagagcagatgaatcttaccatttttaatgactacatgtaagtgtagcataatttatttaaccaacctcctgtagttgggtatgtgggttgtgtctcgttttttgatagtagaattaatcatcttgaatatccatcaccaaacttgtcatattattttcttttgatgaatgaaaaagaaaatcaagtcatgtctgtcaatcagaaccctgagcaactaagaaatgggggtaccactgggacatagagcaaggtcccttctgattctgctcttgtctttctctccccatgaaatggggagttcactatctactgagacatcctagcccacagctgcacagttctgtctttttagaaagctctaagcagaaacaatgttcatccatcctcctcgggacagcccttgagctactgaagactctaagcatgtcctggtcatcctccatgagccatcatctctgaggccctccccttcttggcccctcttctctggacaggttctggacagtcttgcccttccaaaattcctggaaagcaggaactgttcctgctacaatgactctcaactccagtgcagtacagactgttggtgtcaccccttatcctgaagaagaggcactgagacaggacaagggtgggtgcccaggagggctggcatgagtcatgagaatctggtcccggagaattagacggtgtggggaagtaggggtgttgggccgctttctggcctcatggatgccaatgaatatcagcaggtggctcccagaaaggaactctaggggatgcctgttgctctaaatagaggctagagagggcactggcagttcagtcaaccaagaaagggggcccacttgcctcagcttcaggctttgtacacatcctcagcctttcttgagaactgaatttagattctcctcccctgtgctgtgtgcttggcccagaagaagggcaagtctcgctgggtggctgcttcttggcctggctgaaccagaaggccccagtgccactccaaacctgggtgtgagccctgcccccatgagcaaacagtagctcagagctgggggctgtgggggtcagtggcctgtcacatgagatctgatgaggccatctctgctctatattgggaaagggatcaattgtatcaagggctttcttgggagtgatcactctggccattggcgagagacctggcattctgacaaggcaccctccataccctgacccacttgccagctccagctaattttagcaggctttggcaggtgccagcaagtacatagcatgtggatgtcactcccaggtgagcccaaggagaggcctgggccagagcctggaagtcatggtctatgcccatggaggcacccaaagcaagcctgaggcctggactttgcagtcacaaaattaagaatgatacccctgttttttgtttgtttttgatcagttggccaccttcctccaccaccccttccccaagttccatacagacccctggattgtatgaaatgcaaatcgaacctctctgcagatgaaaatccactggggatccccttgcctccaagagcaagtccagacctgcaccagcgcgggccaggcccccttaggaccccctccctgtccaagggcatttcagtaagtgttctgtggccaaggcagcctggtgactttctgcccgcacaaggctgaggaatggaagatgggtaggctggctctgcacaccccctcctgctgggcagcaatccctaccccatgttcacagagtgtggccggctgccccatggctctgtccccgtggccctgtcaactgttacccacatggcctaccctccctttctgccctgcctctgaccccatggcagggggcagagtatttgagcagccgccaggctgagccctttcagtgcagaagccctgggctgccagcctcaggcagctctccatccaagcagccgttgctgccacaggcgggccttacgctccaaggctacagcatgtgctaggcctcagcaggcaggagcatctctgcctcccaaagcatctacctcttagcccctcggagagatggcgatggatgtcacaaggagccaggccca

SEQ ID NO: 38123 - DNA, 2300 bp, Homo sapien
atgagaaaactcaatattataaagaggttagttctctaaaatgaatccctaaacccacaaagtcaatgtatttccaatgaaattgtcaacagcattattttccgaagtgggatgagtagtgctaagatttataagaaagccaacattccagagcagtggggaagggattgcttcaccaccaaatagccatattagagattcccttgcaccatacccaaaccaccatctcccaggacccgggagagcagaaaagaggaatgagaagaaaggcgaggatgtgaggtgtgccctcataatggcggtgcacgcagcacaagcaattgcagaaagactaaagtactgaacaaatagaaaacttggaaaaatattagaaggaaatgtgggagaacatttttgcaatttggggattggaaacggttttcttaacaagatataaaaaccccaaaacaagaaaacaaaggttgaaattcataaaaactagatacttctgtatgatgaaagacacgattaatcaagttgttaagtttagcaatagactaggggagatatcatagtatatttaacagacaaaggattaatagatactacagatgaaatataaaatagtttctccaagtccataggcagaagataatccaatagcaacatagttaagtaatgtaaacaaatcatccttagaagaagaaatgcaatcaccaagaaacacatgaaaaggtgtccagcattttgcaattcaagcaacaatgaggtgacagatcggcaaaaaactcataaagatttatcatctgaaggattggccaagataaagccaaacttctcgtgttggcagaagaaactggtgaagccatgtgaagaggccacgtggtcctgcctaccaagatgtaaaatgtgtacagcatttgaactagcaattcagcctccaggagccatccagaagaaacactgacacacacttagactccggtgaaattcaaggacttctgccacagcctgcttcgtaatagtgaaaatctgaaactgcctcaatgaccgtcaataggaagttgattttaaagtgttacagcacatctgtctggagagatcgcactggccactcctcctcaccccctctgctggacctctgagcgtaggtggcctggagctgggtcctgagccctctttggtctataccgacactacccaatatggtagccaccagtcacgctggacacttgaaaagtggccgatcctgactgagaagggccacgagtgggaaaaacacaccagacctcagtgacttaggcagaagtatgttttgttccagactattgactgagcccgcagctgagttggctccagcaccctggccccctgctccatccactcactgggactccccactgcacagggcaacctctccaggggcacttgggctgcgaaggggagagtgggtggcatcccaggctgaagcttcctgagcagggccagaggaggagccagtccctgtgggcctctgttctgacagtgtcaacctcagccaggcttgtgtgggccaggtgtactgttctggttcagatttcaaggagatagtcagggcaggccgcgccaaagccctccgatgggctcccctactgcctggcagacctgtccagctttggactctggccctgcgacctggaagtcaggctgccaagaggtccaggcagtggcctccactgtggagggtctctggagagtttacagccctagataggggggttagggatgtgagatggtcccaggggcctgctcctgagccacgccaagctgcctgctccctttcctctgcttccagactcacgggatcctctgctcatcagaacaggagtgtgggagaccctgagacactgccccaggatctgaacaggtggcaaaggcttaacaggctagcggtcactgtagtgacaaggcgattgagtggtcaccatggtgatggggatggaggctctttgccaccagtcccagttttatgcatggcagctctaatgacaggatggtcagccctgctgaggccactcctggtcaccatgacaaccacaggccctctcaggagcacagtaagccctggcaggagaatcccccactccacacctggctggagcaggaaatgccgagcggcgcctgagccccagggaagcaggctaggatgtgagagacacagtcacctgcagcctaattactcaaaagctgtccccaggtcacagaagggagaggacatttcccactgaatctgtctgaaggacactaagccccacagctcaacacaaccaggagagaaagcg

SEQ ID NO: 38124 - DNA, 2300 bp, Homo sapien
ggtttttatggttttaggtctaacatgtaagtctttaatccatcttgaattaatttttgtataaggtgtaaggaagggatccagtttcagctttctacatatggctagccagttttcccagcaccatttattaaatagggaatcctttccccattgcttgtttttgtcaggtttgtcaaagatcagatgcttgtagatatgcggcattatttctgagggctctgttctgttccattgctctatatctctgttttggtaccagtagcatgctgttttggttactgtagccttgtagtatagttagaagtcaggtagtgtgatgcctccagctttgttcttttggcttaggattgacttggcaatgcgggctcttttttggttccatatgaactttagttttttccaattctgtgaagaaagtcattggtagcttgatagggatggcattgaatctataaattaccttgggcagtatggccattttcacgatactgattcttcctacccatgagcatggaatgttcttccatttgtttgtatcctcttttatttcattgagcagtcgtttgtagttctccttgaagaggtccttcacatcccttgtaagttggattcctaggtattttattctctttgaagcaattgtgaatgggagttcactcatgatttggctctctgtctgttattggtgtataagactgcttgtgatttttgcacattgattttgtatcctgagactttgctgaagttgcttatcagcttaaggagattttgggctgagacgatggggttttctagatatacaatcatgtcatctgcaaacagggacaatttgacttcctcttttcttaattgaataccctttatttccttctcctacctgattgccctggccagaacttccaacactatgttgaaaaggagtggtgagagagggcatcccagtcttgtgccagttttcaaagggaatgcttccagtttttgtccattcagtatgatattggctgtgggtttgtcatagatagctcttattattttgagatacgtcccatcaatacctaatttattgagagtttttagcatgagggttgttgaattttgtcaaaggccttttctgcatctattgagataatcatgtggtttttgtctttggttctgtttatatgctggattacgtttactgattttcgtatgttgaaccagccttgcatcccagggatgaagcccacttgatcatggtggataagctttttgatgtgttgctggattcggtttgccagtattttactgaggatttttgcttcaatgttcatcaaggatattggtctaaaattctttttttgttgtgtctctctctgccaccctttggtatcaggatgatgctggcctcataaaatgagttagggaggattctctctttttcttttgattggaatagtttcagaaggaatggtacaagctcctcctaaaatgtggcacatatacaccatggaatactatgcagccataaaaaatgatgagttcatgtcctttgtagggacatggatgaagctggaaaccatcattctcagcaaactattgcaaggacaaaaaaccaaacaccgcatgttctcactcataggtgggaattgaacaataagaacacatggacacaggaaggcgaacatcacacaccggggactgttgtggggtggggggaggggggagggatagcattaggagatatacttaatgctaaatgacgagttaatgggtgcagcacaccaacatggcacatgtatacatatgtaacaaacctgcacgttgtgcacatgtaccctaaaacttaaagtataataataaaaaaaatgcttactttaaaaaaagaaagaaaagaaaaaaaaaaaaaagaagggttcaggccgctgtgggaggcccagcaccacccagcacaagacagtacggtatcccgccgcgcgcccgactccacctggcgagcagggaggggccaagcttacgcgaggcgtggcatcccgcccctcgctgcattgtacttccgggctcacatttctgcatccggagtatgagaaccctcaaccaggctgaccggatccggaagtggattgcgagccaggaggaggaagccggcggtggccccgtcagcagccggctgctgagaggccggtaggcggcggcggtcccgaggggcggcggccgcgctgctccctgagaacgggtcccgcagctgggcaggcgggcggcctgagggcgcggagccatgaagctgtacagcctcagcgtcctctacaaaggcgaggcca

SEQ ID NO: 38125 - DNA, 2300 bp, Homo sapien
gggccctgttctctcttataccctttcttgcccagctcacacacaggcgcctgaaggttgggcctttctgaccagatgtcacagttttgtcactgcttgtttacatgtctccctgaccagcgtatgagcactgggacatctttccatcctgctcatgatacagtgcctagtttataccatgctcagcagttgatagatacctggagtggattgaaacccacatacaaagctttaccatttacacaggcatagctttagtgtgtacatcagcgtctcctggggttggagttgttggcctgcgatggagcctgggaacctgcattttataaaaagcatcccaggggcttcaaacacaggtgtgctgactgcactccaaataacgtggctttggaatgaacgatagatgtgaaagtctcatggtatctgtgtcttttgaaaccttgtgagctttcttaccacctaggtggcatttctccgttttctcctcaagccatctctttctgttgctcaagtcctagtctgagtaccatgacacctgggacacccgctgtttctcctctccccacggtggggagtggatgagtcctattcacccagcctcatctagctgcagttgtaaaatctagatgattggtgtgcatatctgaatcagttaactttctgtgttaaaaatttgagtcgctcagctgtgtgtagggatgaaggacattcttgctggctccttgttctatggcgcttcatgtgtgcatctagctgctgcagcagtggccatctgaggagagaagcgagctgctgcttcctgagggccctggcagcagagctgctggctcttgtgaggtctccatctctagaccccttcccatggggtcagtgttttcatttcctaagtcagagtttgtagtgatgacatttaggacatagcccatttagaaggcaggacatgttctgtcatagtgctgtctggtatatatttggggcatgtgtgtaacttagaattttctaggagccatattttaaaatgataaaaggaaaataggtagaatttaatttaattatatattttacttaacgcagtatatccaaatacaatttttccaacatgtaatcggtataaaacttgtttttttttcagtataaaacttactaatgaagcatgtgtgagtttgcatctgaaatctggtgtgtctgtactcagagcgctgctcagtttggacttgcctcacatcaagtgctcaatagccatttcccaccgccttttgtttcctgtggctgctgtcaacagaaaccctcaaatatttgcttttaacagatagctctgtgggcctggctggtgtcttttggggctctgagtgtctgtcccaggcctctctccagcctctggtggctgctggccatccttggcattccttggattagaggtgcatcacttcaggctctgcctctgccgtcacgtgaccttctgtgtgtgtgtttccgtttcttaccaggacatcagtcatggaattagatgccaccctaatccagtattacctcttcctaactagttacatctgccaagaccctatttctaaatatggtcacattcagagattctggggatgttaatttctgggatgcggttggggttggggggtgcggtgtgggtcactctccaacccagtacaatcatatagtgcccagctactcttttttccaaagctccatgcacacgcacatgtgcgtgcacacacacacacacacacaaatgtatatataaatgtgtgtgtatatatatatatgagttttcctggagtgctggttatctaagcctgtgctggggacagctttttgggaagtctgctacatcccagttagatcttctagatttcacgggaatgtcaccaggttctgttccatccacttggacagtaactattcttggaccgagtctcgacacctagaggtgaagtttgtgtgtgttggagaggaacccaggtaaggcactttcccccatgactgaaatatgaggggctcatgtcagggcacgtactgaacagagctggattctcttttcttttttgtccagcacaacaccatggagtctctgttagagcgaggtgagaagctagatgacttggtgtccaaatccgaggtgctgggaacacagtctaaagccttctataaaactgtgagtacccagcacctgctgcctcctgggtgttctctctagagagcagtcgcagcttgctgcttctggcactctccactatgaacgggtctttcttagactgttgaatcatggtggatgattccttgtgcgg

SEQ ID NO: 38126 - DNA, 2300 bp, Homo sapien
tggcccccagtgcttcctgctgagcagaccctccctcctctgctcccctctctgctctggccatcagctcccatcacattggcatcatcactctggggccagggaaggggctggctctctggggtggtgggagggatggggccagcagccaagccatttccaggacttccaaaacagcgccactacacccaacacggccctccagcccagctcccacctaggcctgggctccttacagagccccagagtgcctctgtggggaccccccacttccttctggccagtgccaccacccagcccatcatcagaagacatctttctccatggcagggaccagggggtccaaggggcacccatggtgctaggcaccagggcctgggcattcttcccatctggcagctggggatgggtgcccctgggacccgtgtgtgtctggggtgggtcatgctctctgcaggactcctaaacaaccttctgggctgtggtgaactctgagcctgcacctaaagacctgtagttctggtctagggcctccaagcagtgtccaggcagtgtccagaccagggggcggtcccccagggaccttgtaagatgtttcctctgaggagcagagcaggcctcctggggacctgggggatggtcttttgaagggcagcagccctggagcagggtgggagagtctggggccacctctgccctctaaggccacctgagaggtgaggccggggcctgactggacgtccagtcccagaggggcaggtgccctgagggaatgtgggcgacaggaatgctctgcctggggccaggccaaggttcctggagccctgtgcggatctgcagagctcctgggaacgcctcaccctgtattttggatgacaccggctgctgcttcattggaaccagccagtcccattgtgttttacgtcttggaatttcaaaaagcccattttcctctcttgttaaagagtcagctgagcataccagtctctctgccaggctcatcttgctgggagaagtggagccctcatgtgttggggatgcagggtggccacagcactagggtggcagggccggcctcggactccgtgccagcctgtgctggctgccgtgagaatgcaccctggtgaggggcgccctcccagggaccagcacagaactgggtgtcttctccggtcactgccgcatgaggtccacagagctggggccctgcagccgccagagggcatgtcccctgagcccctggcctttaagccccgtggaagcagccgaggcagagatcagcttcagagcctgggctggtcctgacacaggcccagccctgtccacctgccctcagccacgtcccacctatccttggccgcatcctgacccgctgcctcccgtgtttcctcaggagtcttctgacagtgccaataccaccatagaggatgaagacgctaaaggtacctgcacttgagtccttgcccccccagcggccttggcattgctgggttgctctttgaggtgggtgggacttgggcagggtcaactctcctgcgacgcctagtttatgcatgtgttgaggggctcagggaccctgtagctgtaatcctgctccaagcctgggtgtcaggcctgcccagagcggagaagcatggcagagatgaccgacagctgggcagtctcggtcaccgcatccaagtgaggaagccacggctttgcatggaggcaggttctccacaccaggaccctcacggggaaacaggcccatgggtagaatttgttccaagatgctgtccttgtcttaaagctccttaagcttgcgtttctgtccagcatgcacttgccaagtggccgggcagctgggtgagtgtttccgtgtttgcctttgcttagccaggagtgtcctgctgcggtgggtttctgcaccacagattccagggccccctcccttgctcacccaggccaatgtcttgtgtgttccccaagaggcccccagggcaccaggcactggggcatgctccatggattctgccgcctccagaccacccacatggggcctcctgaccctcatcgctcacacggtcacctaataagccttatgctgttctcagggctaccctggtgcccaaaaagggtcagccactctgccagtttaggggagaaaacttctcacctgtccaaagcatagccttgctcctgcccggcctacccagctatgacactgtccctgagcagagatgagcacaggactttgggccctggatgccggagagtgggtgtttgtgtgattcccctgcagtctggaacaggccccaaag

SEQ ID NO: 38127 - DNA, 2300 bp, Homo sapien
ctgcttcatacctctaatatttcagctcggaggagggactgcctgggggtcccaggtgctaacaggtacaaaaggcgggaagaagtataggatacaatgaatctcaaattgcatctcttagtgaccccacattcttgtgtaaccctggtcctgggcagcttctcaacttttgaaaggtgacctcggccgggtgcagtggctcatgcctgtaatcctagcactttgggaggccgaggtgggtggatcacctgaggtcaggagtttgagaccagcctggcccacatagctggggctgtgagccactgtgagcttgttacaggcgtgagccaccgtgcttggcttgttatttgtattctgttgtgtggccctacctcgtctttccagagctcagaaagggaaaatatggatgcatccagcaggtgctggaagaaactcctgtggggttaaacacaacgccaagaacaaacctcagacttggcctccagtcctttctcgagcccatgccagtctgtctgttaggatggcccaggattctctgagtccaagtctgacatagacggggtctcccttcctgctatggtcctgctgaagtcaaggccaggatccctctgcttcctcagctggggacttccccaggtggcccagcatttgcctttggcctgagaatttctcgtcctctagtgtcttctgggtgcaggtgggtcgatggcagggacttgttgccgtgtggtctactaattgcccagcagtcccatgccaaatgcatcctggcccagaagggccctggctgccagcactcagaatgcctttatcccctcccttatccacatgacatttattgtggcttctggggcttgccctgggctggccacgaggtgagagggatgagcaggataggcccagaattggtccttggggagcagtaaggaagtcatatcagggcagcagcgtgacccaaatccagagctggctgctggaaaccccctcctcagagcctgcccaggatggaccccgtcagagaagagtgtggggatgctggagcccagtggtctaaagtcccggttctggacagcagccctggtgccaggcctcagggaaggctgttttgtgggaaaccgggtcgccctgcctcctgcctgcctccctgcactctcctcctccttggctgctttcaggagggggttggggtgtgtgggccctcctcctccaggcaaaagcagggggcaggcaggtggaccgtgctggaaaaggagagaatgtgcacctttacctgatcagggtggctgtgagctctcaggccccccaaattgctggtggagcagcccctgttcccctggctcagggtccgttggtctggactccgaatgttgcctcctgggacctccattccagacaacccagcaaccagtctttggagaagtgagggggaagggaggggctggggccaaggggagggggcaggccccaccctttcactttctcatgctagtgacccagtgtgtacactgccttctgggcggttcctcctggccaggcagcctttggggcatgtgtggctgatggagactgggcagaagggatctggcagcatctcttcctgagggtgtgaggaatgagtcctgtggagggcagcacatgagccctctacctccatgtgggccccagtcccctcctgctgtcaggctaggtgggccttcgagagagagagaggaggctgcgttcattatgtgcactcttctgtgttatgtgagagcgaggggtcggcagcagcaagtggcctgcgtgcgcgaggtgcgggcgtggtgcgggtagaggatgaaggcgtcagtacagggcgcgggtgtgtgtgtggggtgcgggggcgggcgggggcgggcgcgcgtgtgagtgcaggtgcaggtgcaggtgcgttgcgggtgcggggcaagggtgtgtgtgcagggcgcgtgtgcagatgcagggcgccggtgccctgcgggtgcgggtgcaggagcagcgtgtgcagggcgcggggaaggcgcgtgcagggggcggcgggcggggcgggcgcggcggcggcggcggtgacagcggcgcccgcgcctccccgcgcgtaggtgtgcggcgcgctcctggcgaggacggagcgagcagatctcgcgtgcgctcgccgcccggcgcagcccagcccggcccccgcctggcgccgcgagccgaggtgtctcccgcgcccgcgcccgtgtcgccgccgtgcccgcgagcgggagccggagtcgccgccgcccgagcgcagccgagcgcacgccgagcccgtccgccgc

SEQ ID NO: 38128 - DNA, 2300 bp, Homo sapien
aattttgtttatcttttcaaaaaacaaatttttattttgttgatcttttatttttcttagtctccatttcagtgatttctgctctgacatttattgtttcttttcttggactaatttggggtttggtttgttcttgcttttctagttccttgagatgcatcaataggttgttttttgaaatctttctacttttttgatgtagacatttattgtataagcttgcctcttaatactgcttttgctgtgtcccacaggttttggtatgttgtatttctattttcatttgtttcaagaacatttttaatttcattcttaatttcttcattgatccattggtcattcaggagcctgttgtttaatttccatgtatttgtacaattttgaaacttcctattattattgatttctagttttattttatagtggtcagaagagatacttgatataatttcagttcttttaaaatggttgagacttgttttgtgacctaacatgtagtctgtcgtgaagactgttccatgtgctgatgaaaagaatgcatattctgcaacagttggaataaatgttctgtaagtgtgaggttcatttggtctaaagtgcagtttaaatccagtgtttgttgattttctgtctagatgatctgtccagtgctgacagtagggtgttgaaatccccaactattattatattggaatatatctctccctttagatctaatatttgctttatatatctgggtgttctggtgttgagtgtgtatatacttaacaattgttatatcttcttgctgaattgatcccttaatcattatatagtgaccttctttgtcactttttacagtttttgactcaaagtctgtttaatctgatacaagtatagctattcctgctcacattaggtttccatttgcatagaatgtttgttttttttctttcatcccttcactttcagtctatttatgtctttacagatgaagtgagtttcttgttggcaacatataattgactcacttaaaaaacctattcatccggtctatatcttttaagtaggaaatttaattgtttacattcaaggtttattattgataggagaggacttctatcattttgttagttgttttgtggttgttttgcatatcctttgttcctttattttttctcttaactctgtttcattgtggtttggtggttttctgtagtggtaaggtttgatttttttgtctttctcctttgtatatctgctctaccaatgagttttatacttttgcatgttttcatgatagtagttattgcctttttacatccagatgtagaactcctgagcatttcttgcaaggctggtttactggtgaattctttgtttttacttatctgggaaatactttatttctccctcatttctaaagggtagcttttctgggttaatattcctggctggcaattttttttactttcagcactttgaatataacattttattctctcctggcctctaagttttctgcagagaaatcacctatttatctaatggggattcctctatatgtgacttggtgcttttcttttactgtttttagaattctctctttgtctttgactcttgacagtttgactataatatcccttgagaagtatctttttgggttcaatctatttgggaatatttgagcttcctggatctggatgttcatatctcccccagaattgagaaattctcaactattatttcattaattaggttttctataccttttcccttctcttctccttctgaaatttccataatataaatatgtgtttgcttaatggtattccataagtcttacaggctttcttcattcttatttctttattgtccccctctgactggggactttcaaatgacctgtctttaagttcagtgattctttcttctgcttgatcaagtctgctgttgaagctctctactgtattttgaatttcattcactgaattctttagttgtagggtttccatttggttctttttttttatgatttctatctctttgttgaatttctcattcatattgtaaattggtttcctcattttgttgaattgtctatctatattttcttgtattttgttgagtttccttaagatcattattttgaatttggcaattaattgatttcttttttattggggtctgtagctagagagttattatgtacctttggcggtgtcatatttccttgctttttcatgtttcttgtgctcctgcactgatgtttgtgcatctgttaggacaatagccacttccaaactttgtagagtgactca

SEQ ID NO: 38129 - DNA, 2300 bp, Homo sapien
ttcacctgggacctctggaagcatttcttgtctggttttctcccttgatgatttggttcattcccctgggtaggcagtgtgagaagcttccccaaatttggaaattattatgttatatagagctgggtgggagaattatatttgttaagtgagcttgttcttgtgaaggcaggctgaggagccttgggccctctgtgtcgtgtttccattgcacacaagttcatggttagacatgatttggcccaacatgtgtctggatcatttcaggagtgagtggatctgttgttccatttgctcacgttcctcatggtgttagaaggtagggagtgaagctcagttgcctattgttcaataggactagccaagtaaatacccttttccgtggtaaattcccctatgaaaggtcatgcaagtggaactgcgatctcatgagaggatgcttccttggagtctgcatgtgaacctggcagagccgcctgtggttagcagaatatcttcgctgtgtcccccagtgggcagccttctgccaccttctcccctcactgcatggctcaggaactatctttcatttagtaactatctgatgggctggatgtggtggctcacatgtgtcatcccagcactttgggaggctgaggcagtaggatcacttggggccaagagttcgagaccagcctgggcaacagcaagacccctgtctctacaaaaaataaaaataaaattagccaggcatggtggcacgtacctgtagtcccagttactcgggaggctgaggtggagggattgcttcagcccaggagtttgatgcagcagtgagctgggatcacgccactgcactccagcctgggcaatgcagtgaggccgtgtctcttaaagaaaaagaagaaaaactgacagcggtgactcctgcacatcatttctcccatttccattttttatttacgaatatttaaactacagttaggttatggtattgtatttcattggaaatactaaactccagtttggaaaatctatcagtttgggttgtctttttttccaatcattttataagcgtttaatgagccatctaccaaatgacatggagagtagcttccaaattatttttattccacatacctattagaaaaaagttttaagtacttgatcccagtgtcttcttaatgcatacattatacagatacaaaatgtaaatggaagttctgttttatttcctcttctaattactgacctgtgaacctcctggggtatgcataccctgctttggagactgctggctggaatacatgatatgaagtaaaaggaaccctactcccacagctgccagtccagttctggagacggacaagtggtggggcagggataggtgttcctagggcggtggggaaggccatggggccagtctctgcctaggacaggctcagagggaggagggtgagctgaggcttttagaggcttggttttgtaaagaaccaagacaaaatgcaaaaccatgtgcgagtgttggtggtatattggtgagcatagctgccttccaaaaccaaaggagttggtctcatactcttggatgaagaccaggctatagtcaaccaggcagtgcagtggctcatggaaggaagaggtggtgcttgtctcttgtacagcagtcctggggtgagcaattcagggtgtgcagccccctcagctttcttggttgctgtggtccagggctgggctcctgcgtctcccaggtagccacaaggggaggcaaggaagaaataccacttgtctcctctgctcactttttgctgtgacaattggtctccgttaactggagaagggagaagaagattgggtcacagcagcttccaccacagcattttacgttaccagttatgctgagaaagattttctggtggatttactaaatgagctgacatcttcaggttgctctaggtataaattaggctggtatggttttcttcactgagatgcctggtgagcctgatgacagcgctgtagtgtgcagtcaggtaccttggaaaccatcaccactcccaccgtacagcacaccagtggtcaccctgataggagagatgattttcttctgctgtgtccccaggtctcagtggcccttagcagcagctccattcgtgtggccatgctggaggaaaatggggagcgcgtcctcatggaagggaagctcacccacaagatcaacactgagagttctctctggagtctcgagcccgggaagtgcgttttggtaagtttgggcacctgtgtgtagggctcccaggtggacttcaaacctgcagtga

SEQ ID NO: 38130 - DNA, 2300 bp, Homo sapien
gagctctggatgagaaggggtgaaataaggatttagagattggaagtggggagtatagggtggaaggcagacatctgatatttccttgcagatctttttaaaatattttttatagtgcagatctgctgatagtgaattctttcagcttttttgtctgaaaatgcctttatttcatcttccatttctgaggatatttttgctggatatagaattgcaggttgacactttttttttgtttttgtttttcttcaaacattttaaagactatcattccattgtcttctagcttgcactgtctctgatgagaagtgagtagacattctttgttcccctgtgtgtgaaatatccccattctcttgttatatcagttccttgaagttattatcattagtttgagcaatttgattaagatttactcatgcatgatagtccttgtgtttatactattgggagacttttgagcacacacacacatacacacacacacacacacacttaggaggtctgttttctctttgtccttcctttggaatattttctgttgacctgtcttcaactttactgtcttttctcctttggtgtctaatctgtagttaaactcatctagtaacttcttaatttcagatagtttattttttagccctgcaggttccccttgattgttttttatggcttcaatttctaccttggttttcctttaaatccttcaatatacttacaatagtttaaagtctttatctgctaattccattatctctgtgatttcttggtttgtttctagggattgagttttctcctgattttgggttacattttctttttctttcaaatgtctgataattttttattggatgctagacattaatggatgttatgctgtcgagtctctgggttttgatttcttctgttgagtgttgagttttgttcttgcaggcaattaatttatttgctgatcagaatgatctttttgaagcttgttttttatttgtattgattgatcaattgattgtagagatggagtcttaatatgttacccaggctaatctcgaactcctggtcccaaatgatcttcccacctttgcttaccaaagtgctgggattataggtgtgcaccaatgtgtctggccttgtttttcagctttgttaagctgtatctagggtacttttattttaaagctagcttagtcttctaagacatgcctttttggggcttctgagtgctccagctgttagtgaggtctttccattctgactggttgaggcttgaacgtctcccagctctagggattgtccatgtcagttacccaggtttcctacttgtctcatggagttgcactttacacatgtgcagttttgtattcagccaaagactcaaggggatcctatgaggttttttggagttctttctatgcgcagcctccttactagtagtctttctgtaaaataatcagatgtaagaatgaagatttaatatacaaagttgtttgtcatagtccacttaggctgctataacaaaataatatagcctgggtggcttatagactacataaatttattgctcacagttctggatactggaagtctaaggtcaaggtactggcagattcagtgtctggtgagggcccacattctgattcgtagttaccttgctgtgtcctcaaatggtggaagaggtgagagaactctctcaaatcttttatgagggcactaattccagtcatgaaggcagagccctgatcacctcccaaagtactcatcccaatatcttgggattaagatttaccgtaggaattttgggacacaaacattcagtctatagcattgttcacttcagttctatttattccaacattacttatattagcaaaattttggaagaatgctgaatttctgtagtaagggaatggagaaatacatttataaaatgcttttaaagactactgacatggttattgtgatggtcagtttcatttgtcagtttggctaagttacagtcctggttattcagtcaaacactcatcttggcatggctgtcaaggtattttgtggatgtgatgcaagttaataattggttgactttaagtaagggtgattgtcctaggtgatctgagtgggcctgatctatcagctgaaagcctgaagagcgcagcagagctcccctgaagtagaagaaatttctccgatggacagcagctgcactcagtttctggagagttccacattggcctgctatgtggatttcagactggcctagccagcccccacaatcatgtaagccaatttcttgcagtaactctctt

SEQ ID NO: 38131 - DNA, 2300 bp, Homo sapien
ctctgctgaatataggcagagaagaatttggatgggagtgctgggctgcatcattgtggaacttcaaagcgttcccttaatattttggggagtacagtgttggtgtagagttaggcagctcatacgtttccttttaaaagtttgcatagcctggatacacagcttgaagaacctcagcaggaatgatgtatgtgaaaattgcattccattttataatacattagtatgttttaagacaaaaatcgtttagactgacaagccattcattataatcgataatgctgttttttttggagtccactttgagaagtgctcctttgtagaagtccttgaaactagaatcaggaaagctagctacatcctgttccttacataaattgttgagaaatcttgggagagtcacttcacctcttgtcagctgagaagattgattggaggttacagattagagttctcttccagccctatgttctgtgactctagaatgagtactgagaacatgtgatagttgggaggttggcagtggtagcacttcctggtggtgtgaatgggtaggtcagagaaggctggatgtactgagtgagcagaggcagctgcatggtgaggactatcaagtctgggggttctgtgttcgaagtctcaggtgttaggagagagagatcttgttgctttgcttttgtggagttaagatgaagatctggagtatcagcaggatgagcaactctgaaagcatggactcaaagcggtagagaccctaatgttagaatgaagtcagggcttcaggttatctgcagaagtaaaaatggttctggtgttgtttccagtttttaaccttttaggattttattgatttttttttttcccctctgcctacatcatcatctccccacactgtttggtgtgtgctgcgtagttttttacttcttttgccagcaggagctggggcaagttacgtaacctttccaagccttatttttttctcatttttgaaatgttgatgctgtcttcttcacagtatttttgtgagggttttgagagaatgtttgtaaaataatttgacacagttagtctgttagcacccttttgactgcccgcgcagtgcacagaacattgttatttaatacctgtccgcattctagccctttggaatctgactcccacccatgtcccaggttgctgtctcagcctttccttcctccagttattgcaagagcttttgcccttccttgacaagcctattcttagagctgtggcatttcctccagtggttccctgtggaagatgtgcctctcattcagggtctaactgggatcctccttgttccaagaagtctccctagatttctttcgccagacatgctcattcccacccataccctgacagggaattgagggccttgtcatgccccctcttgtatcagagttttcatgtgtgggtatgtcttgactgtacttttttggtagagaggtcccagcaccttcatgggtgtgactgtttcccagaaaatgttaagaacttgtttacacaccagaattttgagttcttaggaggcagcagaaatcattttgatgttttttgtgcgtgcgtgtttcttgcacactgtaggcgcatagtagatgtttgttgaattgaatgtccatgcagtgtggtgaaaaacagcagcagtcctgtaaacctggttccattttgggaattgaagttcagccatattttcatgtttcatttgtgagtctgaattttggtgcctttataacccacagttgtaccaggaccgtgtattctttgcattgtgaacaagactggggtctgtaaaataatgacaacaaagaccatctaactgtacatcttttaggtatgtaaatattgttagccttggcttataagtttctgattttgttgattttggaatcctcctgttaaacactgtttacctgtcagcttttggtgaagtggcagtgcatttccattttgccagtgggaaaacttgtcagtttctgacttttagttctctccttcacagattttacgacatttctacaagatatgtggtacagtattgggcagatgaactgattgctggattggtgtttgattttaggtattcaaaacctttgaccacatggcccgtcaggatgatgagaagagaaggcaggaacttgaagagaaaatcagaagaaaggaagaggaagaggccaagactgtgtcagctgctgcagctgagaaggagccagtcccagttccagtccaggaaatagagattgactccaccacagaattggatgggcatcaggaagtagaga

SEQ ID NO: 38132 - DNA, 2300 bp, Homo sapien
gattccatatggcaagtaacctttaagaaactaccagttacagggctgggtgcagtggctcacacctataattccagcactttgggaggctgagaggggaggatcgcttgagcccatgagtttcagaccagcctgaacaatgtaggcccaacctcgtctctataaaaataatttaaaaattagccaggcacagtggcatgtgcttgtagttccagctactcagaaggctgaggcaggaggattgcttgagttcaagagttcaaggctacagttagttatgatcacatcgttacattccagcctgggtgacagagggagaccctgcctcttaaaaataaaaaaaatagaaactatcgcttgtagaagaattttgatgtcattttaaagacaaatagccacatttatttgaaaagacaaaatattcctctcatttgcaactgtctgtgtgaggttgcatgttttcatatacttcaatgaaaacaacataatgcaaattatgttgcagtgaatgcagatgtgagaatcttgtggtcttctttttttttgtggagacggagtctagctctgtcgcccaggctggaatgcagtggtgtgatctcggctcactgcaacctctgcctcccgggttcaagcgattctcctgcctcagcctccagaggagctgggattacaggcacctgccatcacgcctagctaattttcgtatttttagtagagacagggtttcactgtgttggccaggctggtctcgaactcctgatcctcccgcctcggcctcccaaagtgctgggattacaagcatgagctactgtgccggccaaatcttgctgtcttctagtaggctcattaaagagatttgcaaaaatgtaaaactatgttactcctctcactgaacttttattgctttgaagaacattattttttgcataaaagtatgttaacatgtaatgtgttttatggtcatttaaaaatgattaaataaatatttaaacattttatgttttaatttctaatgtggtaaatattgataagcataacccatatcaacaaatgttctttggaatgttcaacaaattttaagaggattaatggtccctaaatcaagagtttcagaaccactgttctagggcaatttacctgagttggattttatttacaattcattaaagcttatacactatgaagacatgttaacttgcatgttttaatctagaagaggtgcaaatcatttctatacactagaaatgataatctatggttttatcatcttgtagaacaccagccagctttgtatccaacctaatcttactctaatgctttgtcaaaatgtttaatctccacttcctcaaaatgcttttgaaccagctttaccatatcattgttaatttgctgaagaaatcttggatatgtgttcatgatatatttgtatgagtgtcatgctttttacttttttaagattatactttgacagacactaacaacatatgtatatatgacgtatatatgtatatacatactatacacacacatacacgtacatatttcacaacgatggcatacggattctctattctgaatctagctctttccacttaatatacgttgaatgcactctttattttcttcgtcatcttgactttcttctgatgcaacgccctgagtttaactcacagatctgttaataagaaacccatacatcccacatatacgcattttcccgtctctggctcactaacaaaaagcttaccctagccccatctttaaccataggttccaaatacccaggctggaattcaacacagaaataagaaaggatccacagacaacgtgacaaaaatccgagcagtcacgtgacactgcacgccccataatttttttccgcccgcttcaaacatggcggtcaagccctcgcagcgcagcagaagccacgggcttccttccgcgtaggaacctccttgctgcccttgtcgggctcttttgtctaagaccacctcaaggcaaagcccgtggggcagctgggtctggggaaaacagcccggggccgcgggggccgaacgagcacggaccggaagttccgcagccgcgccgtccggcggagccgttggctgcggacgccggaagtggccagtcggcaggtctgaggcggcgctgtgtgtgtgaagcgtacctagggcgggaggcgacatggagacaggggcggccgagctgtatgaccaggcccttttgggcatcctgcagcacgtgggcaacgtccaggatttcctgcgcgttctctttggcttcctctaccgcaagacaga

SEQ ID NO: 38133 - DNA, 2300 bp, Homo sapien
gaaacattgttaggtgcaaagaagtcaaccagaaacttatttatcaaaaatgaactattgggaaccggctcgacagtcagcaccagaagaggagaagatccacgcgttctgtggaccataacctagtcacggacgtgctgatcagagattgaaggcaacagggaggatttatgtgaaaagtcaagagaaaaagcaggatgcatgtacatatcatatggttacagctcggcacgtgtgtccagaggcaccggcagctgggttgggagatcgggtgtgaaattttcactgtcattccgagccggattgtgccgctgttatgctgcgtgtgtttcacaaatgaccccaggagaccacatagctggactctatctctctgtggtgctagactgggcacagctgggctccaggggcttagcctagacagcccccatgggaagaaacatatgaaaggcagggtgggcctttcatatctttgttctgacacagctctgtgcatgccgacagtgtcttcttgtcgcaagtgcccacggccctgcctaaggccctttgacactgaaggtgcccgccacgtgctggggcgaaatcttccaggaatgtcctctaccagtgacagatgaatgtggtggaaagctgtctgtgtccttattccttggaggggaccttcttgggcacgtccccaccagttcccggaggtccctgggggcaggagcaagctcttggatgcattctggtcagctttcttccatcccctggctcattccccattcaccgactgctgtcatctggggtcatctccccaataaactctttgcactgggatccttgtttcaggatctgtttctggaggaactagatgacaacaccgggaacagaggacctagagaggcagcttcatgggtggtggggtgtccgcctctgccggccagggacttgggagcagtgctgggaaggtgctggatggagctgtcactcacaggggcaggtccttggctgctgactgtcttcctctccactatggctgtcttgagaacttaggggtcagcctgaccctgccttggcccccttcctctcagcctctgtcttctcctgcatgaggctgggtggctcccctgtgaatcaggcaggggtccacagaacactagagacaggtcccttcctgcagctgtctccagtaggtggccacgcaggagatgttcccaacaagctgcccttatctgcagctcagctttggtaatgggggcccattaccaaatgggggtaaaggtcatggcccatcctggtgatagtgagaacccaaggtaggccttgaagattcctatcaggagggagcagaaagtgtgtaccacacccctgggcccaggtggagcagggctgctgctcaaggctcccagccatgctctgtcccttgctaggggtgaccggtgggacaggcctgggcaagggacaagagggagaaggtcggggggaagaggggatgaagagcaaagtgagcaaaggagagtcttccactatctggggtctctgtcaactgtcaggccctagagtgagctgttctttccctttgcttcctggaggaggggacttttgtcactgcgtcactccaccctgcctgcccctccgttatcaggctgttaatattaattaacaacagttgctagggatgacagtgcagagggttcctctgagcccattgctggccctggtcccaagagggggtagggcagagctggggtctgaggctgagccagggagggtgcggaggttcctcggccatgctgagctcctgaggccgggtcccagccagtgcctggtcccatctgtgcctccaggccctggcaccaactccagcagtgttaggggctaatagcgtggtctctcccctagctgactcagccctctggcttcggtcgctttgggaagtgagtggagaccctagcacctgcgtgatgaggctcatctaaagcgggggcctgtggactggggccaaacagtgggagtggtggatcattaaccagcagggctcagcctcattggtccctaacccagtcaggccagggttgtcatcgaaggggaggaggctgccttaatgtgtgttcagcccttggctgttcctgaggcctggcctggctccccgctgaccccttcccagacctgggatggcggaggccggcctgaggggctggctgctgtgggccctgctcctgcgcttggtgagtcccagggcttggctccacctcccctgcggcctccagttagggaccctggggccagccgtgtaccaggcgagcgttactgggtga

SEQ ID NO: 38134 - DNA, 2300 bp, Homo sapien
gctgtgagaagaataaggatttccatactggtgtgtcatatttacagataggttgtgacctaaaaagttttttaaaaaacagcagttagggcctgggcgcggtggctcacgcctgtaatcccagcactttgggaggccgaggcgggcggatcacaaggtcaggagatcgagaccatcctggctaacaacggtgaaaccctgtctctactaaaaatacaaaaaattagccgggcgtggtggcaggtgcctgtagtcccagctactcgggaggctgaggcaagagaatggcgtgaactcgggaggtggagcttgcagtgagctgagatcatgccactgcactccagcctgggcgacagagtgagactccttctaaaaaacaaaaacaaaaccaaaacagtagttagggtacacacacacaaattctagtgattttccccccaatactacccttgacttttgaaattcttgctttctcagagtttacaacatccttaccaaacagccttctccctccttaccacaaaaaaagaaaaaaaagttctggggttgaggggacactccattcttaacatcctctattatcccagcccaattccccagctctcactgggactagttgtacctatcttcatcatttggtcccagcatgactacctgttggtgcatgagctgatctctcctaacctaacagccagatgctagtctctggtactcagatgctgggctgcatcagataggatgcacaggatcatcctggaagcttgttgacatagattcctgtgcaacactcagatatagtcttaatgtagatttgtgttgggtggtatggtaggtagaataatggcctaccactctgaaacatatgaatatgttacctaacatgacagaagagaattaagttgctaatcagatgactgtaaaataaattatcctggatcatctggatgggcctaatgtaatcacaaaggttgtttccttgccttttccagcttggctctggctcccttcctccagcaagggtgggttgagctctcacatggcaccactttgacctcttctgcttccctcttctacactgaaagacttatgggccaggagcagtggctcgcacctgcaatcccagcactttgggaggccgaggaaggcagatcgcttggccccaggagttcaaaaccgtcctgggcaacgtggcgaaaccccatctagaaagaaaagaagagaaggggaggggggaggggaggaggagttacatatatacacatacacacacacacacacgtacgtacatacatacatacacgctaactggacgtggtggtgcgtgcctgtagtcttagctttccaggagactgaggtgggaggaccacttgagcctgagatcgcgccagcctgggtgacagtcagaccatgtctcaaaaaaaaaaaaagatttgtgattaggattcttagtcctcacctgtattattttcctattgctactgtaacaaattaccacaaatttactggcttaaaacgacgcaagtctgtaggtcagaagtctgacacgggtcttaactggtgacccgagtcagatttgggacacaaagaacagaaaccaagctgtgcaggtttctgacaggcagtccggttagggagccctacagcaacccgccggtcctctctctcaggcagttgctgccatggctcattattccaaccggttctcctcagcccagtctatctcagtggctccattcatagggtgatgtgcccggcgggacactaaccctaaccaagcagagagacggtcatgcccgtcacgacctcggccctcgccccggccgaggcttctcctgcaggtcgcgagaatcaggtgcgtcagcggcgtccgggaacgccggaagagccagtggagcggctctgtagtccaaagtaccccgtcgaccccagcacggccgctccaccgcctcctactagacccagtcctagggactgcgcagtcgcagagctccgtccgagtaccggaagcctaggccgccagcacttccgggaagtgacttcgtctccgaagccgattggttgttgctttgctcccgctcgcgtcggtggcgtttttcctgcagcgcgtgcgtgctgcgctactgagcagcgccatggaggactctgaagcactgggcttcgaacacatgggcctcgatccccggctccttcaggtacacgcgagggctggggagccggcttacgggctctgcggggcgcgccatcgctcttcacgccgcttaaaccgcactcctggtctcctaggctgtcaccgatctggg

SEQ ID NO: 38135 - DNA, 2300 bp, Homo sapien
gcagtgagcagaaatcgagccactgcactccagcctggggggcagagggagactctgtctcagaaaaaaaaaaaaaaatgcaatttagttctctaggcttttccatttaatagttttatatcctcctgtttctaaatctggatgacagtgtaacactccagtaaggtgaattgtgaattgctgaaattcttcagatgtttaaaagagttttcagtattcctcatgttagaattaatgcagagaaaaattttatcctttgaactagttacatgttgtggacttctggcctgaggctcttggggattatgtgacatattgggaagggacacatttctgctctgtggctgttactagaaatctagccagcaaatcagactacgtttgtgagaagacaggaaggcacagattagggttgagccagccttcaacaggtttggctggcagtagacacagtggagcacatcttaactattttggtaggtcctgggtttctcttggtagtttttgatagaaaggggaatggtgtgaggaaaaagtgggcatacatttcacctttccactgataaggcaggtggaattgggatagtcagtggatgggccaatagctggtggctgtgagaagaataaggatttccatactggtgtgtcatatttacagataggttgtgacctaaaaagttttttaaaaaacagcagttagggcctgggcgcggtggctcacgcctgtaatcccagcactttgggaggccgaggcgggcggatcacaaggtcaggagatcgagaccatcctggctaacaacggtgaaaccctgtctctactaaaaatacaaaaaattagccgggcgtggtggcaggtgcctgtagtcccagctactcgggaggctgaggcaagagaatggcgtgaactcgggaggtggagcttgcagtgagctgagatcatgccactgcactccagcctgggcgacagagtgagactccttctaaaaaacaaaaacaaaaccaaaacagtagttagggtacacacacacaaattctagtgattttccccccaatactacccttgacttttgaaattcttgctttctcagagtttacaacatccttaccaaacagccttctccctccttaccacaaaaaaagaaaaaaaagttctggggttgaggggacactccattcttaacatcctctattatcccagcccaattccccagctctcactgggactagttgtacctatcttcatcatttggtcccagcatgactacctgttggtgcatgagctgatctctcctaacctaacagccagatgctagtctctggtactcagatgctgggctgcatcagataggatgcacaggatcatcctggaagcttgttgacatagattcctgtgcaacactcagatatagtcttaatgtagatttgtgttgggtggtatggtaggtagaataatggcctaccactctgaaacatatgaatatgttacctaacatgacagaagagaattaagttgctaatcagatgactgtaaaataaattatcctggatcatctggatgggcctaatgtaatcacaaaggttgtttccttgccttttccagcttggctctggctcccttcctccagcaagggtgggttgagctctcacatggcaccactttgacctcttctgcttccctcttctacactgaaagacttatgggccaggagcagtggctcgcacctgcaatcccagcactttgggaggccgaggaaggcagatcgcttggccccaggagttcaaaaccgtcctgggcaacgtggcgaaaccccatctagaaagaaaagaagagaaggggaggggggaggggaggaggagttacatatatacacatacacacacacacacacgtacgtacatacatacatacacgctaactggacgtggtggtgcgtgcctgtagtcttagctttccaggagactgaggtgggaggaccacttgagcctgagatcgcgccagcctgggtgacagtcagaccatgtctcaaaaaaaaaaaaagatttgtgattaggattcttagtcctcacctgtattattttcctattgctactgtaacaaattaccacaaatttactggcttaaaacgacgcaagtctgtaggtcagaagtctgacacgggtcttaactggtgacccgagtcagatttgggacacaaagaacagaaaccaagctgtgcaggtttctgacaggcagtccggttagggagccctacagcaacccgccggtcctctctctcaggcagttgctgccatggctcatt

SEQ ID NO: 38136 - DNA, 2300 bp, Homo sapien
cgcctgtaatcctagcactttgggaagccaaggtgggtggatccctatagcccaggagttcgagaccagcctgggcaacatggcgaaatcttgtctctgcaaaaaatacaaaaaatttagctggtggcacatgcctatagtcccagctacttgagaggctgaggtggaaagatcacttgagcccgggaggtcaaggctgcggtgagccatgatcgtgccactgcactccagtctgggcaacagtgatcccatctgaaaaaaaaaaacaaaaaaaaaaatgcaatttagggccaggtggggtggctcacgcctataatcccagcactttgggaggccaaggcagggggatcgcctgaggtcagcagtttgagaccaggctggccaacatggtgaaaacccctctctactaaaagtataaaaattagccaggcatggtagtgtgtgcctgtaatcccagctattcaggaagctaaggcaggagaatcgcttgaacccgggaggaggttgcagtgagcagaaatcgagccactgcactccagcctggggggcagagggagactctgtctcagaaaaaaaaaaaaaaatgcaatttagttctctaggcttttccatttaatagttttatatcctcctgtttctaaatctggatgacagtgtaacactccagtaaggtgaattgtgaattgctgaaattcttcagatgtttaaaagagttttcagtattcctcatgttagaattaatgcagagaaaaattttatcctttgaactagttacatgttgtggacttctggcctgaggctcttggggattatgtgacatattgggaagggacacatttctgctctgtggctgttactagaaatctagccagcaaatcagactacgtttgtgagaagacaggaaggcacagattagggttgagccagccttcaacaggtttggctggcagtagacacagtggagcacatcttaactattttggtaggtcctgggtttctcttggtagtttttgatagaaaggggaatggtgtgaggaaaaagtgggcatacatttcacctttccactgataaggcaggtggaattgggatagtcagtggatgggccaatagctggtggctgtgagaagaataaggatttccatactggtgtgtcatatttacagataggttgtgacctaaaaagttttttaaaaaacagcagttagggcctgggcgcggtggctcacgcctgtaatcccagcactttgggaggccgaggcgggcggatcacaaggtcaggagatcgagaccatcctggctaacaacggtgaaaccctgtctctactaaaaatacaaaaaattagccgggcgtggtggcaggtgcctgtagtcccagctactcgggaggctgaggcaagagaatggcgtgaactcgggaggtggagcttgcagtgagctgagatcatgccactgcactccagcctgggcgacagagtgagactccttctaaaaaacaaaaacaaaaccaaaacagtagttagggtacacacacacaaattctagtgattttccccccaatactacccttgacttttgaaattcttgctttctcagagtttacaacatccttaccaaacagccttctccctccttaccacaaaaaaagaaaaaaaagttctggggttgaggggacactccattcttaacatcctctattatcccagcccaattccccagctctcactgggactagttgtacctatcttcatcatttggtcccagcatgactacctgttggtgcatgagctgatctctcctaacctaacagccagatgctagtctctggtactcagatgctgggctgcatcagataggatgcacaggatcatcctggaagcttgttgacatagattcctgtgcaacactcagatatagtcttaatgtagatttgtgttgggtggtatggtaggtagaataatggcctaccactctgaaacatatgaatatgttacctaacatgacagaagagaattaagttgctaatcagatgactgtaaaataaattatcctggatcatctggatgggcctaatgtaatcacaaaggttgtttccttgccttttccagcttggctctggctcccttcctccagcaagggtgggttgagctctcacatggcaccactttgacctcttctgcttccctcttctacactgaaagacttatgggccaggagcagtggctcgcacctgcaatcccagcactttgggaggccgaggaaggcagatcgcttggccccaggagttcaaaaccgtcctggg

SEQ ID NO: 38137 - DNA, 2300 bp, Homo sapien
tagggccaagacctgccccttatttacattcacaaagccattaagtgaacccagaactgaccagcagacagtgaggcagggcctgctctgtggcacatgccagtcacctactgcgtaagtggacaaagagaaagcagaaggtaatggagagagttttcatttgcttatttagtgaaaaacagaggaaaatcactcgaggcaaaagaagcaggactgagtcctgggttagttctgattcctcacaagccctaagacaagattttgaaagattggactaatgtcatgtgtccttaagaaccagggtcagcaagtggctgatctgaatggtttgtggccatggaaccaatgtgacttattctttttcatttttttccctaaaaatccaggtggataaaggactgtgtggggaaagtaccaaataaatgaggtaaaaaggaagggtcatacaaagagggcactacaccagcttcttggcctcaaagaagctcttgaggtgacgcatctgccagatgccagtgaggatgaggatgacagtctgagcaatggaccaccataggaccctctggttggtgctctcgctcgtcagtcggaagcgctcttcacgatactgtgtggggcaacacagggttaagtgagcaggagaaacagtctggctgttgtgaggtccctccctgcgtgtaattactcaactccaggaccaaactccttttggaatactatctgtgactccattaggagtgctatggtctccccactgaggctgccccaagaaagggacaggctgtccctccacaagcatctctgttaggactgaaatcatgatcctaccatttccaacaagagtccaagaaaaacaggtaggcaatggctattactagattgtgaactgtcctttcttcattttattttatagagcttaaaaatgactactgaaagcgaaatgtggcacatgcatacaatggaatattagccttaagaaattctgacacatgctataacatggatgaactgtgagaacattatactcagtgaaataagccagtcacaaaaggacaaatactgaatgattccacttatatgagatagggtagtcaggatcatagagacagaaagtagaatggtgggtgtcaggacaaaaggaaacgggaagttattgtttataataagtacagatttgctgggtgcagtggctcacgcctgtaatcccaacactttgggaggctgcggcagtggattgcctgaggccaggagttcaagaccagcctggccaacatggtgaaacccagtctctactaaaaacacaaaaatgagccacgcatggtggcacttgcctgtaatcccagctacttgggaggctgaggcaggagaatcgcttgaacctgggaggcggagggtgcagtgagccgagatggcgccactgcgctccagcctgggcaacagagcgagactccatctcaaaaacaaaacaaaataagtacagatttttagtttgagaagatgaaaaagttctggagctggatgatggtgttggtagcacaacattatgaaggcacttaataccactgaactatatagacagttaaaatgacacatttggtgttatattttaccacaataaaatgttttgataaaaaagcaaaacaggcagggcgcggtagctcacacctgtaatcccagcactttgggaggctgaggcgggcggatcacttgatgtcgggagttcgagaccagcctgaccaacgtggagaaacccccgtctctactaaaagtacaaaattagccaggcatggtggcgcatgcctgtaatcccagctactcaggaggctgaggcaggagaatcgcttgaacctggggaggcggaggttgcagtgagccaagatcatggcattgcactccagcatgggcaacaagagtgaaactccgtctcaaaaacaacaaacaaacaacctatctaaaccaatacttctcattccattctctgcagagctgatctcccaagcagaaacttgagtaggtatagtgggtataaaggtcaactgccctctcaaattacaaggagatatgcacttgccctttggtaatcctgctccttctgaatctgttccacctgatcaagcaactggcgggcgcggagctgtagctccgtcagcttatcttttgcagcaatctcagggtagttgttggcatgctccccaacctggatgtcgagatgcacccgctacaaggaaacatggaatgtatgagtggtggggcctccagttgtctgttccagggtatggaacccactattgtccctggct

SEQ ID NO: 38138 - DNA, 2300 bp, Homo sapien
agtagctgggactacaggtgagcaccaccacacccagctaatttttgtatttttggtagaggtagggtttcaccatattggccaggctggtctcgaactcctgacctcgtgatctgcccaccttggcctcccaaagtgctgggattacaggtgtgagccactgcgcccggccctgtttttgtttgttttgagatagaatctcactctgttgcctaggctggagtacagtggcatcatctcagcccactgcaacctccacctccctgattctagcaattctcctgcctcagcctcccaagtagctgagattacaggtgtgcaccaccacacctggctaatttttgtatttttagtagaaacagggtttcaccatgttggccaggctggtctcaaactcctgacctcaagtgatccttccacctcagcctcccaaagtgctgggattacaggcatgagccactgtgcccagccaaaattgttatatattaagagacatatatttgtatgaaatgcagtaagtaaaccttgtttggaccctaaatatctaatgtacaaaattttttaaggcaatggggaaaattaaacacatactaggtattaagtgatgttaaataatttttaaaattttggtgggtgtgataatagtataaagtccttatctgttagagacacacactgacgtatttataggtgaaatgacatgatgtccaggatttgctttaatatacagcacttcaaaaaaaaatgcagaaagggatacatgaaatgagaaaggcagcaaactgttgttgaagttggatgatgagtacagccctccgttattatccaagggggataattcctggacccctacggataccaaaatccaggtatgctcaagttctttatgaaagttcattgtaattattctattatataaaagtttcgaaattctgttgataaaatgtatttttagtagagacgggggtttcaccttgttggcccaactggtctcgaatttctaacctcagatgatccaccagccttggccgcccaaagtgttagcattacaggcgtgagccaccgcgcccgcctggccttgataaaaacagttttaaccttccgttgcttcgattccatgcccactaagtaacattccagtttgtttttcactttcaaaaggatgtgctgtaactaggggatgtaaacaagctccatgaccctacttattccaagttttcgttccactctcccaccttttttttaagacaaggtatcaccctcggtcgcccaggctggagcgcgatcactgcttaatgcatcctcgacctcctgggttcaagcgattctcctgcctcagcctcccaagtagctgggactacatgcgcacaccaccacaccggttaattttttgtagagacgggggtttcaccatgttgcccaggctggtcccgaactcctgggctcaagggatccgcccgcctcagcctcccagagtgctgggattacaggtgccagccaccgcgcccggccccagcttcttaaaagaatgatccgaaactatggcagcactgggcttttggtccccacccaagaaatgcccgctcgcagaggctcgccgcggcaggctctcccgacgtgacagagtgtgggtctggattcagcctcggttcttacgagtcagataggtggacacgcaaagcaaaacatcacagggctttttgtatttagcacagaaaacacttgtgagcccgagctgagaacccaaaaggcacgcttcaggccatcgtagccaccaagcctggtcagattccgtccaccgtctccttggtgctccgagacccaaatcgctgactggggccgagggcgggcgtgactgcgcaggcgtgcctcccctgcgagatgccggaggtaagctgcggggtaaggggcgagaaattaagggcgaacgtcattgcgcatgcgccctctactctcgttgcgggggtaggcgggcgccgggctgtgtgagggggcggggcgcggcagtgttcggtacggatggagttgcaggagacggcgagtacatatcactgcgcaggcgtcctcttcccctaactctcagggtcgctagggtggcgcgcaggcgcagagcgatgcgcaaatgtgcgcaggcgcttaggggctgaggcgcgatggcaggtgtcggggctgggcctctgcgggcgatggggcggcaggccctgctgcttctcgcgctgtgcgccacaggcgcccaggggctctacttccacatcggcgagaccgagaagcgctgtttcatcgaggaaatccccgacgag

SEQ ID NO: 38139 - DNA, 2300 bp, Homo sapien
atcccagcactttgggaggtcgaggtgggtggatcacttgaggtcaagagttcaagaccagcctggccaacatggtgaaaccccatcgctactaaaaatacaaaataagctgggcgtagtggcgggcgcttataatcccagctacttgagaggctgaggcaggagaattgcttgaatctacaaggcagaggttgcagtgagccgagatgacaccactgcactccagcctgggcaacaagaacgaaacaccatctcaaaaataaaaaaagaaagaaagaaaaagaaaaaaatattagccaggcatggtggagcgtgccagtagtcccagctacttgggaggctgaggcatcagaatcacttgaacctgggtggcagagattgcagtgagctgagatggcaccactgccctccagcctgaaaccgagggagatcctgtctcaaaaaaaaaaaaaagaaatgaagttctgacccatgctacaacacagataaaccttgacaacctcatgctcaatgaaataaggtggacacaaaaggacatatacattatgatttcacccacataaagtaattgagtaatcaaatgtatagagaccgtataatagaggttaccaaaggagagaaggacaggaggagaaggggaaataggaagttattgcttaatggttacagagttgctgtttcaggtgatgaaaaagttttggaaattgagtggtgacggttgcataatattgtgaatgtaattaatgccactgagttatacacctaaaaatggttaaaatggcattaaaaaaaaaaagacagtatcttgctctctggcccaggctggagtgcagtggtacaatcatagctcactgcagcctcaatctctcaggctcaagagatcctcctgcctcagcctcccaattagctgagactacaggtgagtgccactacacctggctaattttcttgattttttagtagaaatgagatcttgctctgttccccaggctgatctggaactcctgagctcaagcgatcctcccgcctccacctcccgaagtgctgggattacaagcgtgagccactgcacccagctgcaaatgtttagtacatacatttttaccgtaatttatttaaaaaaaaaaaaggaaaaaagaatacagaagtttgttccttggtctcttcacctcttccagtctctagatccttgtcacatacattaccctaactttgttctataataagcacttatacgccccctttttttgtttgttttttgagacggattttcgctcttgttgcccaggctggagtgcaatggcacgatctcggcacaccgcaacctccgtctcccgggttctagcgactctcctgcctcagcctcccgagtagctgggatcgccaccacgcccagctaatttttgtatttttagtagagacggggtttccccatgttggtcaagctggtctcgaactcctgacctcaagtgatccgcccgcttcggcctcccaaagtactgggattacaggcgtgagccaccgcgcccggcctttccccaaattttaatactttaaaatagggaacatcttacaatcaacaggttgtgacaggttaattagccacgttttatctttgataggtagctctaaagtcaagaaaacccaggcaagatcccgggcaagatcccagcactgccaactgtcatttgtagaccggggataggaacacctgtctcacagattgttacacaatagcgccggtgaagcgcttgtcacaaagcctgacccaggacaatctcaaaaacggagattctgttattcaaattgtttatttttgtgcgctaagtttcacatcaacccaactatctcttgataggttcctaccaggcgctagagatatcttactttcagaaattatttatgatagcagaagccgctggaagtccatagacaacctcatctctctagcggagcaaacagctgggctccagctggccctggcttctgcaactgcgcagtcggcgctgtgacgcccggcgcggctctgtgacgtcacgaatcggtcctctgtaagaggggagggcattcttctccaggggagggctacgtgttgacgccatacgccggggcggggccgagagtttggagccccggagtggggtgtcggcgcctcattcgggtggagctgagccggagacaggtaaccgtgcgctgtcgccgcgcccgtcccagtgccgggtgtcgcggcgcttggcggcccggggttggagatcgcggtaaagggggaggccgccgcgcccttggtgctgcgggcgccg

SEQ ID NO: 38140 - DNA, 2300 bp, Homo sapien
tccacagagaatccgtccctcatacctcatcactccctccccattctctggccctgatttagttttcttcctaacactctttctgacagacacactgttacctgttaactcatttccttctgtttgtcccctctaacatgcttgctgtatggatggaggggccttattctcctggttcctggggacagaccagtgttcacagaccccagaccagggactgttgtacagcaggcctgccatatttgttcaatgaacgaatgattcccaaaagaaatagagcacagagttcagaggcggccttcagggaagaaatttcaacaatgtcaaaaattaattgtggagtatccattgatagatgaatggataacttaaatgtggaatatgcatacaatggaatattattcagccataagaaagaaggggctgggcgccgtggctcacgcctgtaatcccaacactttgggaggcccaggcaggcggatcacgaggtcaggagatcgattccatcctggccaacatgatgaaccccgtctctactaaaacacacacacaaaaaaattagccaggcgtggtggcgtgcccctgtagtctcagctactcaggaggctgaggcaggggaatcgcttgaacctgggaggtggaggttgcagtgagccgagattgcaccactgcactccagcctggcgacagagtgagactccgtcaaaaaaaagaagggaagggaaggggagggaagaaggaaggaaagaaggaaggaaagaaagaaagaaagaaagagagagagaaaggaaagaaagaaagaaagaaagaaagaaagaaagaaagaaagaaagaaagaaattctgacacatgccacaacatggatggaagtgaggacactgtgctaactaaagtaagactgtcacaaaaagacatataatgtatgattccacttatacgatgtccttagagtagtctaatttagagacgaatagtgaatgccaaaggctaggaggaggaaagaatggggagctagtgtttactgggtatggagtttccatttgagaagatgaaaaagtcctggagacggttggtggttgcacaagaatgtgaatgtacttggtgccacagaactacacttggaaacagttaagatggtaagttttacgttatgtgtattttaccacaattaagaaaaattaattatgggtagttgagagaatgtggtcttcctcaacttacggtaggaaaagtcaagaataacttaaaggctgataatagcatttcaaagatcgaaactgatcagagaggctattccatcaggctagactagctcaatagtgactttttccagaaggagaaccactgggaagagagaactgagcagtgaggacagcgaacttgttaagtttagttttctgctttaacgaggggcttccggagtcctttaataagatcccctcccaaaagtggcaccctgggtctctctgtctcccagtcgtgtccccgcccgccgggccagagcaatggactcccaggaagcagggggggcgcgggcggggcgcgggcggggcgggtgggggaagggcaaggactcactcttcctttcctcctccgccggggcccgccccgagccctggccccaccccggctctctggatccgcctcctcctcccgaccccgccccggcaccttggccccgccttccactcggccccgccccggcgtcctggccccgcctccgccgcccggccccgccccgctcccggcggactgcgagcaggaagagcgcagtggctctgccgacgccgcgttcagaaaggtgtggagggggctgggggcgcaggtcgcgatcaggctgcgtctcctgcccgcccagccacctgcggccctggccccaccctgccgctttgggccgctcgggctcgcggccgcccccgccccgagcgccggctcggggctctgctgctctggcctgggaggcggggccggctgcgcggcgtcatgcatatgcatgagcggcgcggcggcggctccattgtgccctcggagcgggcggcggcgcgatggcgcgggtggcggcggccccggggcggcgggcggcgcggagggcgggctgagcgcatggagcggcgcgggccgggggccgccacggcgaggggccgggccaggccgggcggaggtgagcggggtcctgggggtggcccctggcaacgccgccagcaggcaggtgtgggccggcgggggcaggcaggtgcggcaggtgcgggccggcaggtgcgggcgggcaggcaggtgtagctggtcgcccggggcgcccc

SEQ ID NO: 38141 - DNA, 2300 bp, Homo sapien
cctaaaatctgtgtatggctgctcaaggccccacccagcagttctggggaggagtttctggctgttggcaggttcctctgtcccccaacatcactattcctgagtcaggctatgggactgggattgccacccctaccttgcctggctgggccatctcagctcccaggcctgttcttgcctagagtccaggtgcctggagccttctggagccatcagcccctggttttcttcacccctgcttcctgggcaggacttggtctgggggagcaaggggaggagcctatgggctgggaatcaagtcttgcctcccctgagggtgtgaggaagtccagaacactgccctctccctcttccctaattggtaccccccagtcccagtgctcggtgatgggaagatccagtgaaaggccacatgcttagactccccaggcagagctcagctctacttctcacctgctctggggccctgggcacacagctcgccctcagaatctccaggtctatattttgaggggtgaggctgttcctacctccattggtgaggccctcggtcagcacaagaaatggcagcctagatgaatgcggggccaccctctcctggggcagggagaggccatgtgagtgctgcgatggcaggatggcaccagtggtcagcacgcctcaggtggcatgtctgtgtgtgtggcagccttgtaggccctaaaagggagtagtatccaaggcgagcatgcctggggactcctgagaaacagctgaagcggcctctcctgtgctgcagccagtgttcctctgtggatagcctaggcaggcagaggtggacatgtcaggtggtcctgggagtgtcagaacccagggtagtgccagtgagggcccttcagggacactcaggggcagggctccagggcatgtctgggcctgctttggtaaggggcttgcttgtggcagtgtcggaaggcgtggcactcagaagcagcctgaaggtgtggtcacttccgtggcttatttactaaatggggagagcaaacttagcgtggcacatgtaagtcccatggtgccagcactgtggtcctgcatgcgtcctccctgacacaccccctctgctgccctgtcctgagcaccaggtcactggtatccactcagccccatcttgcagagtcacttcaatgtctccccagcccctttcttagaaacactggccaagtcacagtccctgccaggtctgtgggtgcccaccctccatctattgtgctgtgtgtccctgccctctcctgggggtgtcatggatgggccagtgggtctgcctgcctggcccctaggaccatatcagcctcgggcagcccccacttggtggaatctgggtcagttctgaggtgccctggcctggagcccttctactaccctaaagagggccttcttgttgggaggggctgctagccagagcccaggttactggccccacaccccatttcaggaggtatcctgcatgtccctccccaaggccaggatggagagttgttggttgaccactgcactcctgtgatcaccgcacccctgcactctcctcctcggctttctcagcccctggcctccagaaccgcctatgcccctacctgggctactcagggtagacaagacctttagcagggagtcccctcacctccactgccctctgtccttcaccccagggccttctgtggggttactggctactggctcctctctaaaccccagtttccacggggtagctaggattgtccctggctttataaggatagccaggcctcggtgtgggcgggagagtggggaaagtatttggaatcgggaagtccatctctagggctgatccagggactctgggtggcagggcctggtcagaaagggttcatgctggcctccaggctgtatttgtgggggcagatcctcaccagagtgagtggggtgggtcagtactaggcccctccactgccttgcctgccatcagagcccaggggtcccttattgagaaagaggtggggcctgctggcaccggggtccctccaccctgctgaaagggtctcctggctgcatcgcagctaacatcccttccttcctgtcgggcagccagagcagctgagttccagataaaaactgtcagacccggcctgtaggctgctccattgccaatgaactccatgaaccccatgaaacctgccctgccccctgcgccacacgggtgagtgtgggctcctctgcccacccctcaggccctggggttgggggtggcatttctggaagatcctagactcttggacaccagtggc

SEQ ID NO: 38142 - DNA, 2300 bp, Homo sapien
ggtgagcacagtcctggccctcatgagcccacgcagagagcgtggcaatcctgtgtctcctgcaggtatgcaggcggcccggggggcctgggcctcccctcacatgctgcaagaccctccactgacttcacgcaagcggcagctgctgcagctgtggctgctgcggcagccactgccaccgccacagccacagccaccgtggctgctctccaggagaagcagagccaggagctgagccagtatggagcggtgagccccctcagcagctcctcccacatggcagccagcctgagggcctgggaggaggtactcagccagacagtgggctccagggacaagcatggaatatgccagggctcatgaagccagtaaaagagagatgtgtgggaaggagtgagggtctgaggggagaggtttctggggtgtcctgtgaaagggtatggtgcccacatgggtgggtgggcgggttttatgcctatcttttggagccctttgtgggtgggacctggaccattcttcttttttctcttcctagatgggggccggacagtcttttaacagccagtttctgcagcatggaggtccccgggggcctagtgtccccgctggcatgaaccctactggcataggaggggtaatgggcccctctggcctctcccccttggctatgaaccccacccgggcagcaggaatgacacccttgtatgcagggcagcgtctgccccaacatgggtatcctgggcctccccaggcccagccactgccccgacagggggtcaagagaacctactctgaggtgagtgtccaggtcacctagtttggggccttgggtaccaactccctcacccaggcactctttagagctgtggtaaagagcaggcttctggctgggcatggtggctcacgcctgtagtccctgcactttgggaaaccaaggagggtggatcccttgagctcaggagtttgagaccagcctgggcaacatggcgaaaccgtgtctctacaaaaattagcctggtgtggtggcatgtggctgtagtcatagctacttgggaggcagaggtgggaggatcgcctgaacccagaaagttgagggtgcagttagctgtgatcgctcccctgcacttcaggctgggcaacaggagtgagaccctgtttcaaaaaaaaaaaaaaaaagcaaaagccgggcatgctgtctcatgcctgtaatcccaacactttgggaggctgaggcaggtggatcacttgagatcaggagttcaagaccagcctggccaatgtggtgaaaccgcatgtctactaataatagaaaaaattaggccgggcgcggtggctcacgcctgtaatctcagcactttgggaggccaaggcgggtggatcacgaggtcaggagttgaagaccagcctggccagcatggtgaaaccccatctctaataaaaatacaaaaagcattagccgggtgtggtggcgggcgcctgcagtcccagctacttgggaggctgaggcaggagaattgcttgaacccagcaggcagaggttgcagtgagctgagatcatgccactgcactccagcctgggtgacagaataagactccatctcaaaaaaaaaaaaaaaaaaattagccgggcgtggtggtgtgcacctgtaattccagctacttgggaggctgaggcaggagaattgcttgaacccaggaggtggaggctgcagtgagccaagattgcaccactgcacttcagcctgggcaacagagtgagactgtctcaaattaaaaaaaaaaaaaaaaaaaaaaacaggcttctgcatgtgagaactgcctgtgcctgacagtgtcacagcaggatcttcaagggaaccaggaaatctccattccccgaaccctgccacacatgagactctacttccttctggaaccagctcccctgatgccttttttctcccctcgggcattttgcctctttttcaggtgtatccagggcagcagtatctgcaaggaggccagtatgcacccagcaccgcccagtttgcgcccagccctgggcagccccctgccccctccccttcctaccctgggcacaggctgcccctgcagcagggcatgacccagtccctgtccgtgcctggccccacgggactgcattataaggtagggcaggctcctccaggccctgtgccgggctccgtgctgagtgctgtgggacaggggaccttggggcagtcctgtcctcgagagcgacagggtggctaaaggggccagcaggatgtgtaggtccatgtgtgctcatggaccacagctct

SEQ ID NO: 38143 - DNA, 2300 bp, Homo sapien
ggggccggacagtcttttaacagccagtttctgcagcatggaggtccccgggggcctagtgtccccgctggcatgaaccctactggcataggaggggtaatgggcccctctggcctctcccccttggctatgaaccccacccgggcagcaggaatgacacccttgtatgcagggcagcgtctgccccaacatgggtatcctgggcctccccaggcccagccactgccccgacagggggtcaagagaacctactctgaggtgagtgtccaggtcacctagtttggggccttgggtaccaactccctcacccaggcactctttagagctgtggtaaagagcaggcttctggctgggcatggtggctcacgcctgtagtccctgcactttgggaaaccaaggagggtggatcccttgagctcaggagtttgagaccagcctgggcaacatggcgaaaccgtgtctctacaaaaattagcctggtgtggtggcatgtggctgtagtcatagctacttgggaggcagaggtgggaggatcgcctgaacccagaaagttgagggtgcagttagctgtgatcgctcccctgcacttcaggctgggcaacaggagtgagaccctgtttcaaaaaaaaaaaaaaaaagcaaaagccgggcatgctgtctcatgcctgtaatcccaacactttgggaggctgaggcaggtggatcacttgagatcaggagttcaagaccagcctggccaatgtggtgaaaccgcatgtctactaataatagaaaaaattaggccgggcgcggtggctcacgcctgtaatctcagcactttgggaggccaaggcgggtggatcacgaggtcaggagttgaagaccagcctggccagcatggtgaaaccccatctctaataaaaatacaaaaagcattagccgggtgtggtggcgggcgcctgcagtcccagctacttgggaggctgaggcaggagaattgcttgaacccagcaggcagaggttgcagtgagctgagatcatgccactgcactccagcctgggtgacagaataagactccatctcaaaaaaaaaaaaaaaaaaattagccgggcgtggtggtgtgcacctgtaattccagctacttgggaggctgaggcaggagaattgcttgaacccaggaggtggaggctgcagtgagccaagattgcaccactgcacttcagcctgggcaacagagtgagactgtctcaaattaaaaaaaaaaaaaaaaaaaaaaacaggcttctgcatgtgagaactgcctgtgcctgacagtgtcacagcaggatcttcaagggaaccaggaaatctccattccccgaaccctgccacacatgagactctacttccttctggaaccagctcccctgatgccttttttctcccctcgggcattttgcctctttttcaggtgtatccagggcagcagtatctgcaaggaggccagtatgcacccagcaccgcccagtttgcgcccagccctgggcagccccctgccccctccccttcctaccctgggcacaggctgcccctgcagcagggcatgacccagtccctgtccgtgcctggccccacgggactgcattataaggtagggcaggctcctccaggccctgtgccgggctccgtgctgagtgctgtgggacaggggaccttggggcagtcctgtcctcgagagcgacagggtggctaaaggggccagcaggatgtgtaggtccatgtgtgctcatggaccacagctctacaggagatggggggtggggggtgggggcattctgaccagtgcaggagcagctcctggggtttgggatccagttccgaaaggaccctctacaagattcatatatctcaggggtatcctgtgcagggagcagcaggtgggtacccaaaacatttgaatgttctttatggaaaagtgtcattccttctacttgctgcagagaaatccattgagaggacaggccctcgctgctggccatgtaccctttctgggtgcatgggcagagcctacctccctgggagcctgggtgcgccgggtggtgcagcttgggggaggagaggaggagggcttagcgtgcttttgtcttttcagcccctccaacctgtttgatcattttcctctgtggctatgattgctttaagtagtgttacttgtagattatttggaaaatacaagagagtgtaaagaagaccgtgtatggtgggcttctagggtcaggtccagggggcccggcaggggtcaggttggagccccaggtgcatgcagttttctctcccgcag

SEQ ID NO: 38144 - DNA, 2300 bp, Homo sapien
cagttttctctcccgcagcccacagagcagttcaacgggcagggcgccagcttcaacgggggcagcgtcagctacagccaacctggcctgagtggggtagggggcctggccgggaggatgggccgggaggctcacagggtgggcatatggagagagggcgaccgggcaggcacccctggggccgcctcctgtccacctctgttatcatggttcccagtgggtgcgccgtgaacagactccactcccatccaccctggcaatctgccttgactgtttgtgctcaaccctacagcctacccgttccatcccgggctatcccagttccccactgccagggaaccccacgccacccatgaccccaagcagcagcgtcccttacatgtcaccaaaccaagaggtcaagtctcccttcttgcctgatctcaagcccaacctcaactccttgcactcatcgccctctggtaagtctgtccactcttgggacagcggggtgacaaggccagggtgggcatgggggaatcacaggactccagagagtcctgtaggagcttgggggacaggggatggctgccatatccctaagaaaagggctgggtgtggtggctcacacttgtaatcccagcaccttcggaggctgagcacaagagttcaaggttaccgtgagtgtgatcttgccactgcacttcaacctgggtcccaaagcaagaccctgtcttaaaaaaaaaaaaaaaaaaggccaaggattccatcttcttaaagacaagtcgcttagtgccaagccttcacctttttgttctgtttgtggctttctttgcaaaggaggctgtggctcttctctcccctgtgcacaaaatgttgtatataatttcaggggatttatgaaccccggaagcccattccagggagaccacagcagcagaagttgggatcgtagaactctaaacagagctatagggcaattgcaggaggctctcacacaccttggcctcccagtctctctgaaagcactggaaacaccttttgtctgggctggggacatgttcccctattatggtttaggggacactgggctggactgctgaggcaggaggcaagacagaacatcacgaccgaatgcccaggcctcaggagagatgctgcccatggccccagccccagggcaccactcaggcctgccaagcagtgcctgacaggaggggctcccttcaccaaggtccctgcggggaaggtggctggggagccgctgccctccttgagtgacacaagacgctctggctggggcaacccagctcacagccagtggcctctgctcccaggaagcgggccttgtgacgagttgcggctgaccttccctgtgcgcgatggggtggtcctggagcccttccgcctgcagcacaacctggctgtaagcaaccatgtcttccagctgcgagactcagtctacaagaccctgataatgaggtgagctccgcctggcccccacctgacccccacgaggctctgttcctcctcccacactctcagggcccgttttctgggtgtccacccatcttcctgagcaggcctgacctggagctgcaattcaagtgctaccaccacgaggaccggcagatgaacaccaactggccagcctcggtgcaggtcagcgtcaatgccacgccgctcaccatcgagcgtggcgacaacaagacctcgcacaagccactctacctgaagcatgtgtgccagccaggccgcaacaccatccagatcaccgtcaccgcctgctgctgcgtgcgtgtcctgcgccgagggggcggtgctgtggcgtggggcggggtgtggtggggcctggcccagcggtgccgtggggtggggcggggtgtgggcggggcctggcccagcggcgcagtgggagcggagccaggacatgggcgggccggcctgcagcaccatcagatcatgccgccgtctgctgttttgctgtccaccgcctgctgtagcatgtgtgcccccttgcagggtggagagcaggacgtgggggctttattatttcagaaaaatgcgttgcttctctttgttactgccttgtatttctattttaatctgtcatccttgccctttaagaaagcgatccagtaatataccctagctgttttccagttagagtaaattgactagatttgatgctcacattaattatgtaagagaaaccaggatatgcagaaagctcatggagctcggagtccccggctgatcaagcattaccggttctagcaagcatcagggtcacccttgggctagagaagaaagacatggct

SEQ ID NO: 38145 - DNA, 2300 bp, Homo sapien
gacccctcagagagccggtcagataaggtcaactaaatgcagcttttgttcatgaattagatacctggagtagctgcgggtgggatgcgatgtaccacatttgtgttcatgaggggcctggatgccgtacgggcggacgcagagtctcagaggagactgcactggaagctgacagcacggtccttagagtcaaatttcgtctgtccatttgctcagtagccctgggtcttgactcacaggtggaatgggagtgcaaactcagtacatgaaggacagaactgactgtccctggaccataatagaaactcattctagaagttcaacatgaaactcattctagaagttcaacatgaaaaagttaggaagaacagctccaagcagaaaatcctaggggcatggaattccaccaccagcattcaccttggggcatcacggtggggatccccacgcaggctgatgcacagagggagtgtggagtggctgcactccctcacatcccgtttcctggtggtattgaacagcatgttgccagctgttctggccccagagcaaccttgcagggaggtcccagggggtggcgtgtgcctctttgagcacatgcaggcctatggtggggccccgcacccggcctgtgtgtgaggaggggctgctcagcatccccactgtgcctggagacagggccgggatgtggtgacaggatggtcactcaggtgtggccagtcagtgaccaaagctgctaacagagttcactttgtcctcagctgctcccggaactgaccaaccctgatgagctactgtcctacttgggcccacccgacctccctacgaacaacaatgacgacctgctttctctgtttgagaacaactgatcctgtgtttaccccaagcccggcggggacacgctcacagatgtcaccacagccctgcccttcatgcccagccccatgggacacccggtggtctttcccaaacctcccccaaaacacacctggagccagagccttctgccgccagccctgcccctgaattggaagcagccctgtgctcgatgggaggggctcccaggccggcagcccttgccacctccctctgccaagcctgctgctgcagaacggtttttgctgaggtgcccctgcccagccctgtccagccttgtccacacacacatctcacgcccctggtctcacagcctcacaccttgtccttccacccctgcctgcccccacccagcctgcttcttgtccagcattgatccttctgtttcaacaactcctccactgggcagagctgggcatctggcagggctggctctgtcccctgggcctttggctccagtggcccctgtgcccagcagtccagctcttggaacctcgctgaatggcagcctcttgggggcctggagctctggcagcccagccgtgtgtggtgtcaggttcctctccccaccccagcttcaagcagaggcctcggggtgggggagctacaaagcacaacaatgtacatagtgtagaaacactaacagctgggagaggggagccagctgtccagccagcatgttcctgttgtacagcccggtctccctgcgcgctctgctccttcccatgtgcagacagatcagggaggaacctccaatgggtgggggacagtgagcttcggcctggccgaggtgggtgggtgggctctcagattcagctctgtgtaaagattctctagcgggctgcgctcccaagttccccttctctgtgaaagtgaagaattagtacagctgtgttttttaaagccacctctctgtctccaccccatgggcccacacccaggtgggggaggaggaagccactgcatctgttggctcagggccccagcctgtgcgagcagggcgcctgggctgttgtgtctcctgtctgtgccgatctctattaaaggactccctcttggtgggcctggccgagtccctcctttgtgctcccagggactattttctcctcgtaagccagcgacctgcctaaagcttgggctgtgcctgcaaagcttgtgcaggacctgggggccaggtcgaccttcaagtggcttttggggccccaggttgagctctggatgtttcaagccaaggctcggctattcccgccccatagtaaatttccttttccctggaattttccaagttggcttcagctgaagagctgttttgtgaagcatcccaggcttgcccaggagagacatttgccactatgtcaccttatctgggcttgccctggggcactgagacagttgtttggcagccccagcccagccaggggctc

SEQ ID NO: 38146 - DNA, 2300 bp, Homo sapien
tcaaataaataaattcctaacacgttggctcatggttattaacaatggcaagaggccagaaactgtacttcatctatcagatgaattatcatttttgtctcaccacaaccctatcctggttgtgcagatgaagaaactgagttttagaaacattaaacaacgtccaggtgcagcagctcacgcctataatcccagcacttttgggaggctgaggcgggtggatcgcttgagtccaggagtttgagaccagcctgggcgatgtggcgaaaccccatctttacaaaacacacacacacaaaatgagctgggtgtgggtgcatgcctgtagtcccagctacttgggaggctaaggtgggacgcttgctcgagcacgggaaggggaggttgcagtgagccgataacacaccactgcacttccagcctaggtgagagtgagaccttgtctcaaaaaaacaaaaagaaacattaaataatatccttaatattgcaacttaagtgacagcccaggatatatgaattcccttgtaaggttttcttaacaaaacaccagtcacataagtgcattttattttatatttttgtttatttatttgagacggagtctctgtctctcaggctggagtgcagtggcgccatctctgctcgctgcaacctccacctcctgggttccagcgattctcctgcctcagcctcccgagggggtagctgggactacaggtgcgcaccaccatgcccagctaattttgtatttttcgtagagatggggtttcaccatgttgtccaggctggtcttgaactcctgacctcaggtgatcctcccgcctcggcctcccaaagtgctggaattacaggcgtgatccaccgcacccggcctattttttgagagagggtcacactctgtcgtcccggctggaatgcagtgatgcgatcaccgcccactacagcctcgacctccgggctcaagcaatcctccccgcccagcctcctgagtagcgagcgcctcgacgcccagctaatttttatttttatttatttttttgtagagacggcgtctctctaagatgcccaggctggtggccggtgtcgaactcctaagatgaagcgatcctccccggccttggcctccgcgcctcctaaagcgccaggtatgagccaccgcgcctggcctacaagtgcattttaattaaagtattattaatgtctttgcctgaagaaattcgcttttaaattgtgacttatctttcacccaaaaatcaaagcacaattcagccccgaggcgggggcggtaggagctgggcggggcgggggcagggaaagaccaggagcagagattcaaaaagagtaagagggcaaaatgtgcataatgcatcttcacaggtaagagcctggccaggctcctgttttaatggcttcctcctgaagaagattcaagcagagtgtaagatattttcggaaagtagagcattttgaaagcatttcataatctctcaaaaccggagactgctcctgtcccacctcgttagagaaaacagcgatgctcaaaggcaacctccttcctgacattgcctggtaggacgcgacgtggtgtttgcccgcgcggaatgcggacgcaaggctgctcctaggtctcggggacgcgccatccccatttccgctcgcggaggcgtagggtccgggcgcgggaccccagtcgaccttgactggcggcgcgaccttgaggcctgcgttcgcctcagttgccccctctgtgcaatggggagacgcgcctcatcgcttgacaacggccgaagagccgccgcgcttccgtctcccgcgtgcgcgcgccatgctgcccacccccgttccgcactgaccctcccccgtgccccgcgtcccgtactgccgccccgccccgagtcccatgccgcagccaccgcgacggagcccgcaggcgggaacctgcctccgcgcgttagcgcgcacgcgcgcctcatgtgtcgtccccatcagcgccggcttccgtctataggccagatgcactgtcactctggcgaagtcgcagacccgattggccgggacggaggcgcgagaccgggttgcgggcggggccgaacgtggtataaaaggggcgggaggccaggctcgtgccgttttgcagacgccaccgccgaggaaaaccgtgtactattagccatggtcaaccccaccgtgttcttcgacattgccgtcgacggcgagcccttgggccgcgtctcctttgaggtcgggcgggcggcggcgtgcgggaatggggcccagaaagtgggccggggtcggggtgg

SEQ ID NO: 38147 - DNA, 2300 bp, Homo sapien
attcaaaaagagtaagagggcaaaatgtgcataatgcatcttcacaggtaagagcctggccaggctcctgttttaatggcttcctcctgaagaagattcaagcagagtgtaagatattttcggaaagtagagcattttgaaagcatttcataatctctcaaaaccggagactgctcctgtcccacctcgttagagaaaacagcgatgctcaaaggcaacctccttcctgacattgcctggtaggacgcgacgtggtgtttgcccgcgcggaatgcggacgcaaggctgctcctaggtctcggggacgcgccatccccatttccgctcgcggaggcgtagggtccgggcgcgggaccccagtcgaccttgactggcggcgcgaccttgaggcctgcgttcgcctcagttgccccctctgtgcaatggggagacgcgcctcatcgcttgacaacggccgaagagccgccgcgcttccgtctcccgcgtgcgcgcgccatgctgcccacccccgttccgcactgaccctcccccgtgccccgcgtcccgtactgccgccccgccccgagtcccatgccgcagccaccgcgacggagcccgcaggcgggaacctgcctccgcgcgttagcgcgcacgcgcgcctcatgtgtcgtccccatcagcgccggcttccgtctataggccagatgcactgtcactctggcgaagtcgcagacccgattggccgggacggaggcgcgagaccgggttgcgggcggggccgaacgtggtataaaaggggcgggaggccaggctcgtgccgttttgcagacgccaccgccgaggaaaaccgtgtactattagccatggtcaaccccaccgtgttcttcgacattgccgtcgacggcgagcccttgggccgcgtctcctttgaggtcgggcgggcggcggcgtgcgggaatggggcccagaaagtgggccggggtcggggtgggtggtagcgccccaaaggcccgggcgcggggcgaccctgcttgaggggcgagcgcgggcgggctgcggcgccatttcctgacgaggggccattttgggaggtccgcgagtcgcggggaggaggccgggacggcggcggacaaaggcaggcggggcggctgcgaggccgttgggggagggggcccgcgtccgcccgcccgcctcatgtggccgcgccctgtcctgtccgacgcacgtgctcggcggccgcgctcaggtccgcgccttgagagtcgttgggctccgccctagcttggcctgggcgccgcagaccggagccagaagcacgctcgcgggggcttgcgaccgccttcctgggaagctgtcccctggcaggcatgggtgctttacatcctgagctgggaagctgtttgcttgagggtttttctcaaggatcgaggcgcggtgtgagcccgtccatgctcggtcctgtagatcccgggaggccatgttataaaaggagacttgctgggatgtgacgggttgccacttgaaatatcttccatttggataaagtaggaatatttatacatgtgccccaaacgtccctccgtgtcccccacccccaagcggaaatgtgaaaatgggccttgcctttgctggtgcccaaggaccgccttccactgcagtgacggcgctggcgggggaggcgctcttgagcccctcccgattgtccctctgcctagcaagcaagttgcgactggccacaaggcaggcctcttccgaccaaggtggattaccagtgattacctaattagttttgagagcgttaaatgagttcttaaagatcagttgtaattatagcatagtatctaaacttggcgcgtgtcttcaaagttaaatattgagtacgattccgttccagttaacatggatagaccttagggagtagcgaaataggatgttagtggttttattcctttaaatcacatctcaaaaggccaccaatggctagtttgggatcttattccgaaaatagattgatcctcatgcagtcttcgtgaggacagagcgatttccttgttgcctaccctgtccatagtgcctggcacataggcactgaaacactgcatgttaatccacaccccaccccacctatgagtgtagtcaaagctggtaagtgacaagggctttcgtggaaacttggcctgacctaatgttgggcatcaggttacccaaagagcttcagggaaatgagaaaggacttgcaggtcttgatgagaatggaggggtaactgccaatgagggctttggctttagcgaaagtctgaaagggaagccataggaactta

SEQ ID NO: 38148 - DNA, 2300 bp, Homo sapien
aacaaaactgggtaattaggaggtgactacaagagcatagggagctagtggaaaatgaaaggatgtgtgtaaatctgaagaaaaggtcagaactgaaggtcagaatgtgtgctctgcaatgtgtgaatacagtatgaatgtgctccaggaagaatatctgaaacagattatcatgagtttccagaagtatgtggctgtactcagagttggggaagaagatagcaggaagtgggcagaggcagtaaaagcggaatggggattgaggaattgatgctcctgataagagaaaaaaaaggcagcttgtgtgggagcaggagcaagtttttgacaggacaggctgtcacatagggttttgctgctgaactccaccaagcaaagccttggagcagagttcctcagctgctgaggtccacactcacactcagctgtggcaggaggctatggagtctacaggcttataggcaattcccagagtgttagtttcccactggcattctgggcatgtgaggggcttgtagggctgggctggagactagatgagcctgcctgtgtgcaggaagtgctaaactgaatactgagtgccagacttgcctggctccatactaaacagggagtcacggcttctgtccatccaggaaatacatgtacctctcatatatacctattccacaaactctttttgaaagcccagacgataaataggcacaaagctacctaagctcaaaaggccacctggctctacatgtgagacattaacatgagggctttatagatacttttctatatgtggcctcaagcaaaccagaagaatgtaagtgccatcgcatgtccacgggccagctgcagacccccttgagcagactcgtgactttttgcactgacctggatttgtggtcagactgacctgggttcagattcctgtgtcaccaactggagccatgtaaccctgggcttgggctaacatctctttttttttttgagacagagtctcactctgtcacccaggctggagtgcagtggtacaatcttggcttactgcaacctccatctcccaggtttaagcaatttctcccacctcagcctcccgagcagctgagactacaggtacgtgctaccatgcctggctcatttttgtattttttggtagaccttgttggccaggctggtctcaaactcctgacctcaagtgatccacttgcctcccaaagtgctggaattacaggcgtgagccaccgcgccaggctgtatctaacatctctgaatctgaatttctttgcttgtaaaatgaggctggtatttatttcccagatttattcagggggttaaatgagctaaatccacataaggcaggctggtaggttttcaaagaaatgtttagtgaccttccccttccataggaaaaaaacttaagttttggagctaaacagaccagattctcagcactttcccatttcagattatgtgaccctgggatgttgaatcatcttcctctgcctgaatttcctcatctgtaaaatgaagtattattgccttcttgctgtggagatggaaaactgagaggagcctgaggctcttcagcagagtgtggcctgagagtggccagggctggttaggcccaccctctcctccaacaccttcagagatgggaggactcactttttcagtttctccttcttcttcttttttttaaagacaggatttcactctgttgctcaggctggagtgcagttgcatggtcatagctcattgcagccttgacctcccaggctcaagcaatcctactcagcctgctaagtagctgggactacaggtgtgcaccaccacacccagccctttctcagagtttctaaagctgaaagccatcgtccagaaatatttagtccatacctctttttacacagaatatatttaattccatcatataagctaggaacaatgttaaccaacagaaaatgtgatcacgagctacatacaatagatcaaatgaagcacacatccatgaaaaaatcatgccaattaaatatactctgcatttccattaatattagtatgctattctttgattttttttgctgataagcagtcaaaacatttaaactcaaaattgacaaatcaactagcttgctttttgtcatttggaagactaccattattcaaatttattatgtaatacactcatccagataatgaaacatctgcgaaaaaaagtgtgggaatcacctcatctgtgcataaaatggctattatacatgaatgcagacgtttgaagttagaaaggaatataactcaaatagcaaaag

SEQ ID NO: 38149 - DNA, 2300 bp, Homo sapien
gtaagtaagactgtcttgttagtggagctgacctcaaaaatccaaaaattgtatttttcttatataacaacatagtcaaaaattattaaaatatgaggcattctggtagaaatagagagcgtctcagttcttactggtaaacttaaatcagtctcttgttgaattacctaatataagagagtgaatatgaattagttcttagatttttatttttcctgtttctgatacctgccagggttttactgtttttcttccatattatcttgggtgacacgcacttaatccacttagacgtgcaattagaggaagtatacaggggtaatttttagctttaaaaaatttttaaggaaagggttagctacaaaggggatatgccatttcaaagcttaccatctattttgaaagaatagcccctcaaacagccaatcttgtaaactgatttctttttttaacagtaaagaaataatctgtttaaatggtaaaagcaaaatatatgagagaaaattagttttcttaagtcagacctttagtatttcctcccgagaggcaaataacatttctaatttattgtgtcacctactagaaatacatgtgtacacatatactctataataccccatatttacttaaaagctcattacattggcacatactttgcctttttcatgcagaaataggtttttttaaagcgtacagttcagtggcattaagtacatttatagtgtgcaaccatcactgccttctgcctctagaactttttcatcttcccaagtggaaactctacccattcaacaataactcggccaggcgcagtggctcacgcctgtaatcccagtactttgggaggatgagacaggcagatcacttgaggtcaggagttcaagaccagcctggccaacatgcagaaaccttgttggtactaaaaatacaaaaattagcagggcatggtggcgcgcacctatactaccagctacttaggaggctgaggcaggagaatcacttgaacccaggaggcagctacccctggcaaccacaaatctgctttctgaccatgaactttactattttagggacctcataagtagaatcatacagtatttgtcttttttgtaactggcttattttccttagcataatgtcctcaaggcccattcatgttgtagcttgtgtcagaatttcctttttaaagctgaatactattccattatatgtatatcattttgttcatccatcattggacactcaagattgtttctaccttttggctattctgaataatgcttctgtgaacgtgggtatacatgtatttgtttgaatccttgctttcaatttttaggtgtatacctagaagtggaattgctagactatatgacaattctgtgtttaattttttgaggttttttttttttttcttggaacatgctttatttttctgagagctaagttctaaatatttctgtggaagtaatatatgttacattgacattgataaaaattgtgaaatacttcatgtatgcataaaagttatattgacttgcaagattctttaatctggaaattgataaatatgtttgtttttaaaaatctcatatttttcagcctggcactgtggcttatgcctgtaatcccagcactttgggaggcctaggcgggcggatcacttgaggtcaggagttcaagaccagcttggccaacatagtgaaacccacctctactaaaaatacaaaaattagccatgtgtggtggtgtgcgcctgtaatctcagctactcaggaggctgaggcaggagaatcgcttgagcccaggaggtggagtttgcagtgagtcaaggtcgcaccactgcactccagcctgggcaacagagctagactccatctcaagaaaaaagaaaaatattttaaataagtgtttaaggtttgatttctttgatagaaattataaaaggtgatagaatcccatgtatatttacaaatgaggaaggggatcacctacatattgttaactacctaaagtaaaactagaaaaaattctgtttccagaatatttttgaagtagtattttcaactcttttcattcaaaaaaatttttttttgcatttaggctggaggcaaagctggaaaggacagtgggaaggccaaggctaaggcagtatctcgctcacagagagctgggctacaggtaatgaatccatgctgtcattacattattattttctttactgttgtaatttatgacctatgtttcatcaattacaaaaatctacttgtattactacagacttttttttttttttttttttt

SEQ ID NO: 38150 - DNA, 2300 bp, Homo sapien
gaaacttgtttttttcactattaactcaccaacaccaagaacacattctagcacagtcaatgcatcatactgtgaaaagaatgaaagaatttaaagctggaatgagttggaacaaatgtgagctggtatcttggttatctacaggctatgcggtctcaggcaaatgactaagttcacctaagcccatttcttcagttatgaaatgaagctggctctcccagaaagctcatattgtccagactgtaatagagatgatcatgatagggtgatgggccttttttaattgtggaaacaggccaggcgcggtggctcacgcctgtaatcccagcactttaggaggctgaggcgagaggatcacttgaggtcaggagttcaagaccagcctggccaacatggtgaaaccctatttctactaaaaatacaaaaactagcggggaatggtggtgggagcctttagtcccagctacccaggaggctgaggcaggagaatcgcttgaactcaggaggcggaggttgcagtgagcccagatcacaccactgcactccatccagcctgggcaacagagtgagacttcatctcaaaaagtaaataaataaataaattgtgttaacactgtggaagaaaaacgatcgctggagagcctgtgcactcacatacatcctttaatttttacaacagcttccgggggaaggcgattccactttagagcttttcttcctttctagctgggagttatcctccaaattttaacctaatgatgtaagcaaaataaacacactgaagaggttgagaaaagaaaaacggctcacaacagtctgagctctgtgaggtctgcaaaatgtattaggcctagagggacatgagtatgggacttcggttatgcccaccctctgcccccacatacacacatacccaatcccatgcatacccaattgtttaaagtcatttcattcctgactatcggcctcatccattacctttttttttattattattttttagacagggtatattctgtctcccaagctggagtgcagtggtgcgatcatgactcactgcagcctcgacctcctgggctcaagagatcctcctgtctcagtcttgacagtaggtgaggctacaggttcgcgccaccaagccggccccattatcttcgtgttcttagaatttgtaatacatgccgggcgcggtggctcacgcctgtaatcccagtactttgggaggcaaaggggggcagatcacctgaggtcaggagttcgagaccagcctgaccaacacggagaaaccccgtctctattaaaaatacaaaagttagctgggcattggggcgcgcgcctgtagtcccaggactccatctctaaaaaaggaaaaagaatttgtcatacaaataacaatatgtagccaattgatagcttttgtttttgtttgtttgttttgagacgatgcgtcgcccagctggagtgcagtggcgcgatctcggctcactgcaacctccgcctccggggttcaagcgattctcccgcctcagcctgccgcggaccttgtcagggtccgcgctgagaggacgtcagggtagtcagtccgccagaatacggctgagcatgaggcctgcctaaccttgaaacccagcgccctcctgatccacacgttctaagacgaataaatcctcacagtctgtgaaaacccaccaggagaagcacgtccaacactctttacctccccaaacaagtctcagaagcgggaaaaccaacgccgcgaatgggcgggaaagccacagcgcctgcaatcgcttcaccttattagctaattttgctgtccttcccagtggcccgcctcccttgctcgcgggcgatatttttattggctttcgtctgcgaggcgtccaatctcattggtttgcctttctgttcgtcaggcttgggcgcctggtgaaaggcagagagcgcgtcactattggggctggaggccccgcctccgcgtgccgtgtgcaaaaacaaacagccgttaggaaggcggtgccgggggggcggggtctggctagaaggaggcgcgcgattgaacagccgctggggttcgaaccagcaagacaagcgggcattggccacagcagcgcgaggcgggcacggggtattgtccggctccggcggcggcggtcggtgctgcgagagcggcggcggcggcgcgggtcggcagcgggagggcgcgcggccgagcggaggcggagtcggcgccgagaacatggtaagggcggccgggtgggccgggggcacggggcctgggagagcagagcgcggaggcc

SEQ ID NO: 38151 - DNA, 2300 bp, Homo sapien
cacgcctgtaatcctagcactttgggaggccgaggtgggtggattgcctgagctcaggtgttcgagaccagcctgagcaacacggtgaaaccctatctctactaaaatacaaaaaatgagctgggtatggctatagtcccagctacttaggaggctgaagcaggagaattgcttgaacccaggaggcagaggttgcagtgagccaagattgttccactgcaccccaacctgggcaacagagcaagactgctcaaaaaaaaaaaaaaagtggaaatgttgggtcttattttatgaaaggtatataagaaactgccaaactgtttcccaaagcatttataccattttatatccttactagcaatgtatgagttccagtttcttcacatccttctcaacacttgatgttacattttttaattttagccattctagttggtatttcattctgactttaatttatatttccctaatgatgaataatgttgagcactgtttcatgtgcttactggcttttttgacgaagtgtctgttaaaatctttcaccttttatattgggttatctattatttgtgttctttacaagtccattgttggattcactatctatgaataactacatttaggctgggtgtggtggctcacatctgtaatcccagcactttgggaggctgaggcgggcagatcacctgaggtcaggagttcaagaccagcctggccaacattgtggaaccccatctctactaaaaatacaaaaattagccgggtgtggtggcggttgcctgtaatcccagctactcaggaggctgaggtaggagaattgcttgaacccgggaggtggagggtgtaatgagctaaaatcacgccactgcactccagcctgggtgacagagcaagactcaaaaaaaaaaaaaaaaaaatttaaggatgaggacattttggctttggaaaatcaagtaactggtcaaggtcacagattcaaacccagtgcagttgcagagcctacactttttaacactattccaattctgcctcttgttacacctcaatgcttacaacaaaaagacctcataggaattattcattttattgataaagaaactaaagattggcagtcaatttccttaaccactttaatatggctaactgtggggacagttaactgatctctggatcccaaatctaacctcatcctaaatcatcttctttctatattgttcccacagtgatctttccaaaatgtgaacctgatcacatacggtggctccagactctggggtaggcactaactctcccgcactgcaaatggctttccttgatctaatccaccctccagtgtcatctacgaccattcttcaggcatacacacccccagctgctctgagctcccagcatcaggccctgggtgcctctgcactgccgtctcctatgctgggtggctcttctccagagttgccaggccaactgcagtttgcccttcagagtcagctcatgcctcctctagggaaccccacaggctggtcagaacccgcttccgagtgctccaaaggatctccctccccccggtcgccagtgtatagactggaactctgttcccagcacacaaccagcgcgagcaggctggggcctgagtatgctcagctaacgccccggaagcgagaaggagggaagtggacgacaccggagtctaaagtaaaagtgtcacgggaagaggcgcgtagacagacgcagcgggcggctgagtcacgctaaggctggcaagtccccagggctagaaaccgagcagtaacactagcctactctcagcttgccgcccgcccggcgcggcccctgacgtcacccctctgcgccacgccgccgcggcgcttccggccgcgaggccgcggagggcgggacggagtgacttcacgggaaatcgcgcgccggaagtggctagggctgcacggaagtcgcgggggcggggcgcggaggcgatgggggggcggcggcggccggcgatgagcggcgggagcgcgtgagcgagccgggcgggcgaggctggggggccccggagcgcgagccggagggcgggggcgcgagcgcggcgggcggtggcggcgaggcggcggcctagaagatggcggacggcgacagcggcagcgagcgcggcggcggcggtgggccgtgcgggttccagcccgcgtcccgcggcggcggcgagcaagagacgcaggagctggcctcgaagcggctggacatccagaacaagcgcttctacttagatgtgaagcagaacgccaagggccgcttcctcaagatcgccg

SEQ ID NO: 38152 - DNA, 2300 bp, Homo sapien
gtggaaggcttcatcgacaagaacagagatttcctcttccaggacttcaagcggctgctgtacaacaggtgagcacggcttgctgggcaccatagggagggccagggccctggggccccagagactctggggtcaggcattgactagcgtcaggacgtgggtgggtggggctgctctcccagaggatggctgggaattcggcctgtgtctgcagcacggaccccactctacgggccatgtggccggacgggcagcaggacatcacagaggtgaccaagcgccccctgacggctggcacactcttcaagaactccatggtggccctggtggagaaccttgcctccaaggtatgttccacccctctcccactctggctgttccggatccttctctctgtgccctcggtgccaagtagggtcccaaccacctctgtacatcatagtggtggggagagggttcttgtcctgtctgtatgagccacatctgctccagcagtggaccccacccactgcacaggtgagatgtggggcctcaggggctgggctgaggcttgatcaatcatggggaacccaggcttctcctcgccccattgtctcttgaacagggaggggtttggggagaccctgctgagaggctggcttggcccagcccagctcttggcaaaaacccaggattcttctggcaggtggggccagagagacaggaaactggcacaagctttcttggggagctttgggtcaaaagtcagaagaggaacaggtgaagggtcagggagaggacatgttagggtgagcttaactacagaacatccagagatgtcagccccttttggaaggagagaaggaaggcagatggggcgaggcctgctcctgcccctgccacgcccacctccccaccccccgaccaggggctggaacctggctctgaacctggccttgctggcctctgcccagcacttagggcttccagggcccttgttctgctgatttcccttctttgttcccaactcttctcctggcctgggaccttgaggggttaggaagcccctggtgtggggcagggtgcacagtgctgctggcgcagaccctctccaagtcccctctgtccctgcaggagcccttctacgtccgctgcatcaagcccaatgaggacaaggtagctgggaagctggatgagaaccactgtcgccaccaggtcgcatacctggggctgctggagaatgtgagggtccgcagggctggcttcgcttcccgccagccctactctcgattcctgctcaggtactggcacctgacacccatcactccatgggccatagtccctgtgtggagtccaaggggtaggagcagagggtccccaaacagcacgtcgcaaacatcgatacaagcaggaaccagcacgctgctggcctcaagacaccaaaatatctgggaagacatgtgtgtgagcacatgcatgtggggacatacaggtgggaacatgggtatgagggctgtgtgaggacatgtatgtgaggacatgtgtatgggaagacatatgtgcacaggtgtcataagtgctccaggaacacactctgtatccctgccatctccccaggtgtggggtgggcagggtgggctccatcatctctcccccaggcctgggccacactgccctgtcctgtggtgacaggtacaagatgacctgtgaatacacatggcccaaccacctgctgggctccgacaaggcagccgtgagcgctctcctggagcagcacgggctgcagggggacgtggcctttggccacagcaagctgttcatccgctcaccccggacactggtcacactggagcagagccgagcccgcctcatccccatcattgtgctgctattgcagaaggtgaggtgggcggggcaggaagacatccactatggaggtggggaaagcttgtgtcccaggggccacaaacacacttgtaagtttcacaggagtctctgcttgatggagacaggccagggagtgctcaataaatgctcagggccaggtttgggtctaagggttagggcctgattgaatttgactgcgtatcccatcccacctggcccacccaggcatggcggggcaccttggcgaggtggcgctgccggaggctgagggctatctacaccatcatgcgctggttccggagacacaaggtgcgggctcacctggctgagctgcagcggcgattccaggctgcaaggcagccgccactctacgggcgtgaccttgtgtggccgctgccccctgctgtgctgcagcccttccaggacacctgcca

SEQ ID NO: 38153 - DNA, 2300 bp, Homo sapien
ggagaccactgtggaccccaaactctatgccgcaatggagacagtctctgagtggctcagctcacccaggatggcaccagggagacgcaaggtcaacacctgcccccttcttccttctccactctcagcccgtcagggtgggagcgctggcctactggggccaggccctgatatgggctctggcgaaaggcctgtgggtgcctgtaagcctgtgagtgctgaggcctacccctgctgtgtccaggttcgagaagggccgcatctacacctacatcggtgaggtgctggtgtccgtgaacccctaccaggagctgcccctgtatgggcctgaggccatcgccaggtaccagggccgtgagctctatgagcggccaccccatctctatgctgtggccaacgccgcctacaaggcaatgaagcaccggtccagggacacctgcatcgtcatctcaggtacctgtccctgccgccgggcccccaccctcggcatcttcatttgtgaacatttgggagggccattagagcatctcctgtgccctgtgtcctgatgggggccctaggaccccatcttgccagtcttgggggtgtgagtgggcacagggagctgggctaagagagcgaacctggctgattctctcaactctggtctttccggcaggggagagtggggcagggaagacagaagccagtaagcacatcatgcagtacatcgctgctgtcaccaatccaagccagagggctgaggtggagaggtgagtggcaatgggcagctctgggcctcagcatggcaggccagggacctcagtgtggcaggaagggctggctctggggagtgagagacggcaactggagtctagctcaggtcaagttcagtgggaacttgggaagtttccagataatgccaacacacccggaggtgagacagggtgacccatgccaaggacctctccttgggtgggtgagacctagccaaggtactgggcctaccagctgggaggaggcagcagccacaggtaggatgaggagaagtgcagcagggcccagagatgcttgaaatggctcatggacagggcagcaggcagattccatggaaacctggagaagctggcaggccctggccaagatggccaagcatgccaggtggctgtgtgggtgatggccaggagccttgaaaccaggaaacctgtcccttatggaagcagcttcctctgtcagtgcctgtctcttcctatcaagaggcagcgagatgggattcaggggggacaagcaatgtcagttcctgagcacatatggccagcaccactgcccacccctgcagctggaggtctaaagcccagtggtcagaacagcccctcctccccaggctgcagctgaggcctgggaggggaagaggtggctgtgagaaacaaggacctcaatgctacacagaccatgctgagcacagccagcccggcaagtgcatttcccagcctctcagaggtgaagtgaccgtcacacaacctcagaggcaacactgggcgaggccaggccattggttccctctcagcaagttcagaggaactcatcctgagatgctgtgatttctgttgggaagactcaggggcagagacagcattccccagatgggaagtctttgccttaagacccagcccctctgccctgacagggtcaaggacgtgctgctcaagtccacctgtgtgctggaggcctttggcaatgcccgcaccaaccgcaatcacaactccagccgctttggcaagtacatggacatcaactttgacttcaagggggacccgatcggaggacacatccacagctacctactggagaaggtgggcaggtgggctgaggagacctccatggggagccctggccgagacccatcccaggcctgggaaggtacccatcccgacggtgcagcttaggagggctgggctgtctctccctgtggcccttctctgggcctcagtgtcctcatagtcaggactctctgacccccagcctgccttgcacctgggaatgttcagatggggtccccagggtcagactccttcccaggcctgagtccatctgcccctctctcctcagtctcgggtcctcaagcagcacgtgggtgaaagaaacttccacgccttctaccaagtaagccctgagggcaaggggaggtggaaaaatggggtggggaaagggagggcagcaagctggaccagcttgtgacccttccatcactaccccaattccccctctctgcccactcaaccccacctagcccatcgtcctcactccccaccacactcacc

SEQ ID NO: 38154 - DNA, 2300 bp, Homo sapien
ttctaccagtcataccctgtaaggagcatgccctggggaagctgcagatagagctaccatttgtcctcccttctgaggaccaggccgtgactctgactgaccgacttttccctgggatttgagtaggacccactgaattcagtgctataagggcccagaggtctgttgacccaggagggaacttcctttgtagtgatgtcatctcagcctcggttttaatatatgtaaaatgaaaataacagtaactcctacatgtgtcatgagaatcaaatgaggcaatgcatggcaaatttgtgcaaactaccaaggaaggacgcccagggtcccagcaaccagcagcagctaaagcaagggcgggcaaactcctcccaccagccaaatctctgagctaagagtggtcttgacatttttaagtggttagtggtgggggaaatacccaaaatagtatgattacgtgacagatgaaaagtttgcgaagttcagatttcggtgtccttaacgttttactggaatacagccatcttggttccactggttggcttgactccctgggggttggggaagtgaaacttgaaaagacagatgagctggcaagagtctgggtgagaattcccagacttgagtgtaggtttgggaaacccttcaaaagcaccagcccaagagcctgggggtggggaggaggccacacttgtcagagttccgaaggactgactttgaatttgcccaagaggagccccaggtctggcccagggtggagccagaggctgcccacttacaaatttggggatttttcaggccagtggccccttattgcagtggtgcgtgactcagttttattaggtacttgaataagtactttcagttttatcaggaatgcatttgctttaaggtattcgagagaaaaaaataaacttaacttgcctatccattacttcaaagtttaaaaaatgggatgactgaaagacaatagttaaactagtgcttatgagtacaacaaatctcaaaggcagcacatgaatgactgaagtttgggaattctggagtctgccctttgacctccctgtatgagggaaggggtgaaagagaaatgtcaccagtctatttgtaggatgagagagaactgcatccatttgacctttgatgagagaatcgccccagtgttcctagaggatgggtgtgacctgccccagtctgtcctgggatgaaaaagaactttttccagtctgcctggaagctaagagaactgcacccctcccacttcttccaggagcactaagtgtcaggaatgcagtgtctggagattttggccactccctaaatgcagccgctccccaaatgcgctgcctcatcttcaaagtgcagggacagcagctctgagatgaggccacagggctccaggcatgttcctggtcctcactgcagtttatgggggatcggctggacacaagtacaaggcagaggacagttaggggcacaggggtcccactgaaggccagccccatgcagaggatgctctggggtcctctgtccctcccccgtggctggggtggggaattgcagtgctaggaccactggcccttggcaggtcacacaagaagctttgctcgtctacaccccagtgtggccttcacactgcaaagaaggctgttgcccccaccccaaaggcctgggcattaggatcctttttcatttttgtattaatgtacaatgtacatacagtatattgcatctagtgttcagttctgacttgagagacacacacagccaggtaaccaagatcacgtcaaaaaatctttctttaaagtcccacaagtgactctaacgtgctgccagggttggaagccaacccacggagtcttgtctcctgcttgtgggtggaggggagcttccgaaggaggccagcgaagaaccctccaaagcggggaggacccagcatccggcccctcgcccctggcgtgcaaacgggtcagaccgttaggcacagcctccttgtggggcgcagggacaggaagcagggtttagagcacctcgagggggaaggagtggcaagtgcggagggcagcccctcccaggactagaacccacttcctactttacaccagcactggaggaggctggtggggcagggcgggggcggtggggcctcccctagccttccctccccctctccttcactgtccttccagcaggcacaggaaggtgaggcaaggtgtttccagccggcaggatggaggacgaggaaggccctgagtatggcaaacctgactttgtgcttttggaccaagtgaccatggaggact

SEQ ID NO: 38155 - DNA, 2300 bp, Homo sapien
ggctctgcatgaattattctttctctattgcaattcacctgtcttgataaattggttctgcctaggcagcaggcaaggtgaacctgttgggccattacaatctcatagcagtggcagaatggacagaccagtgaaccctgtgctaggacaacctgcaccaggccctggctgttgtaggaggtccttttttttttttttttttttgagatggagtttcactcttgttgtccaggctagagtgcaatggcgcgatctcggctcaccgcaacctccgccccctgggttcaagcaattctcctgcctcagcctcccaagtagctgggattacaggcaggcaccaccacgcccggctcattttgtatttttagtagagaccgggtttctccatgtcagtcaggctagccccaaattcctgacctcaggtgatccacccgcctccccgcctcggcctcccaaagtgctgggatgacaggcataagccaccgcgcccagcctgttgtaggaggtcttgaacaaaccacttaacttgtttgggtggggcttagtttccacgttagtaatctggaagtaacagttctgccttatctgtctgttagggttttgacacttagtgaagtatgggatttgtatactgtaaagtgattgaatgtatttactaggtgcaatacataaaatacgagtttcaagcactgctctgcttttacttatagaaccacgttctcacttttctagcctgatcattcaagacccttgaacacatcgtccttatctcccgctcctcattgagacccttccagaacactacaaacttgtaatacttagctgtatcaccagcaaaccatgtccttcccaatttcaggacctttcaatgtgctttcctctgcctgggggtgggtggggggtggagagtagtttcctcccaacccatgaaacctctccacaaaggtagaagagacagaaaaccattactgaataagtattaaaccagattgtgatgccgtacatcacatgcaacctgctaaaggcaacacaaagacagaaactcactttttctatgcagctaagtagagatagcccatcacattatgtaggttttgcaatttggagtcaggtgccaagttaagcctttgtcctcctaagaagctggactcttggccctttcgtcccttaacaattgcatttttttctttctttgtttttgagacagagtctcgctctgtctccaggctggagtgcagtggtgctatgtcggctcactgcaacctccgcctcccgggttcaagcgattctcctgcctcagcctcccgagtagctggtactacaggcacgcttcaccatgcccagctaatttttgtatttttagtagggacagagtttcaccatgttggccaggatggtctcgatctcttgatcttgtgatccgcccgcctcagcctcccaaagtgctgggattgcaggcgtgagccaccgcacccagccaacaattacacttcaaggagatggctcccaagaaacattcctgagttgaacctggccatataagaaaaagacttgagtacatttggaaaggagagaggctgaaattttgaaagaaaaagggagggggatggtttctcgtcccttcttttcctcagggaaaattaaaccctatgtataatttgtatttgcccttccacctgcatcacctttcccacatgctcccacaggcaggctcctgttcattcccaaggctccgtgtccacatcgtgcttggattccgcccggccccgcctgtgcggccgcaccaggaaggcaccacccattaggggctcagcgcgtccctccaggccacgccgtcaggcctccgtccttttagctgtaggggcagattacgtaactccagccttctggtcactaaaggagggtaacaaagggcggtcgagagactccactgagttgacacgcagacgcagcctcaggaccctaaactctacgccccagcacaccctaccaagcgagcgcccgcggccgcgtgacgtcatctaccccaaacgctgtggccccggccacgcacggcttcggggcgggactacgcggtgacgtcgaggtgcgcggcgcagcgcgcggcgtcagtcttggctggcagacctgtactccgtactccgtacttcgtagtcgcagcggcgcggtcttcggcagtctagtcatccaccgccatcctgggccccacgtgttgcctgaccattcctgagcccaggtaggggtcctgggggattgggttcagtggcgggcggcgtgggaggctgggccgcagtgagtgg

SEQ ID NO: 38156 - DNA, 2300 bp, Homo sapien
ggtgcatgcctgtaatcccagctacttgggaagctgaggcaggagaattgcttgaacctgggaggcagaggttgcagtgagctgaaatcatgccactgcactccagcctgggtgacagagtgagactctgcctcacacacacacacaaatcacatgtacctcataaatatgtacaattattatgtgttagctgggtgcgatggctcatgcctataatcccagcactttgggaggctgaggagggaggattgcttgagcctaggagtttgagaccagcctgggcaacatagtgtgaccttgtctcaacaaaaatatactaaaattagccaggcttggtgatgcgtccttgtagtcccagctacttgggaggctgagatgggaggattgcttgagcccaggaggttgaagcttcagtgagccatgactgcatcactgcactctaacctgaaggacagagtgagactttatctctaaaaatacaaaagaaacaaaaaattatttgtcaattaaaaaaaaactggcagctttcctagttttcggtcctgcttccagcttaggagcaaccagagaaagacaaatatgtgcccctaaccaatcacttgggatgccctgccccttgcttccccaggccaacagcctcaaatgaggacatccctggaggcttcccttttttcactataaagcttacccactcctctgcctgacattgagtctcatccaaatacaaatgatggtggctgactcccttgttatagcaagctaacagcctttttgcttttctcattttattgtctttattcccagttatcaccatctgatcattagccagtggacttttgcttgaagcatgaacctgtgtatgcaaagacagggcaaaggtattctgatggataagaacagcctgaggaagtcagcacatccagagttaggctaagagaagttttagtagtgttgtttactgtattatggagtgataaatatgcatttgtggaagacggtggaagactttaaatatcaggcctttgttctgtgaatggtgggaaaataatgacaaccagatgcgctacatcatttgcgtgtgtaaatgtggcaagctggattattgcagaaggcagattgaaagggtgtttccactatctctgctttatcttgcagagaatggaatacttatgcctttggagaggtctagagaccaagtatttcttttgaatatcagtataacataggcccagtcaggagacagaaacacagtaaagaaaagtttaatataaagaattattaggccgggcgcggtggctcacgcctgtaatcccagcactttgggaggccgaggtgggcggatcaccaggtcaggagatccagaccatggtgaaaccccgtctctactaaaaatacaaaaattagccaggtgtggtggctggcgcctgtagtcccagctactcgggaggctgaggcaggagaacggcgtgaacccgcgaggcagagcttgcagtgagccgagatccacgccactggcactccagcctgggcgacagagcaaggctccgtctcaaaaaaaaaaaaaaaccaccaaaaaaacacagtttacattctagctgtgctacaaagttcttaccggcagattggtttagtggcaaaatagcagacctgctggtgactccaatttgtagtgtgcttttgggcgaatcacctcattccccggacctcatctggaaaatgtggaaattataccggatgactggtaaggttctacgattttattctgatagggtctgcacatccttgtggttgcacttctattttccaaatgtgtttgtctaaggcaggcagactttataacagagaagtactagaaaacggattccctgtggctcagggaataaagtgggacacaagaaaaaagaaaaccgcaccgcacccagactctcggcgggacgccccgcccctcaacagtggccgcctcctcgcgcccctccttcgccatctgccggccgcgtcccctcccgccggcccccgtcccccgtcccccgccccccgtccccttttcagagacctgagctccgcctccctggacgcgaggcaggctgggaagtcggccgccgtaaagatggcggcaaattgaaaaagttggagctgctcccgcgcgcgctcccgcgcgcgctgagtgggcggagcgaacagggggctggacaggtgcgttctcgcggccgtgcagaagcgaagtaggggtaggagcgtttccggctctcctgaaggacgcggggcggggtgggggtggtgcaaggcaggcgcgttctcgg

SEQ ID NO: 38157 - DNA, 2300 bp, Homo sapien
gttgaagcttcagtgagccatgactgcatcactgcactctaacctgaaggacagagtgagactttatctctaaaaatacaaaagaaacaaaaaattatttgtcaattaaaaaaaaactggcagctttcctagttttcggtcctgcttccagcttaggagcaaccagagaaagacaaatatgtgcccctaaccaatcacttgggatgccctgccccttgcttccccaggccaacagcctcaaatgaggacatccctggaggcttcccttttttcactataaagcttacccactcctctgcctgacattgagtctcatccaaatacaaatgatggtggctgactcccttgttatagcaagctaacagcctttttgcttttctcattttattgtctttattcccagttatcaccatctgatcattagccagtggacttttgcttgaagcatgaacctgtgtatgcaaagacagggcaaaggtattctgatggataagaacagcctgaggaagtcagcacatccagagttaggctaagagaagttttagtagtgttgtttactgtattatggagtgataaatatgcatttgtggaagacggtggaagactttaaatatcaggcctttgttctgtgaatggtgggaaaataatgacaaccagatgcgctacatcatttgcgtgtgtaaatgtggcaagctggattattgcagaaggcagattgaaagggtgtttccactatctctgctttatcttgcagagaatggaatacttatgcctttggagaggtctagagaccaagtatttcttttgaatatcagtataacataggcccagtcaggagacagaaacacagtaaagaaaagtttaatataaagaattattaggccgggcgcggtggctcacgcctgtaatcccagcactttgggaggccgaggtgggcggatcaccaggtcaggagatccagaccatggtgaaaccccgtctctactaaaaatacaaaaattagccaggtgtggtggctggcgcctgtagtcccagctactcgggaggctgaggcaggagaacggcgtgaacccgcgaggcagagcttgcagtgagccgagatccacgccactggcactccagcctgggcgacagagcaaggctccgtctcaaaaaaaaaaaaaaaccaccaaaaaaacacagtttacattctagctgtgctacaaagttcttaccggcagattggtttagtggcaaaatagcagacctgctggtgactccaatttgtagtgtgcttttgggcgaatcacctcattccccggacctcatctggaaaatgtggaaattataccggatgactggtaaggttctacgattttattctgatagggtctgcacatccttgtggttgcacttctattttccaaatgtgtttgtctaaggcaggcagactttataacagagaagtactagaaaacggattccctgtggctcagggaataaagtgggacacaagaaaaaagaaaaccgcaccgcacccagactctcggcgggacgccccgcccctcaacagtggccgcctcctcgcgcccctccttcgccatctgccggccgcgtcccctcccgccggcccccgtcccccgtcccccgccccccgtccccttttcagagacctgagctccgcctccctggacgcgaggcaggctgggaagtcggccgccgtaaagatggcggcaaattgaaaaagttggagctgctcccgcgcgcgctcccgcgcgcgctgagtgggcggagcgaacagggggctggacaggtgcgttctcgcggccgtgcagaagcgaagtaggggtaggagcgtttccggctctcctgaaggacgcggggcggggtgggggtggtgcaaggcaggcgcgttctcggccgtcctgaaggggcaggatcttcagcctgtgggcggtgctctcgccgtgagcggggccaacgggccgtgttctccctgaaggggcggggtctgatcgctgcgggtcggattcccttgggcctgaaagtgaggatgagcgacaaccgtgggcggggcctgcgctggggaaggtggggcctgggcggggcggagggggctcgggcccggaagtgcgggtgtggggcgcggccggggcggagacttcgggcccggctggcgggcggcgccgggagcgcgggggcggcgggcccgggtcgagcatgtagcggctgctggcggcggggctcccggggcgggccgggcgggccgcgggagccgcacgcggcgatatggaagaggagggcaagaagggcaagaaggt

SEQ ID NO: 38158 - DNA, 2300 bp, Homo sapien
ttgtcttctgatatttgtgtccctctttgattctgcctgctcttattctcctcttaggaaactgttagactcgatggacccagcttctgtggcctttaatttttctcatgttaaactttttaccttttcactttatgttctaagacagggttggcaaacttcatgtaaaggaccagacagtaaatatttcaggctgtgtgggccagggggcaaaattgaggccattaagtaggtacttatataagagagaaagcaaattttcgtaaatttttttattgatgaaattcaaggtataataattgagtacaattttttgtaatatggttctactactgagaatggaattctttttgggggctaacattttgcttaatcagggttcaaagttggtgattccctttatcgaattggtggcaaatgttcatctgtaaaacatttgcagctgtggccatcagcagcaggcaggcattggccaaccccgcagttctccttcacatcattctttgggctctccgctatgtccttgttattattctacgaattttttattttggcagtcatatttgtaatttctaagatatatttcttgttctctgttctctctttttcttttttttttttttttgagatggagtttcactcttgttgcccaggctggagtgcaatggcgtgatctcacctcaccgcaacctccgcctcctgggttcaagtgattctcgtgcttcagcctcccgaatagctgggattaacaggcatgcgccatcacgcccagctaattttgtgtttttggtagagacggggtttctccatattggtcagtctggtctcaaacttctaacctcaggtgatctgcccacctcagccttccaaaacgctgggattacaggcgggagccactgcacccggccgttttctctttttcatagctatctagtcttattttatggatgcagttcttctcaagtgtctctaagtatactagctagaatgtaggttcctgtgcctgtctcttcccatttgttctttggcttttctctctcatgctgaccgtggggatcactgtgtttgtgagggaaggttggggttgactagtgttcagagcatgtgggttttctttttagtcatgtctatttccctggaatccttcccctccctgcagtagccaaaatagaggtgaggctgctcagctgagtggcacctctttctgtatctccctcctggtttgcctttttccctttgagcctacctgaaggtcagggtcagctggttctgccctgtataggcaacttttaggaaggagcaatctgaaattgtgactctactctggtttttaaagacagaaagtgacagtccagttaataccggatattgactcaaatctagttctgatgctgcttttccaactttatgacagtttctacatctgtggtatatggaataataattgaagcactaaattttattctgaagcaatcagtctttttggaatcaggaaatattaaactttatttgttacaggttaatgaaatagaattgtatgaaagtaccatttttatagccaaaacactgttgaaaatcagcactttgatttggttcaacctaatatttaaaaaattatattgtaattgttatgtttatttattgatctgtgaatatagtcactctaaccagatttttttttttttttttttttttgagatggagtctcactctgttacccaggctggagtgcaatggtgctatcttttcttactggaacctctgcctcccaggttcaagcgattctcctgcctcagcctcccaagtagctgggataacaggtgcccatcaccacgcccggctaatttttctactttcagtagagacggggtttcaccgtgttggccaggctggtgtcgaacttcttacctcaggtgatccacctgcctcagccttctaaagtgctgggattacagacatgagccaccgcacccagccaaccagaatatttaattaagtagccctccctatttgcaagccattctggaattatcagagttctaagagccttcaccagcaacagatccaacttctgcttttctagattaggaaatttgccttgaagaagtgagcttggccagaggcacgctgtttaatttcaaagtgctgctgactcaaactcatgagtcctggaggcaggtagaggcacttgtaggctgaggacccgtagagcccggtgtgccctgcccaagccccacctgggaatggagttatctctgtaaagatcttgctgcctttgagcaagcactgcaaatggggta

SEQ ID NO: 38159 - DNA, 2300 bp, Homo sapien
tgaaagagcttcctgattccatgtctgttttagtgggtgaatggaataaaaacccagctatgaaagggtgaaataaataaaggtaagaaggaagctgaggagcagaaagctcagccttggctgtcaggaggcagcagggtcaggaaaaatgttgggttttgctctttgaggatttgttttatttggggtggcttttgtttgcttatttacttttcccgctaatgctggagagctgagcatgatggtggtggtggggaggggctcatacagggcagggtccaaccccagcctcattagggaggcagctgcagggcctgctgggagccactggacgaccaatttctgcttttttcaggagtggttactgaatagtgtagtccttggctgcaattgtctgtgaaattggtgggtttgaggaggtgtccttataggaccacaggttctgctacaccgttttatattggattttgcatatgggtgaatttcccatatgctggagagagacagaaatgagagcttttaatgaaagtttggtggtttattgtatatatgttttgttagtttctgtgtttggtgataaggggggtctgagcttggcctactgtgggggtttcggctgccatctgtgcactgggtcaccctatcctggcaggcacctgcaaaaggagtgttgtcatctcctcctgcgtttcctctgttgagagttatggaggagatggtggggaataagttctcactcttagtcacggctctggtttttgcaggcctgcgtgatgtttccttgctgcggctgcacatcagtgtcttgttttctcgggtttatgttcctttgggtgactgtagatagggattgtagcatgatctctcagcacaatttgggattgcttccccccagacccccaccccccgccgccattgtcaaaggtggtgatgaaaagctttcttacggagttattgtgaatgaagtgtcaggtcttttcctgggttctgcaggcgaggcttgctgtaatcctctcttgctctctcactgattctcactctttaaggtgactttgattgcaggattagccttcagaaccctcatgaaatgctggatagggtgtgaagtcatcagagttaggggctggccagctgctgatcagggcttctccccctacttttttttttttttttttttgagacagtatcttgctctgttgcccaggctggagtgcagtggcatctcggctcactgcaatctccgcctcctgggttcaagcaattctcctgccttagcctcccgagcagctgggattacagacatgtgccaccacacctggctaatttttgtatttttagtagagatggggtttcaccatgttggccaggctggtctcgaactcctgaccttaagtgatgtacccgcctcagcctcccaaagtgctgggattacaggtgtgagccaccgtgcctggcctggtttctcccttgttgatctgcattggagctcaacacactcagtgtccccacttggagtgttccccactggggaaagaattgcataaaaaacatatgctccacttgttgatgctagcactggccacaccttccacctgccttcctggagttctcagaaatgaagtgtcccagctgagctggaaagagttggagtgatgttatgttttatcttctgtggggaatctcccccttctatcattgtcttgccagataaggttacctggcttctatgtgttgtaggaacaggtgaagaacaaggtgcctccatgccagaggctgcatggcagcccagccccaccgtgccggcctgcgtgctggctgtggtccctcaggcttgtgtgctgttggtacctttctcaccagtctggcagtcagtgatccctgttgcatgggggccatggtagtagttttggctacttctgtttgttaaccataggtacaacacaaagcatttgtaaataatgaactccaatcattgccgtttctgcctgcagcctggaattgtctcgccatttaaacgagtattcctaaaaggtgaaaagagtagagataagaaagcccatgagaaggtgacagagaggcgccctctgcacactgtggtgttgtcattgcctgagcgcgtcgagccagacagactgctgagcgactatattgagaaggaggtaaaggtaagtcgtcatgggccacaggacgtgcctgccaaacgacagtgacggtcatgcttgtatccaccagacactcttgagtttataagacacagccacacaaacaccttagtagttgattatcccacccattgtctt

SEQ ID NO: 38160 - DNA, 2300 bp, Homo sapien
gtcagtagttcattgagaatctggcgagtgtgttcattattgaccccttgagccatgaagctgccagcttgagtgcgctcttgagagcagtccactgaaagcctgtgagtctagatgcttggggttgctgtggtcataaactacacagggaacactggcggggtttatgaaggtggctgttgctctgttttgttctctgtgtagcagtagcttagacttgcgtacaccctccccaacgcaggcacacaccacacctacacacatgtacattactcaccctatctggcttagaaggctgggttggtggctccttccagccatactatccgacaccatggtgaccctcctgtttttctacctttggaccctgcgggaggccttaggcctgggacatccttagggacaaggagtgaggagactggtttctgactcgcttcttgcaggtgtttcaagctggtagggaggggagataggctcctccctttatttcttctgctgcatgacagtttctcagctttaattattagaacacattgctaaaggaaatggatgacagattttttttaatggagagagaatgagcgccataggagaaactttccaaaattagatgaaaaacaggacttctggtctttgagagaacttttgatttaaaggaagagagtgaatccctgtgtcctgggggccatcttccttgtttttgtggatgcaccggagcagttgtgtgtcccctgtgttacataaggtgtgctgtgtttattttttaatttttaaaatattttaaaaatttttgtaaggatgaagtctctctatgttgcccacgctggtcttgaactcctggcctcaagcgatcctcctgccttagcctcccaaagtgttgggactatgggcatgagccactgcactgggccgccatgctgtatttaggattaggcatccagagttctcagcataagagactagcaggtgaatagctaacgtttacttggtgcctgctatgtgcaagcaagtctctgtgcctctttggaccaaaagtacgctggtatttgggatagcacaggagtggggaagttgggggccaggtctagctgcaatagggtccatgtggcaggagctgcttggagggtgatgacttgagttggtgccagatggggcagggtcacccgtgcacccgtggtagcacttcctggatgatataggagaggcacacaactcgctgcccgcatccttaggctgcccaccctgcttccttgagaactaccacaggcacacaccagggagccaacatttaaaaatgtttaaaaggtagagatttcttaccaaactcataccaaaaaaagaaaaaaagtaaagggaaaccagtaaatttttttttttttttttgagacggagtctcgctgtgttgcccaggctggagtgtagtgccgtgatctcagctcactgcaagctctgcctcccaggttcacgccattctcctgcctcagcctcctgagtagctgggactacaggctcctgccaccacgcctggctaattttttgtatttttagtagagatagtatttcaccgtgttagccaggatgatcttgatctcctgaccttgtgatccgccaccttggcctcccaaagtgctgggattacaggcatgagccactgtgcccgcctttttttttttttgagacaagtttggtgcttgttgcccaggctagagtgcaatggtgtggtcttggttcactgcaatctccgccccccgagtagctgggattacaggcatgagccaccacgcccagctaatttttttgtatttttagtagagatggggtttcaccatgttggccaggctggtcttgaactcctgacctcaggtgatccacccgccttggcctcccaatgtgctgggattacagccatgagccactgcgcctggccaattattttcaataatatattttatttacccctccgtacccaaaacattattacatcagtatataatcaatataaaaatcgttgagctacatagcattctttctttgcctacctctgaaaccctgtgtatagtttgcactcacacatttcaatgtgggctcatcacattttgcatactcagtagtcctgtggccagtggctgccatagggacagagcagccccaggagtctcactgtggggtttgaggtacagtttcttatggagcccttgtctctgtgcatgcgctaactttgcatgtggcctgggacggccttcttctccctcctgaggctggcctgccctctgacaccctggcactagtggcacttctag

SEQ ID NO: 38161 - DNA, 2300 bp, Homo sapien
tgccttagcctcccaaagtgttgggactatgggcatgagccactgcactgggccgccatgctgtatttaggattaggcatccagagttctcagcataagagactagcaggtgaatagctaacgtttacttggtgcctgctatgtgcaagcaagtctctgtgcctctttggaccaaaagtacgctggtatttgggatagcacaggagtggggaagttgggggccaggtctagctgcaatagggtccatgtggcaggagctgcttggagggtgatgacttgagttggtgccagatggggcagggtcacccgtgcacccgtggtagcacttcctggatgatataggagaggcacacaactcgctgcccgcatccttaggctgcccaccctgcttccttgagaactaccacaggcacacaccagggagccaacatttaaaaatgtttaaaaggtagagatttcttaccaaactcataccaaaaaaagaaaaaaagtaaagggaaaccagtaaatttttttttttttttttgagacggagtctcgctgtgttgcccaggctggagtgtagtgccgtgatctcagctcactgcaagctctgcctcccaggttcacgccattctcctgcctcagcctcctgagtagctgggactacaggctcctgccaccacgcctggctaattttttgtatttttagtagagatagtatttcaccgtgttagccaggatgatcttgatctcctgaccttgtgatccgccaccttggcctcccaaagtgctgggattacaggcatgagccactgtgcccgcctttttttttttttgagacaagtttggtgcttgttgcccaggctagagtgcaatggtgtggtcttggttcactgcaatctccgccccccgagtagctgggattacaggcatgagccaccacgcccagctaatttttttgtatttttagtagagatggggtttcaccatgttggccaggctggtcttgaactcctgacctcaggtgatccacccgccttggcctcccaatgtgctgggattacagccatgagccactgcgcctggccaattattttcaataatatattttatttacccctccgtacccaaaacattattacatcagtatataatcaatataaaaatcgttgagctacatagcattctttctttgcctacctctgaaaccctgtgtatagtttgcactcacacatttcaatgtgggctcatcacattttgcatactcagtagtcctgtggccagtggctgccatagggacagagcagccccaggagtctcactgtggggtttgaggtacagtttcttatggagcccttgtctctgtgcatgcgctaactttgcatgtggcctgggacggccttcttctccctcctgaggctggcctgccctctgacaccctggcactagtggcacttctaggttttgttttcagtcttgaagtcctcccagggtggtccgaactgatggtgagagccctgcttcctggggattggcctcacttctgccatcaggaaaaccactgagttactccatgtatttcaggagaacctcatttgtctagggaggcaatgggtaggatgttagaaacaagggcactggggtctgaccgtctagattgccatgtggacagtgcaactcacacgccctcaggccaggcctttcactttcccatgcctcagtttacccatctgtaagaagggaactccccagaacacatggaaacctcctggaggtgactgttctcagggttgtatatgtggtctgttgtatatgaacttgaagcgtgtgaaactgcaggatgacatgcagctctggtgcccttggagctcaggggtcgcgtgttcccacccttatttagagaagcgaagtgtgtctggtgcaggcccttcacctgagtcgttctgtgggtgcctgagccaggtaaaggtcctctcagcctgtttccatggcggcctcagctgtttcctcaagtgcccccatgcctgcccttccactgtgctaaactgagatggtgttgacttctcagcccaggacccagggatctcccccagccagagtctgtgtgcggaaagttccagaggcctcagtgcaggctccctgtcggagagtgcagttgggcccgtggaggcatgctgcctggtcatcctggctgcagagagcaaggtgagactttctcgccccacttactcagaactggctcctcccagaccctgctcatggccagccccaccctggccacacccagcacagtgctgggcactgctgggtgccccagc

SEQ ID NO: 38162 - DNA, 2300 bp, Homo sapien
gagccgagcctggacagtcctggcgtggaggtcagccatgtgtgggtagggccaagggcaccttgctgtgggcaagaagtcacccagagatgggaccactgctggggcctggggcctggtttggggtgacacaggctgctgcctctgctctaggtgggaggcagggagtgcaggcccagacttcccagccccagggtcttgtgctggctctgttctggcttgcttggtgaccttgaatgagttataaaaacctttggcctttggtttctgctccatcccaacagctcagccgttcccctgccctgggggccacaccaggggccagaaccaagagcccagcttcagggcacccagtgatgccccaccagccacgcccactcctgatgttgggtgtcaggcatgcaagaacccaaaggacccccttgtctcaggaccccctggatgtcccatcaccccagcagcaaagcccttgggtgacaagttttggctggtggttcagggctcagggctctgatgctgctgaggggagctggagcagcctggcaacagggtcccccttctttcagcttcaactctaatcctggctctgctttgtagatgagaaagctgaggtgcaagagatgttgtcctggtcaccagtgagtgcgggagagcaggagccaccaggcaggcatctgcagcctggagagctggcccctgtgtgccgccgctcccccaccttgggcaagacctggcctgggctctgaagggccttcattggatgcttcaaacagaggtgcctttggcctaggtccaagtgagggagtggacataatggagacatttaaaatgaagcttatgagcatttagagcacacaggaaaatgcttatgagattaggttgggtgaaaatagctagattcaaaactgaatgtgcaatgtgatctcgcctgtgataaaatacaggccagtaagagtccaggaggcagaaaaccatagcggtctggtgtgccgcaacctcggaggggttttcttccatcttcctgagtcccctaagtcctttctgacccatgagggctacttcctatggactcctttctcagctggaggtgtgttagctcacagacgtttactgagtaccagagcctcctcatactgaagcctgcccagcgggttgggggagtgcatcatgggacccagagaaggcccacagggcagggtgggaactcccagcacccgggaaggaactggtggtcacccatggggtggctgccaccaaggagaggactcagccagaggctgctgttggccctctgaagctgtcctgtgctcttgctgggctccatggtctccgttcctgcccaccactgcccttgtggccagatgctccagcaaagcctccacgggacacttcatctctgttctccagaaacttggctgcgtgtggtggcccctggcttccccatctccctgggtgcaggaggggagcagggtcagaggggcctggtgaaaccctgacatgttggcctcaagtgtaggtagcaaggacagcagagagaggaggcagagcgaggcatgaagcccagagtgttcgagctgcgcgcgtcgtgctggtgccacctgcctcatgtggcgcatctattgggaggtcatgggatgggactggcactgcctggcagattcccaccaccagcccctcccaccgagcccagctgaaccacactgattctgtggaatggaaactgcaatccagtctccccagagaggctgaaatgctagttctttgctgaggtgtccttgagaaaagccgccagacaggtctgttcatgactcccagcaacacttccctcaaaacccctctctaggaaaccactagcatctgctctctgctgtcaaaactcctggaagttctccctcaaacgcagcgtgcagagggtcttctcttttctctcctgccttcctggatccaccttcctctgggccctatgcagccggaattcatctccccgggcctggcccttgcctgggagatgcatccaggggcacctcatgatcttctctatctccacagatctgtcctgcgatgcggccgctgccaccaccatcctgggaggggaccggcgggagccctgtgctctgaccccagggcccagccacctggccctcacgttcctgcccagcaagccgggtgcccggccccagcccgagggagccagctgggatgcagggcctggtggggcaccctcggcctgggcggacccaggggagggcggcccaagccccatgctcctccctgagggcctgtcttcccaggctctgtcc

SEQ ID NO: 38163 - DNA, 2300 bp, Homo sapien
ataaaatgaacttagttaggcccccttgttatttggctacaattctaattgctgtttattgactctttttactcacatgtgatttaagaaagtcttatgatgcaagactgaacattgtaacaaaattataaggcaagtatctgtaatgtaataacagctttcttttcaaagattttcctgctgtccatgaaaccggaaggtagacacccagatcttctgtaagattagaatttactccagtactttctccctcctccccagcccttcagacagcagcttctctgttcgcagctcacttccttgaaggtgtggtttctgcttctcattcataagcgcagagactgaacctgagggttcagtgttgagagacttggcccaggaaaggacagagccatacttgttttaccatctgctctcttctgcaaggctggattcagggccaaagggctctagagccacccatgttgacactgtgggccctgtggacacagtacctgaatagcagttaccctcttcagaaacaaagcaggcaccagcagagaggacgggctgtggtgcaggttccggacccagaactatgtagaaataagttcaccttcgtttacctgtatagtgggactgatggttctcataggatgttggtgtctcatgggggtacgcacacagaaggatgcctggcatttagtaagagcctgttcagaggtgctgctggtagcagcagcagcttggtcatccctaggaggcctctgcatttgggagtgggcagggcttagtgataccgggggtctttttacccatatgtcaaaagcgttcctgcaaacctttgtgcctggggtgctcctccctttgcaggcagttgagggtctggcatgcttgggtgccgcgtccctggagggtaaaggtggtggttcactgcctaacgcactgcagggactcctgcttattgcagcagttgcattcctaagaaactttcacgttgccagaaactgcgagattggtttgttagagaacagtttaggggttggagcttctctgactcaaaaacaaattattttcctggagaaaagccagtgtgttttgttttgttgtttgagacagagtctcactctgtcacccaggctggagtgcagtggcacaatctcagctcactgcagcctccaccttccaggttcaagtgatcttcccacctcagcctcccaagtaggtgggactacaggcatgtgccaccacacctggctaatttttgtaattttaataggcacagggtttcaccacgttcaccaggctagtctcgaactcctgacctcaggtgatctgcctggcccaagtttttaatacctaaaacttttaatgtcgttgcaagtaaaagtcacgaatgataacaaaactgatcttagcaagcgtaagtgccaccttctctgccatcaggtgacatccatcaggctcaactttttctctgacctcttgtattgatttgacagctttacttgcagctgaagtctacgtgcccactacccagagctgtagccaggaccatgtaaaagagtgtggtctctctttaatcaactacattaggtcaaaacttcattggggaaacttggagaatttcccttgccactctagagttcttgcttgcaagcaattgcaaatgacctcagccaccttgagcagaaatgtgctatttattgtagcctagaggatcaggctcagaggtgtacccttggatctggcctgtgcctgaggggtgctctggctctgcaggtgcttggcagccatgtcaaattcagtgcctgccctgtctatggtaggcactggcccagaagactgccacagaaacagtgactcacaggccctgttactgtgtcccaggctcagggataaatttggttacagacaccaagcgtctaggcctcgaggctgagcaaggctgtgaggagcagccaggcactggggccctgttacaatggagtggggaactgatactgtcttctctgaagagttgtagtaaatgctcatgaaacaaggttcagagaggtagcctccagctcacacacaggactgacagtgccacatcatttctcctgtgtcctttctctgcctagattgcctcggtctggcatggtaccctctcgaagctgctgggaagcctgtatgctctgggcatccccaaggcctccaaggagctgcagtcggtggagcaggaggtccgctggcgcatgcggaagctcaagtacaagcacctggccttcctggcagagtcctgtgccaccctctcacaggagcagcactcgcaggagctg

SEQ ID NO: 38164 - DNA, 2300 bp, Homo sapien
tgaaccacatcctaggtgatttcaaattacaagcaggatggaaaccctcccacccaggctgtaatgttcctgagttttgatatttgatggcattctgtactgaaacaaaaatcctgtgagacttttgctttagaaaatactatcacatacctatggattgtcaagaaagacttagtctgattttacagatagagtggctttgactatttcatttctcaagtttgtgagtcaggaactgcccctgtagtagccccttctctctcctttttctcttcagggtttggaatcacttgctaggagtcttgtctctctgccacccaggacatcatggcagctcacctggtaaagcgatgcacgtgcctcctgagagaagctgctcgtcaggcccctgccatggctccagttggccgactgagacttgcctgggtagcccataagactctgacttcctcagccacctcacccatttcccacctcccaggttccttgatggagccggtggagaaggaacgagcatctactccctacatagagaagcaggtggaccacctcatcaagaaggccacaaggccagaggagctcctggagctacttggtggcagtcacgacttggacagcaatcaagcagcaatggtacttatccggctctctcacttgctgtctgagaagccagaagataaaggcttgctcatacaggatgcccactttcatcaacttctctgtctgctcaacagtcaggtgggtgccggagtgtggtctgagagcatagacaagaggaaaacagccagaaatgctggggtccacagcagccagtgcttaccaagcatagacaggggccttgcatctcttgtgatattttttatttttttataaatttcaaagtgctttatcgtgctttctctttgtttatccttacaagaggcctgttaggtaaatattgctatgctcgtcttacagacagccaagacgcatagtgatagaagcatgggaagtgagcctggttcttctcagttctttgggtgctttccccctcaccatatagtcttgacttgtattgctctctgccagtgtctggctgatggcaaggcactgtttttgaagccaaaggagatgcagcatgactgatggaaggtccttgaaacttgagacagacgtgggcatgatctagccatgttcagaccctccaaggatgaccatggagagaagcaacaagacccatttgtgtggcactgagcagggcagaactcagactacagaagccagttcctgctcactgtgagggactcccttcttagagagtcttcccctgggctccatgtacaaaaaaaggagtacagactcctgctgtggctgaactggccctaaatccctggtctgctttggaagggaagtgctggggcactgaaaccatgtttccagttgtcaggtgtaatgaagagaaaggcactatccaaggaaggagttgcactaactgagtgcttttcaaactgcaggttataaaatcagtgtagtgggatgtggccagctgattcttaatgaggtagagtagtataaaaaataccagaattcatcacatatagtaaggggattcactaatgtctcatggaacttttgttctagttaaggatgtatatatatgcctgtgttgtgtggactggggttacagtacataattatttcttgctggggatataattcataaaatgaacttagttaggcccccttgttatttggctacaattctaattgctgtttattgactctttttactcacatgtgatttaagaaagtcttatgatgcaagactgaacattgtaacaaaattataaggcaagtatctgtaatgtaataacagctttcttttcaaagattttcctgctgtccatgaaaccggaaggtagacacccagatcttctgtaagattagaatttactccagtactttctccctcctccccagcccttcagacagcagcttctctgttcgcagctcacttccttgaaggtgtggtttctgcttctcattcataagcgcagagactgaacctgagggttcagtgttgagagacttggcccaggaaaggacagagccatacttgttttaccatctgctctcttctgcaaggctggattcagggccaaagggctctagagccacccatgttgacactgtgggccctgtggacacagtacctgaatagcagttaccctcttcagaaacaaagcaggcaccagcagagaggacgggctgtggtgcaggttccggacccagaactatgtagaaataagttcaccttcgtt

SEQ ID NO: 38165 - DNA, 2300 bp, Homo sapien
gggttttagaagctctatgcagagaccacatatatatttcttaagtcacaggtggcttttagtatactcagtgttgtgcaaccatccctattatccaattccaggacacttttaccatctcaaaaagaaacctcaaacccatcagaagtcactccctattctccccacctcaacatcacataggtgactctatcaattcacctactctggacattgcaaatataaatggaactatacaatatgtggcctcatgtgtctaacttctttcccttagcatgttttcaaggttctttcctcaacaaaactccattagtttgtctaaagcttttcttttaacagatctataaatctgttgtaatattgtcttttgacagacaacttgtgaaggatttggagtagaatttgtgataaatacatggaatcttaattaactgttaacagaaaaatcaaactctgtaaattacttaaagaggtttattcagggccaatgagtgaccacagccccaggaaaatacaaacccaaaaagccttaagtgttcccgaggcagtcagattatagtttggttttatacatttcagggagccaggggttacaggcaaagacataaatcaatgtgtggaaggtatacactggtttggctccaaaagacaggatgtcttgatgtggggggtttacaagttatatgtggactcaaatacatagatatatacacgatatatgattgattgatagatagatagatagatctcttggtaggggtagatagggtctccctatgttgcccaggctagtcttgaactcttggcctcaagtgatcctcccacctcagccagcttgaccaagagattttttaatttgcaactggttaaaagagtgaggctctgtgtaaaatttggagtcagcagaaaagaatgtttaagatagtatgccagaatcagccacaatacactgggtcaaaaaagacctcttcagcaagattgatggtctgcaagcttgacttaacccttgccttgcacggccttaggtcttgtttataatttggtatcttactaccacaaagtctgttagtcttatgatctctactttaacaaggggtgttcaacctccctttccagaatggctgggaactcagtttttaaggtttctctggggtctccttggctaagaggaggtccgttcagtgcttggggggcttacaattttatttttagtttacaaacacaaacaaacgtaattatttatttttatgttttttgttttgttttttgcgacagagtcttgctctgtcaaccaggctgagtgcagtggcaagatcgctgctcactgcaacctccacctcccggattcaagcgattctcatgcctcagcctccctagtagctgggactacaggtgcgccctaccacgcccggctaatttttttgtatttttagtagagacggggtttcgccatgttggccaagctggtctcgaactcctgaactcaagtgatccgcccaccgaggcctgggattacaggcgtgagccaccgtgcgtagccaagtaattattaactccacagaaaataaaaggctgtgcaggaagtaaaaattaatcaagtccatatatagacctcagatacatttcgtttgggctatcctgcactttactttgtaattaaacaccactatttaaaaatcaggaaaattgcacataaaaatccagctgcaagtgggcgctctggagttccccagtctccactcactcgtcctcccagcccccacaggcctcaacgtcgcctatcccactccaccagcccagtcttccaccgccctaggaactctcctacgcctacgcaagcagggagggatagggtgacagcaccgacaacaaagggtcgtctcccgcactccgtatgaggatggcgtactggtcggggggcaaccgaagcctttcttcctaggttctttatcttttctaagtttcccatgacctatcgctccgcttgagccctcagcaaagatgtcacccgccgaaaggtgtggccggaagctggaggcgtggcttccggacgtgcggggcgaggctcgtctcgtttccgccggcgctccgagtgacgtagggaagcgcgccgcgcacctcatggttccggggacagttagggcggcggatggaggtcagcggtggtgctcgctgcgtaggtcttgtggcacggggagaaggggcggctgatcgtgggtttcgagtgcacaacacaggcgtggctgggaaggtcctgggatgcggtggaactggggagcaggctgggacgcggtgggatg

SEQ ID NO: 38166 - DNA, 2300 bp, Homo sapien
tgcaccgtggaaggggcaggtccctctctcccatggctcagctcctcacagcctgtgttaaacccacctgccctgcagaggccatgggcaccactgggcacagagaggagaagtgagggccctgccttagagggacctaggggcagtagacacaactccctgggagtttgttggggcatggttggttccatggaggagaggtgttggaacccaactctgtagaatggccagggcttccccactgcagagccagggtggggagtccaggaaagggagcattgctccctggtgcaggcttgggggaactggctgcccccctcccacctgacaaccccatcctactgttccagcctgcaagctatgtgcaaccgcctttggggctgtgggaccgagtggagactaagactctcctggagagagctgtagggccgagtctgtgtgggatgtgggtggacacctgggcctggaccatcctcttggtttgtcttggctggtgtagggtgtgcgtgtgtgtaagccagccccctgctgccctggtcagcttgttttatgacccctggcctgtgggcagaaggcctggctgtgggcaccatcagtctcactagaggctctgtggccacccctacacctgctgcccacccctcaggcagaaggcaggacaaatgatcaattttaattagttttgactcctttgaattaattctggctgtaatcagaatttcttcagtaaaaaagcacagaaagttcttctcccgaataagggtcttgttaaataaagtgggtctttctaagccaggagaagttcagctcagctcctgggaaggtagcagtacctacggctcagaggagtggagggcccatccatgtaggagcctgggcctgtgccccaacctcagaccagcatgtgcccccaggggtggtgggtgggccctggagggcagagaggtgcctctagctggctctcggaagtcctgaccagtgacaattcttaagacaccattaagtgtccactggagccagggcctgtgctaggggctgagggtgacagaggtgacccatctggccaagtgacctgtggctggagaaactgaggccctccttcgcctcagggaccctgacactcttcaaggccaggtctttggtggtgccagatactctcctgtcccttggtttgcttgtggcttggttcttggtgtgtgatacgtctctgtgtgtgtagttgccacaccctccagtctctctcatacacactgtttcccaagcatacactcacaaacacaccttgtctcagactcaaacacacacatgccacacacacaccatacatcacacactccatgcacacacatgcatctacacacaccccacatgcacatcacacacacgtactccatgaacaacacacacacgcacacacacagacgcacacacacacaccccccaacctcttttatgcactttcctgacctttggagacctggctcctagatgtatctctgctcaaagttcccctccctgcctgggggcagctctggactctggtctactttcggccagggcacacctagcccactcccaggtccaccttcctccagtctacccccagactcctctaggccatcatcagccagcgcttcatcctcacctcagctccctccccggtctacccccaccctctgcccctgagcctggacggaagttccccaagtctctccagcctgcatcccagcccaccgtcagccggcccccacgctcaccccagctcacctcccagtctgcccctacaatctgctcccaaaaagctcctttgcagctcagcaccccagccccgccctcagagcccatcagccggcaccccaccttaccccagcttgtccccagctcgaaaccctgccctcgcccccctctcaccccgctgagactccagccgcccccatccctcccacccggcgcgcctgcagggactgcaccccacatctggaggcaacggggcacggccgcaggcgtggtctgggggtgcggcctgagggcggaccccctgaggccccgccccaccccaaccccaaccgggcgtcccccagccgcgcccccagcgggaccgagcgtgacccagctgcggccggccagccatggagactggagcgctgcggcgcccgcaacttctcccgttgctgctgctgctctgcggtaagggggcgacggcccgcaccgggggcgcccccactcctcggggttcaccggacccgggtggacccgcgccttcccgcacctgcgccgcggtccttcccttgccccggagc

SEQ ID NO: 38167 - DNA, 2300 bp, Homo sapien
taaagagacagactcttattaaaagagaagtcacccaggctggagtgtaagatcatggttcactgcagcctcaaactcctgggctcaagtaatcctcccactttagcctcccttaaaactcatttgccgctgggactaaagatatgtaccatcactttcagctaatttttaaatttttgttgagatgaggcttccttatgttgctcaggctgctctcatgttcctggactcaagtgatccccctgccttggcctcccaaagtgcggagattacaggcatgagccactgcacctgtctgaatgtcattttttgagtgaggacaaagttgagagccaaaacaggtaaaagaaggtgccatttatttgtaaactttgcacccagattaactttatcatactttttcattttcatgtagtttgatcctttttggatattattcagcttttctttaataaattgttaggatccaaaaatataccacaccagttaacaagaaaatcttcacttcaatcttaacacttgaaaagaaaaatcttgcagactttgctcctatttggggataagcaggggactagtggatagaagaaggtgctttctcaagtcagtgacagaggttgggccatgccatcttttcagagccagtgctgccctctgagggcttcagctcaaagaggggaggaaggcaaatgaacagaaaatgaggctacagagtggtgggtatgaattttcacggaagactgggactggggagaaagcaacgagctgtgccagaaggagccagaaaggtttcagaaaggatgttctgttggggatgctattccaggaggagggaccagctgtcatcaagtgtctgctgggggcctttggtgtgagctactggggacatgggatgggaaagtgcccctactctagacaaagcctagaggtgtcatcatctgcaactattaagttgaagcatatgaaagagctgacatgtgacaactttggcccttttacaaaaacggcaattttgtatggttcaacctgataccaattccagataaaatggaaatgcctcaaattctaacctttgttccgtataacaacacgtggaatccctgagagttaatggaatccctggggcatttctaaaatagaccaatgcctgggcgagatcccttaaatcctggtttctgggagtggggccttctgcagggggcctagcctcctggtctccattatttcatgggatcccagttcctggtctatccatattgaggggacgagaagcagccgggataacggaggaggcaggggttcttgcagtggctactcctctctaggcctcctggagggagctgatcatgagagatcctcactgtaagggggatgcaggcagcccaggggccgtctgagcaccaaatgacatcatgtacttgaagcaccagcacaaagttgtctccctcatagtgaatgaatgtaagcagtggaattcgactcgcgggttttaacccccatgggccagcgtccttccctcccaattgtcctgctagaagaaaacgtttcgctctctctcgggtatccagctaatcgttaaggcaaacagcagcgccccttttcctttcatctcttgccccatttctgcacctacagcctcacaccttcttcccgggacacagcactgccaggagcccatcctggttcagttcagtacccaggaggaatccctcgggccgactcccaggactttgtttcttggacttcaccaccgccgcctccccagcacagctcccgcagcccgcacccgcccacagggtctccgcgaccctagagcttagggaagaattgccgaggggcggggggtccctcatgcgcatggaagggacgtacgccccaggcctccaccttcctcctgaccccggggattcttggacgtcgattctccgtctcgtaggggcgagggccctgggttcgcagtcagacgcgggcccctctcaaatctagtggcctggttttattgagtgggggaaggcacatattttccaagattaactgccccgcaacagggaatttcgcaggatttcagtattttcgactccccaggtgacgccaagagggtgggttccactgtgcacggtggggaaactgaggctcggaggggacaaggaaggtactcgaggtcacgcggctcctccggcgggcgggaacgcaggacgcggagttggggcgcgggctgtgcgcgcccaggttcgcggctcccggggctcggctgtcgcagcgcggtcgccgccgaggaccacggtcggggcgcgggcgggctc

SEQ ID NO: 38168 - DNA, 2300 bp, Homo sapien
cacaaatgtagtatacaaatgaaaataattactgtgttaaacacagtttcatagaaaataaaagaccaatcaaatacaataagctgcctttttagatgggtatgttattcttcttttacagctaaagaaacaggctcagagaatgttatttgattggaccgtgttgcatctctggacagtgcagctgaaatcagactgtgtgtgtaactccactagcctaccagggtgcctctcataaagttagtaagaaatgtaaatttggcctaatatacaaagttgccagggcagcactgggtcaattctacatacaatacttctatgttcatcaagggaaaccttaagggaaagtgaaaatgcttttagaaggcgactggacaccagcgcctttgcttgttgcctttgggctcttcttctaaggccaacagtgacctgaaattattgactgacttttccaatcaggtggacaaaatggtaccaaggtcgccaacatcagacaaattcacttgagggccttatctgtgtgctttgaaagacaaaactgcttttgtaaaggatactttacaaaaacataatcacattaataactagtaacactgtaaaatgctgacgtgttgaatgctactttagaaaaacatgttcaaatttagggaaaaaatttgatacaaaactacctatcaattatctagctagctagctagctatctcgagacatgctttcattctattgctcaggatgggaagcagtgggattaccatagctcactgcagccttgagctcctggcctcaagtgatcctcctgcctcagcctcctaactagctagggccacaggtggacacagttacgcctgggtttttgtttgtttgttttgtagagacagggtttcactacattgcccaggctggtgtcaaactttggagtctcgctgtgtcgcccaggctggggtgcagtggtgcgatctcggcccaatgcaacctccgcctccccagttcaagtaattctcctttaccagcctcccaagtagctgggactacaggcatgcgccaccacgcccggctaatttttgtattttttgtagagactgggtttcaccatggccaggctggtctccaactcctgacctcaggtgatccacccacctcggcctcccaaagtgttgggattacaggcgtcagccactgagcctggcggagcactttcttatgttattaagtagcctaacccaggtggggcgcggtccctcatgcctgtaatcccgacaactctgatggccaaggtgagaagatcgcttcaactcaggagttcgaaactggcccgggcaacatagcgaggccctccccctatctctagaaaaaaatacgaaaattaggccaggtgcgcaccgcgcccggctaatttttgtatcttttgtagagacggggtttcgtcatgttgcccaagctggtctcgaactcctgagcccaagccatccatcctcccgcctcggcctcccaaagtgctgggattacagtagggcccagccagcctcatgttttatttagtagtccctccctgttgcacacttggatagatttttaatttttttagacagggtttacctcaatctcgcaggctggaatgctgtggtgggatcatagctcactggagccttgaacctttgggttcaagtagctgggggtctgaggtaggactacagagatggggttgcgccatgttgctaggctgctcttggcctgaagggtcctcccgcctcggccacgccagacatagttttctatttttgaccaacataaacactgtgctgggtctgaatttttcagctacccttcttcagccggcaacacacaggacctggcggggaggtcactgttattagtccccactctgatgagaagactgcccagctccaggtactgtagcgccccagtgacgtaggcgaacacccgctcctgtggcgtcgcggaaggcccacctctatggtgtcggcgaagacgcgcccttgtgacgtcacggaaggcgcgctcttgtgacttcgcaggagaccgccactcacgcggagccaatcggaactcgcggcggggttgctgggtcttccaggatcgcgcattagcggacgctggctacgggtggccgggcgggatgtaaccggctgctgagctggcagttctgtgtccccaggcttcggcccggccgccgccgcacataaactgcgaggaggagctttacgacttctcggtcttcggggccgggcgcagcaagggccagactctgcgctagcaggcgctgcgcgccaaccggccg

SEQ ID NO: 38169 - DNA, 2300 bp, Homo sapien
agtgcaatggcatgatcttggctcactgcaacctctgcctcctgggttcaagcgattctcctgcctcagcctcctgagtagctgggattgcaggtgactgacaccatgcctggataatttttgtatttttagtagagatggggttttgccatgttggtcagtctggtctcgaattcctgatctctggtgatccgcccaccttggcctcccaaagtgttgggattacaggcatgagccactgagcctggccccttggttattctttagattgataatgtaacagacagtgtaaatacatctacaaattcagaaggttaagaaagggtatgcaaggaaaaccggtctgtccctcagtcacatttttcaccaccacccacaagaaggcattgctatcaatttatgtattcctcccaaaacattcaataaatgtagaatcagttgcatacattcatcttgcttttattgtacacaaacagtaccacactctgtactttctcatttgtacttagctaggagattttacttcagttgaatcactttacttttagagatttttctctataagaaaatcagagttgctctttcttgttgatagctgtctatcttccagtggaaggatgccccaggatttatgtatccagcacctagagatgggcatttaggttacttgcagtatggcttccagatagggattggttcgcgtattttttcacataagtttaaaatgatctctcacgtctgtctcatcatctgtaggataaacagctgagggtggcattgttagcacagaccattctacctccagcttcagaatttcagggtagttattattttcacctgcccttacaccttccctgaagggagcagcagggatcatttccttgaatgtaagaatgactgtcacttgaggtgattcagcaatgctctactgttttagagtgttttagccagattacagagaaaggcatttacttagggcttgcttacagtaaacaggactgtatgggcatcagaaatgtgaattcttgttcaggatccaccgttatagcctctgtgactttgacctggcaatagccttccttctctggcctcagtgttctcctctataaagcaaggggctggacaagccatctccagtttcccagtttggcaacaccactcctaaaggatctgaagggacaacaggaggcccaggcctggaggtagggtagccctgagcctgtgcctagaatgggaggcaaagatggtggcaggtgggtgggaaaatgtggggtttgggggtcacaggagagaccaaggggcaggcctggagcatggcacgctccctgatcacagctctccactggaaggccatggagggagtgatggggagagcctgcaactcctggagataagcctgattctgactttctttgaaggatttttttctttcgacttctttcctgtgaaagagaatatccgagaaatgagaattttaactaaagagaaaacctttgcatttgctactgataaatatctggcctatgcgggaaagtcatgggtgccctgggattctggctccactgctaacaagaccttgttagaccttcttaactgcccctccagagaggagaaaggctcttggaggtagagtgagattggggagcttggcagagccctaggatgaactgtgtttttgttttgttttgttgcaggttggagcctttttcctgcagaaagagaagcaattccgggcttttccacagataacctgctagggctcgcagagacctggattctaaccccatctcgcctttcctcacctggggcattgttttctgcgtttgagaactgctgggtgggctggtgttacccaggatttttaaatttttgcaggagacgctttgcaggagatctctagggcttttttctgtgtcaattaaagagcctggccagctggacctgggctgtctttttgacaaaaacaaacgtcatccccctcccagctgagcacttgttagaactggactttaactgagggcctgaaccccctaacaacgggacaaacagtatgaaatcaaaaccgtttaccctcctcccaccagcggtttgcgtagggccttgggtgcactagcaaaacaaacttattttgaacactcagctcctagcgtgcggcgctgccaatcattaacctcctggtgcaagtggcgcggcctgtgccctttataaggtgcgcgctgtgtccagcgagcatcggccaccgccatcccatccagcgagcatctgccgccgcgccgccgccaccctcccagagagcactg

SEQ ID NO: 38170 - DNA, 2300 bp, Homo sapien
ttctccaactgcaatgcgagggaaaaaagaagagaaccaagaataaaacaaattttttaatcctttccaaaaagacattgtttctgatcttcccctgtccactctccagatgataaagctgaataaaaagtgctacactaaccagtggtcagtccaggctctgctgcaacattgcactaaccagaactgcagacctgggacctcaagaattgcatttgatgccgaacccagctctaatttcagagtcaaggtctctgcgagtatttaaggaacggatgtaaacctgggggattcgttttgtttccttcaattttccaatgaaatcagagatcctgttcttgggtgtcaacgcagatactagaaggaggtgatacaagagaaaggaaacagcaagcgacgattatggcacggtttcctgtaaacaaggttgagtgtagccacagcctgagcactgtgggagaagagctcataagaaaatgacggtgctgggccttcgtcaccccggggcactccattgttcttgtctttggtctctttttatttgtagaggtccaattatttatttatttagtacaagagggaacgaaattgatctttccattctaaaaggagagtatatatgtataaaaggaagctgtatagatatgggggaagaggtggacagggggaaaaggggagaggacgagagagagaaagggagggagagggacaaggagagacactgggcgagagatcgattaggagagacagaaatgatgaatgaagattaacttcacccaaggcttcgtgctggaggggaatggaggagctcctgatttgctattactactccaaactgcaaagggctccttcaagtcacctatccacctcctaaggcaagcgtccaatttcaacagcgttcaggaaagtctcctcccgcggaggtctcaccgcttcccactccacccccacaaactctttggaaaagtgccttgaaaaatttaatcctcaatccaatcctggaccaccagcgtcctctgttggtcaccgaagggagggggtgcgcagacaaaactgaagaaactcgagtgccagagaaggccgacaggagttacagcgacctcagcgcgcaattgcgcccccgaactttactgaaaagtgtttagattgcagagataagctagaatcccaacgcatcgagaatacagtaatacgaagtcgccttcaaaaaatgacaatgaaaattgcctattaaaggactatttggttaattacgtttcagcagtgcccagtttattgtctttattattcttttgtcatgggtgtaaactccatttgaaaacataatcagggagaatacccaagacaagaagaacagttgtcatttaaaatatttgaaaagccctgccttaaggacgcattcgcttgccggtccactcttaattggagacttgcggtgtagcaacacgtgagagtcttcttgcgttgagaagtaagcctggaaaggggcgaaggccccgggcgcatcttcagatgcgtatttgtgggcccctggggatataaacagcccagcgggtgtaaattaaaccccgcagtgccttggctccctgagacccaaatgtaagtcagaaatgtcccaagacttcgcctgccaacggaattaaattttagaaagctccacgaggtacacacgaatgcggagcgctgtatgccagtttccccgacaccggctcgccgcagggagacctcaccccgagagcggaaggggtaagggcggcggggtcaaggagatcgggggtgctgagttggccaggagtgactggggtgaccgggggtgctgaggtggcctggagtgccggggtggccgggcacaccttggttcttgtagacgacaaggtgacccgggctccgggcgtgcgcacgaggagcaggtgcccgggcgagtctcgagctgcacgcccccgagctcggccccggctgctcagggcgaagcacgggcccccgcagccgtgcctgcgccgacccgcccccctcccaacccccactcctgggcgcgccgttccggggcgtgtcctgggccaccccggcttctatatagcggccggcgcgcccgggccgcccagatgcgagcactgcggctgggcgctgaggatcagccgcttcctgcctggattccacagcttcgcgccgtgtactgtcgccccatccctgcgcgcccagcctgccaagcagcgtgccccggttgcaggcgtcatgcagcgggcgcgacccacgctctgggccgctgcgctgactctgctggtgctgctccgcgggccgcc

SEQ ID NO: 38171 - DNA, 2300 bp, Homo sapien
ggccaggctggtcttgaattcctgacctcaggtgatccacctgcctcggcctcccaaagtgttgagattacaggcgtgagccaccgcgcctggccgagatggttttcaattacaaattaaaatatatgtatatgaaatttagcttatctgttgattcattttgtgtgcctagatttttacagtttgtttaattgagatgtaattcacaaactataaaatttatccttttatagtgtacaattcagtacaatgtagtgtgttttcgtatattcacccttggtctatttgtgcaggctgtcaggggaccagagctctgagaccagttgccttcagctgcagtcatccttgtttgtttattcttgtgttctcacaaatattagcatttcctatttataatttaaagtgtaaaaggctgggagtgtcactctaaacctcctccaaagtgccttcccactctgcgtctccatgtctccatggacctgtgtttcctgccttctggttgatttctctttctgctgtgccttcatggcattgtgtgtggtgccacattgcaggtgaaggagtaatgacctgggctgacccaagtacactgataaaaacaagtaggcaaaacctagtgaagatgcagattcccaagctgctgtgatctacccaccccactactcagtctacactgagggaagttccagtgcagacacgtaaggagacacacaagtgaatgcacgagggaagttccagtgcagacacgtaaggagacacacaagtgaatgcacagtacagcatggtctgcaagagcatgcatcccttagtaagcagagagctctcttcagacactggcagactgtgccataaacaagaggaatgaaccagcataggtatcacaatgggtacatttgagaaacatcaaataagcaagaaaagcaagttattgaatatgttcattatatcaaagacagtaggggtggaaaacaatagtctatgttgttacggagagatgcaaagtcttcaaagaaggggaacatgcatgtcaaagctgcaaagtaattttgggaaggtggtcacctttgtggagggtaggagaggaatgggtcatgtagggcatccaggaatataactggtgtgccacacattgtaatgaaacaatgacatcatggcagaaggtttgatgaattgcaggctgggttctggtcacacaggcacttgttgtgctacttttttttttttaaactttttttggaaacattaaaaaacaaaactaagcaatgaactgaagggctccatgtcaagcacttagtcctcgtcccagcacatgaagctcccattgaacttgaactgctcactgcatcttcccagacctcctagaagttcatgatttcacagatgagagacaggagtgctgcagggttgtgtggagggtctaaggttgcacacagagtcacaggcaaaaccagatgtgacccacgtctctctgaagccagagtgggaccctcaacaccactctggtccacaggttcttgggatgctcctgaggctgagggaccaaataatgggtgacatcagtccctctcatggccagccctctgggattgtctaaccagggtgagtggttaacagcaggcactgccatcccctgaatggggctgtgctgttttcttagtcccaggcgtgcatctgctaaacagcagcagggcgtttgcctccggctattgtgcaacatgatcttgattcctcttttaaggggagcttttaagacgagcttactcatgtcagccaaagcccagcatcaggctgaaccacgacaagcccctctggacaaacctgccagggcagctcagagaatcagtccccagcctcggtggcacttggtgcagacctgccaagtgtcccacaaaagctgggagccttgtgatgtcccccactgcccacatggcctccaacctctgtgttctccccaggatctgagggcccgattcatgtctggtcccctagcaactggtgcgcggccctggacaagtcattccctcttaaaatgctctggtttctttgttgtgtaatgaatgggtgcagtcagcagactcttgggtctctaccaccttcagtattttatggtgaggagcaagcaagcaagaaaggttattagcaagcaggaagcacagaggaaggtggtgtgtgtgttttgtgtgtactgtgtgtgtatggtatgtggttatgagctgtgtgtgctgtggtgatctatgggtgttgtgtggatgggatgcgtagaatgtgtgtgttgtggtgtatgttgtatgttgtggtgt

SEQ ID NO: 38172 - DNA, 2300 bp, Homo sapien
agagaagaatcaaatagacacaataaaaagtgataaaggggatatgaccaccgatcccacagaaatacaaactaccaccagataatactataaacacctctacacaaatagcctagaaaatctagaagaaatggataaattcgtggacacatacaccttcccaagactaaaccaggaagaagttgaatctctgaatagaccagtaacaggctctgaaattgaggcaataattaacagcctactaaccaaaaaaagtccaggaccacagggattccagacgaattcaccagaggtacaaaaatgagctgctaccattccttctgaaatgattccaatcaatagaaaaagagggaatcctctataactcattttatgaggccagcatcatcctgataccaaagcctggtagagacactacaaagaaagagaattttagacgaatatccctgatgaacattgatgcaaaaatcctcaataaaatactggcaaactgaattctgcagtacatcaaaaagcttatccaccacgatcaagtcagcttcatccttgggatgcaaggctggttcaacatatgcaaatcaataaacctactccatcacataaacagatccaatgacaaaaaccacatgattatctcaatagatgcagaaaaggccttcgacaaaattcaacaacccttcatgctaaaatctctaaataaactaggtattgatggaatgtacctcaaaataataagagccatttatgacaaacccacagccaaattcatactgaatgggcaaaaactgaaagcattccctttcaaaaccggcataagaaaaggatgccctctctcaccactcctattcaacatagtgttggaagttctggccagggcaatcaggcaagagaaagaaaaaaagggtattcaattaggaaaagaggaagtcaaattgtccctgtttgcagatgacaaaacctccttaaactgacaagtaacttcagcaaagtctcaggatacaaaatcgatgtggaaaattcacaagcattcctatacagcaataacagacaaacagaaagccaaatcatgaatgaactcccattcacaattgctacaaagataataaaatacataggaatccaacatacaagggatgtgaaaaacctcttcaaggagaactacaaaccactgctcaacaaaataaaagaggatacaaacaaatggaagaacattccatgctcatggataggaagaatcaatatcgtgaaaatggccatactgcctaaggtaatttatagattcaatgccatccccatcaagctgccaatgactttcttcacagaactgcaaaaaactactttaaagttcatatggaaccaaaaaagagcccgtattgccaagacaatcctaatcaaaaagaacaaagttggaggcatccatcacactacctgacttcaaagtatactacaaggctacagtaaccaaaacaacaaggtgctggtaccaaaacaggtatatagaccaatggaacagaacagaggcctcagaaataacaccatacatctacaatcatctgatctttcacaaactgacaaaaactagaaatggggcaaggattccctatttaataaatggtgctggaaaaaactgcctagccatatatagaaagctgaaactagatcccttcttttcatcttatacaaaaattaattcaagatggattaaagacttaaatgttagacctaaaaccataaaaaccctagaagaaaacctagacaataccattcaggacataggcatgggcaaggacttcataactagaacacaaaaagcaatggcaacaaaagccaaaatagacaaatgagatctaattaaacgaaagagcttctgcacggcaaaagaaactaccatcagagtgaacaggcaacctacagaatgggagaaaatctttgcaatctacccatctgacaaagggctaatatccagaatctacaaggaacttaaacaaatttgcaagaaagaaaataaccccatcaaaaagtgggcaaaggatatgaacagacacttctcaaaagaagatgtttatgcagccaatagacacatgaaaaatgctcatcatctgagttcatgtcctttgtagggacatggatgaagctggaaaccatcattctcagcaaactatcgcaaggacaaaaaaccaaacaccgcatgttctcactcataggtgggaattgaacaatgagaacacatggacacaggaaggggaacatcacacaccggggactgttgtggggtggggggaggggggagggagagcatt

SEQ ID NO: 38173 - DNA, 2300 bp, Homo sapien
taaactgttgcattcaatttgctaatattttgttatctatgttctgtctatttacaggtttttatatttacgttcgtgagaaatattggcctatagctttccttttctgtaatgtctctgcttgattttgttttcagactaatgcagtcttcatagaattaattactaagcaaattactctcttgtattttttaaaagagattgaataatatttgtataatttattggtgagtatttcacatgagattgagaaaagtctgtactatgctgttgttgaatgaagtgttttatagatatcaattaggttcaattgattggtggtggtgttcatttcaactctgtccttacatattttcggcttgctgggtctgttaattataaatggagagtcatcgaagatttaactaaaacagtagagttgtctatttctccctgtagttctgtttacacttaaagtattttgaggctatgttgttaggtgcatacacattgaggattgttatgacttattggccactatattagtttgttttcacactgctataaaaaaactacctgagactgggtaatttattaagaaaagagatttaattgactcacagttccacaggcttaacaggaagcatgactgggaggcctcaggaaacttacaatcatggtgaaaggtgaagaggaaacaagcacatcttaccatggtggagcaggagagagagagagagtgagaggggaaatgccacacacttttaaaccatcagattttataataactcactatcatgagaacagcatggggtacactgctcccatgatccaatcacctcccaccaggtcccctcgaccccccacaagtggggattatagttcaagatgagatttttatggggacacagagtgaaaccatatcaactactttatcattatgtaatgtccctcttcatttctgttaattttcctttctctgaagtctgctttgtttgaaacttatatagctactcatgatttcttttgattattgtaatcatagtatgtttttccttatgcctttacttttaacccttttgtgtctctatattcttatggacaacatatagttggcttttgtttttctattcacttttaaagtttctaccttttagttggtatatttaattgatatattagaccattcacatttactgtgattaatgatatagttggattaatgtctacattacctgtaactgttttctatttgttgcccttgttctttgtttgtatcttatttttttggtcttctattcttttctgccttctttggttttacctgagggtttcatatgattccattatcgattctcttttaccataccaattataacttaatatattattttattttgtttgttttatatttcattttacttgttgccctagcatttgcaatatacatttgtaattaatctaactccactcttgaataatgctataatttgagagcatgcattatctactgataattaatgctgcattatctactgatgtttagataatgcagataccctgtaactgtatattcctaattttttctcctgttccttatagtatttctatcactcattttacttatctatgctataattagctagtacattgttgctaatattattttgaaaaaaactattttctcttacactaattaagaataagacaaaatattttagtttgtcttgattttttttttgttttttttttgagacagggtcttagtctgttgcccaggctggagtgcagtggcacaatctcggctcactgtaacctctgctttcccgggctcaagtgattctccagcttcagcctcctgactagctgggactataggcacaagccaccaatgccagggtaatttttatatttttgtaaagacagggttttgccatattgcccaggctggtcttgaactcctgagctcaaaccagtctgcctgccttggcctcccaaagtgctgagattacaggcatgagtcaccacaccaggccctttcttgatttttttaaaaaaatgctctttctttattaatgtagatacaagtttctaacctgcatcattttcctcctctgaagaaggtattttaacatatcatgaaaggcaggcctcctggtgacaaattctctcaacttttatctgaaaacatctttatttcttcatttctgaaggataattttactggatatggaatttcaagtgggtgtcttttctttcaatagtgtaaatattttaccccactcctctttctgctcacgtgatttccagaaagaattcta

SEQ ID NO: 38174 - DNA, 2300 bp, Homo sapien
ttgctcccaccacacatgggaattatgggagctacaattcaagatgagatttgggtggggacagagccaaaccatatcaccaagtgatcatcaaaaatagtgggctcaattcctcagagtgtcttcagctataaacaatatggcctttgcggtggatagaaaggatggtccagcaactcacaagtcaccctgcactgtgacacccagggacatcctagcccatctgtgggcttgtgtgtcaatgcaccctgtggcacacctgtcagaccacctgccagcacaccttccagtgcacctgccaacacatctgccagaacgtctaccaacatacctgccaaaccacctgccaacacatctgtctgtgcacctgccaacacacctgccaataggcatggcccttgctggttctgaaaagtcagacttaaaggcaaagagaaaatggagctgcttcccagggctgcctaccccaggaggacacggccgagggagacaacactacccagcgcgtaccgtgcatccgagtgctgagatgtgttgctgtagactgtgggaaaacactctttttctgttaagtgaaactttagaggcctttaaccacggaattaagacacccacatgctcacatagagggacatgtatacagtagacaaggggcaagtgagtgagggcagttctgttcctcaggaggaagcctactcagcctttgggcaggagaggccctggtttacttcagtgaatgagcttcaggctaaggctggatgtcttggaacacctcaatttcacccatgccccaaagtcacacgtgcacttatgcttgaactgcagggtcacaggctagaagggaaagaagggttgttatggagcccagttgtttttcttctcccaagaggagatggtcagggacaagacccacagctctcccttggcagcatggggagccaggacacaggtgaggccgggccacttttggctttttccagcctgttctctgagctcactgcaagccattccttctcttggcaaccaggatttgaggacacatgcttccctcatggttgtttctcaagggcctctgggctccttacctataacagtagttgggtttcatattaatgtgactgttgtccatacccaccctgagaccagagaaggtgccttgggctccacctgggacacgagggtttaatactgctgcagggcgaatagaaagctccctctggctggtgggaaggcaaagccacaccaggcgggtctgctttgctctagtaactcgcttattctctgccttgacatgggagtaagtgcatccttggagcactcactgttcatgttttcagaattaggggcaaaggccatctgccttacatgcacccagcataggccacatgcgcaagttgttcataaacccagtctgcacatcagcaactgcctgtgtgttaacaggacacacctgtcccaatagttgcaactaacatgtgtctcccttggtgtcttccagcctgcaatgtgtggtacttgaactctgtggagatggagtccctcaccggccaccaggcgatccagaaggccctgagcatcaccctggtccaggagcctccacctgtgtccacagttgtgcacttcaaggtgtcagcccagggcatcaccctgacagacaatcagaggaagtgagtgcctagagggaggcaggagccgtccagcaggggcggggctgtcacgttcctcttgttcttccctagtgtgagtagtcatccaggtaaatcattagccgtctttgaggtcatgagtcacccagggtctgtctaggtatttttctgtcattaaatacgtcctgggaaccacataggaactcttagcatttgtttgcaaggctatttttcttagaaatcagtaaaataaaataaaaaaagacgtttggcgttttaaaattacacacatacacacataattgcaaatgcaaaaaatcttttaactcagttccttaaaaacactctgatactatgatcagagtccaatgatcttggaacctattgttttaacagagggtcatttcctttcaggtgagcgtatgaccttgatatgtactatttccgttggccaatttcaaatgacttacgcctgagctgttactgagccagttatgctggagcagatgttctccatgtggatctttactgaatgcccagcataagcatggaacagagcagccacagggctgttcctgtctccctccctccagaatgccatccctgagtgcagcctgtggcctaggaacagagcatttcagatgcaattatttt

SEQ ID NO: 38175 - DNA, 2300 bp, Homo sapien
gcatagactctgtacccatgaatgttccattgctagtgaaatacgtgtgtcacgtggtgtggttttagctgtctttccgtactcgtaagtggttggtaatttccagtagtctttgtggtatccgttaatcaactggttcatctagcaagcatggattgaggactgatggtgtatctggcagataaaggagatggggcagagggatcatgctgcgaggaggaggggacccacagtgaaccaacggcctggctgcgggggatgaatgtgggtggcatccctgcctagtgctgtgggacaagacgggagggcatttctactcccgagggcacacgtgtatgtggccacaggtgctggctaagggctaggaaaaggcttcccagtgggtgcacagctgagctgcgtcttaaaggacgaaagggccttgacccggtgaagatgcaggagggaaggcgcaggggccgagggagcagcatctgcgcatgtggaggccttcatggggcggctcccctgggtgccctcatgcgggctgcagcatccaggcatgaaatgggggcttgaaaggcaggcagcgtgagctcagagagggccttagtgtacatattttggaaaatacctcctgtgctgcctggagggcctcagcacccacttccccatccctgtcttcccgtgtgggtgacgcttgctggtcttcaggtgtctctttgtaccttacatgctgtcttggtcggcttgtcttttgaacagctcctcttctgcagaacgccagtgggtggagagcagccccaagcccatggtttccctgctggggagcggccggcccaccggaagtcccctcagcgctgagttctccggtaccaggaaggactccccagtgctgtcctgcttcccgccgtcagagctccaggctcctttccacagccatgagctgtccctagcagagccaccggactccctggcgcctcccagcagccaggccttcctgggcttcggcaccgccccagtgggaagtggccttccgcccgaggaggacctgggggccttgctggccaattctcatggagcgtcaccgacccccagcatcccgctgacagcgacaggggctgccgacaatggcttcctgtcccacaactttctcacggtggcgcctggacacagcagccaccacagtccaggcctgcagggccagggtgtgaccctgcccgggcagccacccctccctgagaagaagcgggcctcggagggggatcgttctttgggctcagtctctccctcctccagtggcttctccagcccgcacagcgggagcaccatcagtatccccttcccaaatgtccttcccgacttttccaaggcttcagaagcggcctcacctctgccaggtaggtgtgtttccagctggttggaagggcccctctgtccattcactggggaagggaagggttcagacctgcagctgagctggcatatctctagtgctgggctgggcacctggagaggaaatccagagccgttggggtacttttccattttcctcgtccaaaaccaagcactggctcaggcttttcattcactcttcttggcttctgtgtttggccaccttggattccttccagttgtagaaagtgcagacatttgcagtggttctactttccatgtcacttgggaacatggctttttgtaaataacaaattccttgtcaaattaaattaattcatccaaaacgtcattatgaaatatttcaagtgtataagaagcagtgtggtctatgggttgaacaacaccaaccttaccctctctttcctcactaccttcctatgtattcttaaaatgtattgcaaaggctcaatccaagcatcctgttgttctgttttgtgttataaaacagtcactgcctcctccaactcagtcatttcaaaggcagggttccctttccttagaacatcgctcgcttgcttgcccttggcatgggatttggacttctgggatcacagcagatgagaggttgcaagaagaaaagtgcccatcatggtcactgtttttaaattttgctttacagatagtccaggtgataaacttgtgatcgtgaaatttgttcaagacacttccaagttctggtacaaggcggatatttcaagagaacaaggtatgtggggaggatgagggcctccttgggcatctgccctagtgcccgcttcgctgccttgtgtgaagatgggccctgcggtgggaacatcgggcagccgtggccttcatatggattgagtttgagcagggcccacacgttattccatgcctcctgg

SEQ ID NO: 38176 - DNA, 2300 bp, Homo sapien
gctgggattacaggcgtgagtcactgcgcccggcctcggtcatttgcttctatcagtagggactcaaagagtcttggatttgtattgtattcaatgggtcataatccaatattatcactattttgatctccaagttgtttacagtttgcctggtgggagcctcttcaggctggcccctgtgtctttttgttaaaaaacccattgttctgtgagcactgtcttactttctggccaaaaagaagagatttcaggctcattggggggtgactgttggtattggagcctccgcaccctccaaggacagatctgggagtatctctgtgtgtgtgtgcatgtgtgtgtgtgcactggttcgtatacacacattcacatctactttgatttctagatgtatctacgtctctagattggaaactctgagtcacaccaatatctgattcctgtctcccaacacagggcttactataatgtcccccattctagactagcaagctcctcccgaaggtgcctcccatttttcttctcacagatccttatgctcaatcatcctgtgcatgaccaatctcccgtcacctctccactgctatggccgtcctctcccctgtacatttatctgtgtttctagggctgttgcccgaggctgaggttctcttacctagagtttccatgtccactcctgctttctcccgagtgtcctcccaggactgccaggggtcctccaggatgaacatacacctgtgatgctttttcctttttgccagttagagccccctgtgacgttggagtccagcccagctcggtactggggcctccttccttgtgactgctttgtgcaatcctgctcaccaccctgtacttgcttcttgagccctgtctaccctcagtgtcccaacacagctgtgcattagccacccagcctttggccagttcaccaaaaatacggcgctttaccacccttgcctctcctcacctcttttcctgtctggaaagtgtctgcttctgcttcaagtcacaggccattcatggagttcttcccatgatctgtggactccgtgccccctcctaacactgcgtgtagatcgtccctctgggaggggcggggtgagccagccgctgtatttcctctgacatcgagcacacacgttgctcacgtatctgtgggtgaatgcatgatcgtgtgagggaatggactcataggagcagcctccagtttccagtgacaaaacgggcacgagtggcccctcagctctcccccagggaaccttgtacttggtgttaaagtctgactcatggaggggctcatgtccctagttccagctgggtttccaacccaggttgagatgtagcctctcttcctgatggctggtttgctgatgtctgccttagccgtctggaattcatcctccctgggaagaacctcattttgttcctgggaagaacctcattttgttcctgggaagaaccttgttttgttcctgggaagaacctcattttgttcctgggaagaacctcgttttgttcctgggaagaaccttgttttgttcctgggaaccaagtgcagtcagaagctagggtgagacaacctggcgagtaaaaagcacagaggattgtggcaaagcacgaagaaaattggaagctgggcagcagcacagagctcactgtggctttaagatggagtgaggccagtctgccacccaagttttgaggtgagggtctgtgcctggaggagtctgtgccctggcttctgagtcccttcgcatccccagaccctcagctacagcttacttctgggaggactcagaagggtgtggtctgagacaggcagtgaacaccggtgttgatgtggtggaaatacagcaaaggagaatgttttcattcctgcaccagtgtttattgctcctgcttggtgctgtgtgtggaaaatcccagacaaggttaggacttcctattggaggtacaagacttatgaccacactagagggtcagggccccaaccatccttgagtggctcagccatggaggatgattaaccagtctgggaggtcagatggggggcggatcttcaactgagcccaggacagcggttttcagccagaaaggagaatgggaaactgccttgggagaagccccaagtgagcccaagggcgcagagcagaaggaccctggagtgtaagagcctagattgcaagcctggcaggaggaggtcagagtcgggggcagggagaggggctggagaggcggcctgctgatgaatgcggattcgccttaggattgagcactgtttcttgccagtgaaaaat

SEQ ID NO: 38177 - DNA, 2300 bp, Homo sapien
ttgggacactgccagggaatataaccacagacactgcacgaatgagcacccaagtcacagtttttctagaaacaaaggtgtggttggggcatcccattccattgctaccccaacaagggcagtgtggccggtggggccatctggcttgggtgtgggtagcagtttggagagattttagaagaggctccctgacaaagggtcagagaaccccagcactgcactgagttttcctgactgtgagctctcagacaaacaacagtgtcacctcctgtaaatgggtgccctaacactgcaagaagctcaaattcatgttgtcattcagccaacatggtttttggcattatgatggtttctgtgatgcacagaatagcacgtaattggctctgggtgtgaagatcaccacggtcttaatggaagagagggttgagcaaagtgatgatttagtccaattgcacagagtggatggtgtgggcaggcagctgggaagaagttaagagtagcctcaaggccagatagtcctgatccctcccactttcttcgcctgaccaggtgggtgaccttgaacaagttgcctagaatgtcagatcctgtttccttatcaggacaaaggagatcgtaacagtaccagcctcacccccattcctaacccagctggctgtgacctcctccccaccttcccctatggcatcttccctggcaccccttgactcatctcattgactcttgacctggtgtctcctagagtgtaggaaaaatgcctgcctcatctctaggggctggggcatggtgctcatgaagcctttgcctgggaataaatacccagatcagtctggggatgagaaatgacactaccttccagagcacagcaggggttgttcaagtcttccagaaaagcagctcttgtttctcctcatgtggtgggagtggagtcagagcgtggctcaggccccacattctcagctgtttggatctggggactcgaagtttctggtggttacttctgaaagtcttttccaggataattattcttgctcggtttctctgccatctctgacaggctgttttccctgcttcccccgctgccctgaaggggccagaggaacagggcaggaccccagggctgcggatgggttaggcagctctgttcccgaatccaaagcagttcttggtgactgtcctccaagacttgccctggaccctgctccgggtgggattctgagaccgcctgctccacgtggcagatgaaatctaggtctcttctgtgagaggctggcggggaggatgttttcctggaaaggaccacaggacaaaccgctgatgaaatttctcttgtgacctccctggaggaagagcacttctgatttctgcaaactttttccattcccccgatctcacaaatggggaaactgaggctaagcgactgagttcagggccatctgaatctcagggatggacagtcaggatggacaacctataggcctttcctcctctgagaatctctctgctcgggatcgtttttctggtttcccctggcttgcctaaattctgctcatttgtcccggcgcattttaagaagtcatgtgacttctaaagacttccctgacctcctcccttcattagctgggtatttcaggggcttctacggcaccctaggctttccggagcggctgtgctcctttatgtatgcgcgactcccactaggctatgagctacaggagggagggtaggtcttgctcccggagagcaccttaatcacaggcgctgaatgaaagaatgaactggttgtgcaggaaccaggatccgaacccgcctccccaggtactctaacaccggcccggcggaacctgcaagcctccagaccacttggagcctgggctgctcaatgggtctgataattccaggtcctctctgcggccagcgaagggaggtcccagggcgcacctcggcagggcgggggaccccggtgaagggcgcctggaggcgcgctgcattgttagggtgatgaggccaggtgacccgccaggctcggggcgcgggcgcgggggccggccgtggcgattgcccgcgccgcctcgagggggccctgccgcgggcgccggcagccagccaggaggacgggcccgcccgcgcgctactcggagcccagcctcgttgcggccatcgccctgccggaccgcgcctcaggctcccccaggtactggggccggggaaggaggaaacgcggccacgcgccgcggtcctctttgtttcgggcccggcgcgggctttcgcgctccgggcgcaggaacgaggcttgggga

SEQ ID NO: 38178 - DNA, 2300 bp, Homo sapien
ggagtttcttgcccagactcccctgccctctgcttggcatactaggagggagaggccactcttggcatattgctgctttttttttttttcagctaaatgttggagacttttgttttcaaagttgagttttttttggatggctaaggatggaaaaaatgcacattccctttttcagatactggttcatgccctgtttttgtttaatttcttggaaacttgaagttgcagcctgcgaagtggggaggccctgggctggggaagcgaagctctggaaggggcccaggtcccgattggggatccagagaggcttcccttcatgtgcctctagacgaggtgtggggaacccggggaacagccatcccagccaacacagagtgcgtggggatactggagcccggtttttcttctcctttcttgggacactgccagggaatataaccacagacactgcacgaatgagcacccaagtcacagtttttctagaaacaaaggtgtggttggggcatcccattccattgctaccccaacaagggcagtgtggccggtggggccatctggcttgggtgtgggtagcagtttggagagattttagaagaggctccctgacaaagggtcagagaaccccagcactgcactgagttttcctgactgtgagctctcagacaaacaacagtgtcacctcctgtaaatgggtgccctaacactgcaagaagctcaaattcatgttgtcattcagccaacatggtttttggcattatgatggtttctgtgatgcacagaatagcacgtaattggctctgggtgtgaagatcaccacggtcttaatggaagagagggttgagcaaagtgatgatttagtccaattgcacagagtggatggtgtgggcaggcagctgggaagaagttaagagtagcctcaaggccagatagtcctgatccctcccactttcttcgcctgaccaggtgggtgaccttgaacaagttgcctagaatgtcagatcctgtttccttatcaggacaaaggagatcgtaacagtaccagcctcacccccattcctaacccagctggctgtgacctcctccccaccttcccctatggcatcttccctggcaccccttgactcatctcattgactcttgacctggtgtctcctagagtgtaggaaaaatgcctgcctcatctctaggggctggggcatggtgctcatgaagcctttgcctgggaataaatacccagatcagtctggggatgagaaatgacactaccttccagagcacagcaggggttgttcaagtcttccagaaaagcagctcttgtttctcctcatgtggtgggagtggagtcagagcgtggctcaggccccacattctcagctgtttggatctggggactcgaagtttctggtggttacttctgaaagtcttttccaggataattattcttgctcggtttctctgccatctctgacaggctgttttccctgcttcccccgctgccctgaaggggccagaggaacagggcaggaccccagggctgcggatgggttaggcagctctgttcccgaatccaaagcagttcttggtgactgtcctccaagacttgccctggaccctgctccgggtgggattctgagaccgcctgctccacgtggcagatgaaatctaggtctcttctgtgagaggctggcggggaggatgttttcctggaaaggaccacaggacaaaccgctgatgaaatttctcttgtgacctccctggaggaagagcacttctgatttctgcaaactttttccattcccccgatctcacaaatggggaaactgaggctaagcgactgagttcagggccatctgaatctcagggatggacagtcaggatggacaacctataggcctttcctcctctgagaatctctctgctcgggatcgtttttctggtttcccctggcttgcctaaattctgctcatttgtcccggcgcattttaagaagtcatgtgacttctaaagacttccctgacctcctcccttcattagctgggtatttcaggggcttctacggcaccctaggctttccggagcggctgtgctcctttatgtatgcgcgactcccactaggctatgagctacaggagggagggtaggtcttgctcccggagagcaccttaatcacaggcgctgaatgaaagaatgaactggttgtgcaggaaccaggatccgaacccgcctccccaggtactctaacaccggcccggcggaacctgcaagcctccagaccacttggagcctgggctgctcaatgg

SEQ ID NO: 38179 - DNA, 2300 bp, Homo sapien
agtgcccttagaaaagagaccccaaagagctcccttggcccttccaccactgaggatggagcaagaaagtaccatctatgaaccagaaagcaggccctcaccagataccaaatctgctggcaccttgatcttggacttccagcttccagaactgtgagcaatacatttctgttgtctataagccacccaggctatggtattttgttacaacagcctgaaggaacaaagacagtaaaccactggaagaaaaagtctgagtcttagttattcatttgcatccccaaagcctagcatacaagctaagtacaataaatttctgttgaatgagaaattttctgtatatctcaaagctcatctgaagcagctgataaaggtctcaggttttttaaaaagctggagatattggggtacaccaagctacaataattccagctgcagatgtctccaggattaccttgtgggtattccatccatccgtgtgaaggcatcatctcagccagttcctgagcatgtgtctgtctttataaacaaaagcaaataataaagcctaaagtaaacatcttttaaagacttaaatatgactgcttttggataattgaccaacttttctggtctcccatggccaagttgggggataaggatgctaagaaccctcctcatggaccccatctacttccaggccctcctctctccatgctcccacccttggcttcagccctgacaacactgcacagtcctgtctctcccccatatctttacctgctggcacgtccttccccagcttgggatgtgcttcctcccactccactgtgttgagctaacttctagtctcccactgacattttctttttttttttgagacagagtctcactctgttgctgcccaggctggagtgcagtggcacaatctcctgttcactgcaacctctgcttctcgagtagctgggactacaggcatacaccaccacacccagccagtttttgtatttttagtagagacagcttcaccatgttgaccaggctggtctggaactcctgacctcaagtgatccacccaccttggcctcccaaagtgctgggattacagatgtgagccacggtgcccggcccctcctgttgacatttgactgcagcttcccttctcctgccccaggctgacgtccatgtccacctcctgggctcccactgacttgcactgagccgcagattcacccgcatggtggtctacagactcgcctgcacgcaggaggacatcaggcaccttgcttgctgcatggggagaatcacacaggagcccaggagggcagcagctccaggacctggtgtccttcctgtggttcttgttgaacatcttgggctggcttctcatggtgatggagaagcttgtagcagctctggccttcccaccctcacaacaatggccaggggccatagaagatgtgtcctgtccctgatcacacagtcaaggtgaggaaaatatccccagaggccactacagcagacttacctctatttgttcatagcgcgcgaggggctgagtgagccccacaccccgagccacagaaccacaagttcctgaacaaaactgggttatcttagcaaggaacgaagtgatggctgtgagacaggccaccggtggccgcgtcacagagccttggggacagtggagccagccagggtgtggggccaaacagtaatggtaggagaacttgtctcaggcctcggtgcagcccagccagttacccaacaaggcccagggctggcaagaagcaggacttgaaagagggtcatacagggtggggccagagctccgtaaatccccctagggaaggacacatttatttcctactggcgcagcaagttgtgggatcaagaagattgaagaaaaggttccctgtccccctcgcagggtgtgtgatggggttgtggttcactgcttcagtgtcccactgctcaaacctctaggggagtgtacagatgggcaggttgcggggctccgaccccacagcagcctctagggatcaatgtttacagctcctgaagccccagtgggcatgtgttacagggagctcttttagttcagccgtccgtaggcggcttgtgttaatcagctcaattagactcccttccttatcacacggacagagggctttctgtatcctggggtttcttgtcttggtgtaccggaagaattggatcatgggtgggcttggagaatgagtgcaaggttctattgagtagaagtagccctcagcagatgggggagccagaagggagatggtttttgcctgcagtcaggc

SEQ ID NO: 38180 - DNA, 2300 bp, Homo sapien
aagtgttgggcagtcactccttcacttgcactctctcccctgctgccttctgaagaaggtgactgcttccccttctgccatgattgtaaggttcatgagatctccccaacaatgcagaactgtgagtcaattaagcctctttcttttttttaattacccaatcttgtgtggtatctttatagcagtgtgaaaacagactaatacaacaatatatctatgtaacaaagttacacttgtactccataagtttgtacaaataaaatgataaaactgaaccagttctaaatcaggttaaattgaacaagaatatcaggcatagtccatggaaaacaacccatacttctctctgattccataatttattttttatttccaacttcatgcctctcagtcacgccggccatctctatcatgtgccttggaccctctggccttggggcccgaatgatggcttcagcccctctggccagcaagtctgtctgctgcctctactggacacatgtactgcctaaagctggggactttcttatctggtccagacccccagttcctctaacacactcattccacaaatagagcctcaggctcctccaggcccatggctacagagcctttcctctcctagagtttctctccttttagactcacaaactctctgcttacctgcaaggtgacagcctcacttgaggaggaggagctgaggttcactaggtgggagctggcccaagtcagtttagctcagaggtcggagtctttgtaagatgcagaatgaaaatgaagtgttacgacctcaacctccctctcccatcacccgctgggcaaatgccaatgtcacatcctttaaactgacttcctgcctcctaggtctctgccctgcctggtttagatcgaagtgattaaccttctcccgggagctcggggagggaagtctggctgagccctcttgcccttcagttctgctgtcctcctctacccaggtgggtatttgacaagtttgtggatttcaagcaaaatgtatctaaaatacattgtcttacagtatgaactagaggaaacagtgtttgaatgttatctgtttcttttggaaccaaatcattgggttggatgatttattaagaagtgaatcatccgggccggtggctcacgcatgtaatcccagcactttggtaggccgaggtgggctgaccacttgaagttacaggttcgagaccaggctggccaacacagtgaaaccctttctctactaaaaataccaaaaacttagctgggtgtcctggcacacacctgtaatcccagctactcaggaggctgagacacaagaattgcttgaacctgggaggtggaggttgcaatgagccgagatcacaccactgtactccagcctgggcaacagagcgagactcctttgtcttgaaaaaaaaaaaaaaaattaaagtgtcccaatctggggggaggaacagggtcactgctatgagaaagctagagatggcctagggtcctttctaaaatttcctctgatattcctcacactttcaaatgatttctcctttcttcccactccagccacagactgctaggaagtacagtattttttcttttggaagaaaaagtaaatgggaaggcacaggatttttattaatgctgttactgattttaaaataagctaagaatgtgccgtcaatccagttggctgctccctgccgcccacggagcctgtaatcactgccttacagctcacgagaacaatggcaacacaagcaaaccacatctgcatttccacattctgagcagcaggtccctgaaatagaggcagggtacgggaaattataggacttcagtgaaactgtaggattgctgggattcccacaggcgcccagccctggctcggggaatatttgagtgtgggaactaccctagcatctctgcacttacaggagaaccaggggattcacccgtcatgagagcagagctcctataccctggcatcctgcgccccaggcacccgagggatcctgggaaaacccaaagctatgtggctaaaactcctgctttggggctcagggttcagggggtacgctagactcctctccccattcgattcttgcatttggcagacgagtcacccgggcagtgggatgaggatggcaccaacagagtcaacagaaggaagacggctctggccgggccccagggagggaggcagcggtcaggacagtggtctttgtggggcctgggaggtgtggatgctgggagggatgtgggggtggtcctggatgactgttgttctttctggacctggg

SEQ ID NO: 38181 - DNA, 2300 bp, Homo sapien
tgtgcctcatccatcactggttaattactctgattaaaataaagcagtgatttgatgtttccaaggagcttcattagaatgagaaaaaattatatttaccaaggaaaggaggaaatggttgaataaaaaatatgacaagtaatttaattttaggtcaatgaatgctccactgtgattcaattctgacacatgaaacaaataatgagatgatcaagccctcttcttccttgcagaaactcgctaatccatatgaatggtctgttgttcacgagcatctggttcccttaacaacctgtggcctgtttactccatggggagaatctggtcctcagagcagctttagggtccatgcaccttactggacatccataatgcaccacagagtgtggtgcagcaatatgccatgtgaggattttttaatccttgaaaagttgggtgaagaggataagatttttcgtataagataatacaggcttcaaaaagttggaaaaagagcacatttagaaagtcccagagctgggatttgaacccctgtgcttctgattctaaattgcttcccaccacgctcatggtgacctctagaaggtgttagtgaggtggagatgtacccggtaatcctgccagtgcatctgtgcactgattctctattgctggctgtccttcttggcatcttattcaacaatagctactgtaaggggggaaatagtcttatattttgtgaaagaactcaaatggccaattcatatatggccagtttacttaagaatgaattaccgaccgggcacagtggctcatgcctgtaatcccagcactttgggaggctgaagcgggtggatcccctgaggtcaggagtttgagaccagcctggccaacatggcaaaacctcatctctactaaaaatacaaaaattagccgggtgtggtggctggcacctaaaatcccagctacttgggaggctgaggcagaagaattgcttgaacccagggggcggaggttgcagtgagcccagattgtgccactgcactccaggctgggcaacggagcaaaaacaaaaaacaaaaaagaatgaattaccaggctctaaaaacctatcagtaagctttttttttttttttttaaagacggaacttgatgctaaggaaattgcaacaacacaatgtcctaatacactgttgacaagattaaaaaattttttatttttaatttttgtgggtacacagtaggggtatatatttatggggtacgtgggatgttttaatacaggcatgcaatgtgaaataggcacatcatgaagaatggggtatccataccctcaagcatttattctttgtggtataaacaatccaattatacttttaattattttaaaatgtacacttaaattattattgactatagtctccctgtcgtgctatcaaatagtaggtattattcattcttctatttttttttttggtacccatgaaccattcccaccttatctccccagtcctctactatccttttcagcctctggtaatcatccttcctattctctatgtccatgatttcaatggtttcgatttttagatcccacaaataagtgagaacatgtgatgtttgtctttctgtgcctggcttatttcacttaacataatgtcctccagtttcgttccatccatgttgttgcaaatgacaggatctcattctttttatggctgaatagtactccattgtgtatatgtaccacattttctttatctgttcatctgttgatggactgtaaatttgcttctaagtcttagctattgtgaacagtgctgcaacaaacatgggagtgcagatatctcttcaatatactgatttccttccttttgggtatagacccagcactgggattgctggatcatatgctagttctatttttagttttttgaggaacctcccaactgttctccatagtggttgtactaatttacattcccactaacaatatactagtgttcccttttctccacatcctcaccagcatttgttattgcctgtcttttggataaaagccattttaactggggtgagatatctcattgtagttttgatttgcatttctctgatgatcagtgacgatgaccaccttttcatatgcctgtttgccatttgtaagtcttcttttgagaaatatctattcatttctgattttttatttggattactagattttgatttctgattggattactagatgttttcctgttgagttgtttgagctccttatatattctggttattaattccttgtcagatgggtagtttgcaaatat

SEQ ID NO: 38182 - DNA, 2300 bp, Homo sapien
gacagagaataaagccctatcaaaatgtacagtaccgtgattacatatgactgccttcagaaccttactggatgatgcttaaatatcacctgatatggtttggttgtgtccccattcaaatctcaacttgaattgtatctcccagaattcctgtgttgtgggagggacctggggggaggtaattgaatcatgggggctggtctttcccgtgctattcttgtgatagtgaataagatctcatgagatctgatggcttatcaggtgtttccgcttttgcatcttgctcatttttctcttgccactgccacgtaagatgtgcctttcacctctcgccatgattctgaggcctccccagccatgtggaactgtaagtccaattaaatatctttttgtccccagtttcagttatatctttatcagcagcttgaaaatgaactaaaacagtaaattggtaccagtagagtggggtgttgctgaaaagatacccaaaaatgtgaaagtgactttggaacttgataacaggcagaggttggaacagtttggagggctcagaagaagacaggaaaatgtgggaaagtttggaacctcctagagacttgtggaatgactctgacaaaaatgctgatagtgatatgaaaaataaagtccaggctgaggtggtctcagatggagataaggaacttgttgggaactggagcaaaggtgactcctgttatgttttagcaagagactggcagcattttgccccaccctagagatttgtggaacttagaacttgagagagatgatttttagggtatctggcagaagaaatttctaagcagcaaagcattcaaaaggtgacttgggtgctgttaaaagcattccgttttaaatgggaaatggaacataaaagttaaagaaatttgcagcctgacaatgcagtggaaaagaaaaactcattttctggggagaagttcaagccagctgcagaaatttgcataagtagcaagcagcctaatgttaatccccaaggccatggggaaaatgtcgccaagtcatgtcagagaccttcacagcagcctctcccatcataggcctggatgccaaggaggaataagtggtttagtggactgggcccaggttccccgtgctgtgtgcagcctagagacttggtgccctgtgtcccagttgctccagccatggccgaaaggggccattgtacaacttgggctggggcttcagagagtggaacccccaagccttggcagcttccatgtggtattgagcctatgggtgcacagaagtcaagaattgaggtttaggaacctcagcctagatttcagaagatgtatggaaatgcctggatacccaggcaaaagttttctgcaggggcggggcccttatggagaactgctagggcagtgtggaagggacctagtggagctgtgagaagagggccaccatcctccagactccagaatggtggatcctctgacaacttgcactgtgcacctggaaaagccacagacactcaatgccagcccatgaaagcagccaggaaggaggctgtaccctgcaaagctacaggggcagagctgcccaagaccatgggaacccacctctggcatcagcatcacctacatgtgagccctggaatcaaaggagatcattttggagctttaaaatttgattgacctgttggattttggactggtatggggcctgtaaccccttggttttggccaatttctcccatttggaacagttgtatttacccaatccctgtacccccattgtatctaggaagtaactaacttattttttattttacaggctcataggtggaagggacttgccttgtctcagatgacactttggactgtggacttttgggttaatgctaaaatgagttaagactttgggggacttttgggaaggcataattggttttgaaatgtgaggacatgagatttggagggggccaggagcagaatgatattgtttggctgtgtccctattcaaatctcaactagaattatatctcccagaattcccacatgttgtgggagggacctagtgggaggtaattgaatcataggggctggtctttctcatgctattcttgtgatagtgaagaagtctcacaagatctgatcatttataatgggtttccacttttgcatctggatcatttttctcttgccaccaccatgtaagaagtgcctttcacctcccaccatgaacctgaggcctcccaagtcatgtggaaatgtaagtccaattaaacttctttttgttcccagttttgggtatgtctt

SEQ ID NO: 38183 - DNA, 2300 bp, Homo sapien
agacggggtttctccagctaattcttaattctatttaattgtaagtaacttaagctccagtagctgagagtggctatgagagtggctatgagagtgcctcccacgtagggcagtgcaggcatatttcttccctcaattatgtcactttctttgctcctcctcatttcctggcatctttggttagcactgctggcttcaaaaacatcacaaactttaaatgtaggccctgttctcaggatgtccagccccacaaggaaggaacaggcagcagcaaggtcagagcatccaggtgtgcgtgtgggtatggatgccagcccagcaggcagggttgcacaggtgtctttacccagtggactctgtttagatttgacaggaaggtgtcagagcaaatcacaggggcttcagaaagaagggattttgttcgtttacaaactgcagtttgcagtttatccttttcttggtcacaggcgcatttgaaagtgtattgctaatgaaattggaaagtatgcatttcccccaaatctgagatttactcacaacaagcacagtggggacaaagccagaggcactgacaaggcagtgtgagaagagcagaggtggcagcaggccccaggagacaggtgtgttaggtcaacagcaggccccttaacccaccacagggctctggttactcacctcattggcagcaaagttccagaaaacacaggatccaaggccggacacccgtagcttggttcatcattgttcaaggggtctgtgttcccatctgagaaagagcttgtgcctgaaaacgttcccactcttcttggtatcactctcttcagagtggagagaaaaaatatctagtgttctgagtaaaacattaagttttctaaaatctctgaaggtttaaatgttggtataaagaactaagacaactaacaagtgctttaaaaatataagagaaaatgtttcgtaatggagagaactcagtctgacccgccagttgcaaacaaggagaggtgcaggaggttcggaaccagatcattcctaggttctgccgtaagacagagtgcgcctagtgtgtgccttgccagccttccttaggaatgctcttctgctcttgtggaaggtatcctgttccccagtgcagttgtggacagttacagctttttttttttttttttttttttgagacagagcctcgctctgttgcccaggctggagtgtggtggcacgatctcggctcactgcaacctccgcctctcggtttcgagcaattctcctgcctcagcctcccgagtagctgggactacaggtgcgtgccaccatgcctggctaatttttgtatttttagtagagacggggtttcactatgctggccaggctggtctcgagctcctgacctcgtgatccgcccacctcgacctcccaaagtgttgggattataggcgtgagccaccgcgcccagccaacagttacagctttttattctcagacttctctcagcttccatgtacagtctctcccttgagtagtgatctgtttcaggcagccacaaagatccctacctaaaacacacttttgttttgttttgttttgtttcattttgtttttgaggcagagtctcactctattgcacagtggtgcaatctcgtctcactgcaacctccacctcctaggttcaagcaattctctcgcctgagcctcctgggtaactgggattacagatgtgtgccaccacacttggctatttttgtatttttagtagagacggggtttcaccatattggccaggctggtctcaaacttctggcctcaagtgatccacccaccttggcctcccaaattgctgggattacagacatgagccaccacgtctgtcaaaagcacacttcttaggaaggaatttgtctgacagtgttaggaaaacaaaagctgtttctgcttgggaaaatgttactggagtttggatttttccctctgtgtttgatgtgtgtcctgataagaggtcacaagtacagaagctggaagcattaagctctatttctttgtcttccagaggatgtaggaagaagctggtctgctgactgtcatacttgtgaccagcttgcacaggacatggccgaggaggcagcccagaacatttctgatgaccaggaaaggtgagttatcactgttctcagagggtttggtaagcttgattttaaagtatgcattcagaaattttctttcaaaagtcatcacctctaggatgtgggctcactctggcacgagtggaggccctgtaccaggagggtgcatttggccggcggggtcag

SEQ ID NO: 38184 - DNA, 2300 bp, Homo sapien
gaggctgaggtaggagaatggcgtgaacccgggaggcggaacttgcagtgagccgagattgcgccactgcactccagcctgggcgacagagcgagattccgtctccaaaaaaaaaaagagttatgccaacatttttttttttttttgagacggagtctcgctctgtcgcccaggctggagtgcagtggcagacctctgttcactgaaatctccgcctcctgggttcaagtgattctcctgcctcagattcctgagtagttgggattacaggcacaagctatcacgccgggctaatttttgtatttttagtagagacggggtttcatcatgttggccaggctgatctcagactcctgacctcagatgatccacccgcctcggcctcccagaatgctgggattacaggagagagccatcctgccctgcctgttggcataactttgaaagtgatctattaagtttggtttggcaaacactcgcatatgacaatgaagattagaattttgcttcatgttatagtcttaaaataggcaaaaactgcaatttttgtattttgcacctttttattattattacactttaagttctagggtacatgtgcacaacgtgcagatttgttacataggtatgcatgtgccatgttggtgtgctgcacccatcaactcatcatttacattaggtatttctcctaacgctatccctcccccaggcctccaccccccaacaggccccagtgtgtgatattcccctccctgtgtccatgtgttctcattgttcaactcccacttatgagtgagaacatgcggtgtttggttttctgtccttgtgatattttgctgagaatgatggtttccagcttcatccatgtccctgcaaaggacatgaactcatccttttttatggctgcatagtattccatggtgtatatgtgccacattttccttatccagtctattattgatggacatttgggatggttccaagtctttgctattgtgaatagtgccacaataaacatatgtgtgcatgtgtctttgaaaattatctgggcctggcgcggtggctcacgcctataatcccagcactttgggaggccgaggtgggcagatcacctgaggtcaggagttcgagaccagcctggccaacatggcgaaaccccgtctctactaataatacaaaaattagccgggcatggtagcttgtgcctgtaatcccaactacttgggaagctgaggcaggagaatccctcgaacccgggaggtggaggttgcagtgggccaagatcacgccattgcactccagccagggcgacagagccagactccgtctcaaaatcatcatcatcatcatctgcattatcattatcttgattctatgtgtcaagttaaagacaaggttctagtctatttgcaaaggacattaaaaataacaattgttaacacagataatctttagtctttgaaaaaccaaattagatacaattgttgcttcatttccccctttaaaatttttcctttaaaaaaaatcctaatgacattatttatgctaataagaattttatcggatgtaataaagttcgtcttgaggcaaactgcagaattatcacttaacgtcagtgttctttaagcttcccgactttaccaactagccagtaatatgttcaatttttttagaagtcatttgaaacaattttcagaaccttaatccaccaagatgcttcaataccaaagtaccagtaccgtcatctgaggctggagggtttaaagctgctctaccttaggtatatttaagataatattgtttaacctttataaacgattaattttatttggatattttaaaataacacttgaaataggtgtcacaaaattctttcaaaacgtgaattctcagaacaacctccccgaatctggggcttgaagcctccgcctcactaaaagtagatcccaccattacccggcagcgcggaggcatacccggagactgggacccccacctcccccggggcgtgacctgtgatccttgacccgtgaccccacctcctctagggcgtgaccccctagccccacctcctccggggcgtggcccggagataaccctggtaagagtcgcgtagcccgagccgggcggaaccactgttcgcgctgccgtgtttccgggcggggacactcagggcgcgacgcttttctgttacccacagaggcccgccgcggctgcgccatccgcggccatgaagtttcgggccaagatcgtggacggggcctgtctgaaccacttcacacgtgagcagggaggccgga

SEQ ID NO: 38185 - DNA, 2300 bp, Homo sapien
ctttgccaacttttaaattcagttatttgttttcttgttattaagttcctttgctgtgcaaaagctttttggtttttggtttgatgtggttccacttatttatttttgcatgtgcttttgatgtcatatttaaaaagtcattgtcaagaccaatgtcagggagattttttccttgttttcttctaggaattttatggttagaggtcttatgtttaagtcttttatctatttcaaggtattatttgggtatggtgtaagataactgtccaatttaattcttttgcatgtgaatatctacttttcccagcaccattcattgaagagactacagtgtcctttccttattgtgtacacctgacaaacttatcaatgattagttggctgtatatgtgcggatttattcttgaaaaatacacatagactttgacccagaagttcctcctctgggtatatatccttaaagatatattcacacatatggataataacttaaatacaagattactattgcacattattttaaataccaaactgcccatcaatatgagacaggctaaatagcctatggcccattcacccaatgaaacactattcagtcataaataaatgaggaagattatctcaaacaatcaaaacaacttccaagatacatgtttaagggaaagaagcaagatgcagagcacagtttatagtaagctaccattaggaatgtggagagataaatatacctataaaatattacatatataatacaatgtcacatactgtgcatgtgtatcacatctttgaaaggaaatactataaatggtagcatagatgctaaaagagaggggaaccaatagctagaaggcagatgccgggtggaaaggccatatttgctgtgtaccattttgtaactttcgaattttggactagtaggtaaaaaagtagaaacttgggggtttcttggtataaatctaagctttcagaaaataagtagtaaattgaaaaataacacttacaaattcacccagaaatcagcataagtaaaaagagaaaaaagcaaaaacaaatatgaaggagcagttgaacggaaagcaaaagggagacacaagtgtcaataggtggaccattctaagaaaattgaggcagtggcagagaagcaatatttgaagccctgatggctgaaaaatagtccagaactgaaaaaacacacaagtacccaaattgaaaagactctctgagttataagtgaggaaaaacaaaaactagtatcaaacctggatacactaaaatacaactggaaaatatggataaacagaaaatcttaaaaactacgcgagaaattgccaaaaaaaacagagaaatgaagataagacagaattctcatcaacaacaatcaatccacaaggccatggagtagtatctccaaagtgctgagagtgaaatgactgtcatcgtagaatttatgccccaaataaaccagctcatccttccacctaactattctgtttctaggtgtatgtttagaaaaaccttgtgatgtgcatataacaacgtgcaatgagcattattccttgccaaaaaaactgaaaacaacctaagcatacatttacagaaggatgggtaaatgaattgtgatgtatgtataatgaaataccatagagcaattaaaatgagtggagttaatgtctcaagataaataatattgtaagaaaacctagagtggcataacatttagtttatgttttaagcatgaaaatggtattatttatagatacagatttacatagtaaagtatcaaaaataatgagaatagagtatatcaattttcaggttgtagttatctgtggaaaataagagtgctgagattcagggatacttgggggtctactattatatttctgatattttctttattagaaaagcactgaagcaaacacagcaaaacatccagatttgctatcgaaaagcggtaggtacatgggggggcctttgtattattcagtgggtgtgacatatggtacaattaggcccttgaagcagagaggtggttgcctgtccatgccctggctgggcgtggtggccatctgcattatgaggtgtcacggaggatgatgcaacagaagaatcagaagcttttcaaaattccgtcttcaagaagaaacacccgtggaggaagaagacattatacaaaacaaatttagaaactgtatgtatagcttcatgtttttcataaaataggaatgaggacaaatgttgctcttcatcctaccagctgtttgttctttggtaggggatcatgagtggaaaaacaaagg

SEQ ID NO: 38186 - DNA, 2300 bp, Homo sapien
aattagctagatgtggtgctgtgggcctggactcctaattactcaggaagctaaggtgggaggatctcctgagcttaagagttcaaagcttcgctgagccatgatcacactaatgcctttcagcctggatgacagagcaatatcctgtctcaaaaaaaataaaataaaaataaaataaaaagtttcttctaaggaatgataacacttcattatcactgaacttatgatttcagccagtcaagaaggttatcaacttggatgaatgctgtacttttttgttaatccaatggagaatagagatgctctttggtcatgacagctccagttattatgatcaattaaaaaaaaaagaataaccttcttgactaggcacggtggcccatgcctgtaatcccagcactttgtgaggccgaggcaggtggatcacgaggtcaggagtatgagaccagcctggccaacatggcaaaaccccatgtgtactaaaaatacaaaaattagccaggcgtggtagcacgtgcctgtaatcccagctacaccggaggctgagacaggagaattgcttgaacccaggaggtggaggtggcagtgagccaagatcaccccactgcactccagcctgggcgacagagcaagagcaaggctctgtctctaaataaataaataaacttctcttgaccatacaatcccgtagctagaggatgctgtgacttgcacaaacaaaagcatttgtcatgcttggcaataacctaagagcgtgtatatgcagtggaacaaacatttgacattgcagtatgaagtcttgattactcatgactggaccactgaagatgcttagaattcattatgatattatattagagcaggataaaccacagaattagagttaattcctgcacaaaaactatcttctctttaaccaattctgatattacctgtctcctgctagatttctaaggctatactcgtgtaacagaaacagactcatgttcagttcaagttgtcaaatacccaccattatgaaaagtcttgatttaaaaaaaaattttcaacaagagaaaaccaaggctgctaactgttgctgcagtcgttggaacaacaggatttctttgaatgttctctgtatcaacttatcccctcaaactctcacaagcggttaccaccgggtaagtagcccttattatttttgccagggttgtatagggctttctgggtatcaaaagtgtctcctactgaactgcgccatagctgttggtgtctattggcctcaccaagcatatgccagatagataatcttcattcccatgaagcaccattggtaatatactcattgtactttctgtagatctcaaaatccaggcaggcaacaagtttacacttaagccaagtgtttggagttctaaacgcgattccatataaatatggttaagagctttaaaaaaagtctctcaacttataaaacagaaatattctcaaaaaataagatataaggaagaatgttcacatgataattttattatcgacacacaatttccaaatacttattagtcttgaaaaaaatgcattagatgagaaatttgcaagcaaatttgtctaaaattaaggattcctttactaagtgaatcattactcctgcatctcattagtaaattctttttatgttttatttttgtatactggtggggtgttttgttttgttgtgtttttagggtgagacagttatacttatttggaaaacgtgatgcatgtccccaatttttctggaccgctctacagtaactgtggttcccagccagagcggcatgaggaggactgaggcctgactctcttcctgcgtccacgtccccacgtccccacgcccccacacccctgcaacagtaaggccctgctcccacccccgctgcgtcccgcccggttccccgtggcatcgctgcgctgccctgccctggtccggctctgggctacgggcagttgacaggcggcgcccgcgctccgcttcctgccctgattggcccaccgctccccctcaggcttcccctattggctgacagtgctccagccgcgcccgccggttggccgttcagccgttgccctggcgacgccgatgttgtggttccgcggcgcgctgggagtttgggtttggttggctgcagccagccagccgtgtaaaaactccaacgccgggcgccgcgggcagcacccacggagacccgcggggagctggtgagcctgagcgggctggaggacaatgggggcgcccactgtggtcccgggccttgtccactgtgcggagctcgcagtgc

SEQ ID NO: 38187 - DNA, 2300 bp, Homo sapien
ggaataaaagagtggctactccataggcagagcatccccaagggctgctggtgggtattttttatgattactcttgaatatgtgctaagcaaggggtggattattcctgagttttccaagaaaggggtgagttatttggttattcccccttcccttttacaagggaacccttaatcctaagggttgtagagtcaggaaatatgtcagcaggagtcgactcagagactcttcatcttgaataggagctgggtaaaatgaggctgagatctgctggagtgcattcccaggaggttaggcatccttagtcacaggatgaaatagaaggttggcaggtggtatcacaagatacaggttacaaagaccttgctgatgaaacaggatgcagtaaagaagccagccaaaactggccaaaacctgccaaaaaccagcaaggtgaggaaaactacctctggtcttcctcattgctcattattcgctaattacaatgcattctcatgctaaacgacactcctaccagcaccatgacagtttataaataccatggcaacatttagaagttaccctatatgttctaaaaggaagaattcctagaaaactcatgaataatccacccttatttagtatatgatcaagaaataaccataaaaatagccaaccagcagccctagaggctgccctgcccatggaattgccattcttttattcctttactttctcaataagcttgcttctttcactttactctgtggactcaccctggccccgaattctttcttgcacaagatccaagaacattctcttggggtctggattgggacccttttccggtaacaaaactaaaactaagttgttaatctaccttcagagagagagaatagcaacttcctaaccaggccagtttcagtcttcagtctgaggcagcaaaatagggtctggaggcagggaacataaggccgattcacactttagctatgacaggaaatagcctctgcgtaggccaagtaaatgactttgtaactttgcatcatccctttcatttacatagtgtgtgccccaagcggaggacattgaaactccccaaaattctggaatggggcctttgagcccctacgctcaggcccgctcccacactgtggagtgtactttcatttaccttttttttttgagatggcgtctcactgtgtcaccaaggctggaatgcagtggcatgatctcagctcactgcaacctctgccacccaggttcaagtggttctcctgcctcagcctcccaagtagctggaattacaggcacctgccactgtgaccggctaggtttttttttttgttttttttttttttttacttttagtagagacggggtttcaccatcttggttaggctggtcttgaactcctgactttgtaatccacccgcctcggcctcccaaagtgctgggattacaggtgtgagccactgcgcctggccgtactttcattttcaataaaacccttaattccttccttgatttgtttgtgtgtttcactcttgtcacccagtatggagtgcaatggcgcgatctcggctcactgcatccttcgctgggttcaagcaattctcctgcctcggcctgcctagtacctgggattacaggcacgcgacaccacgtccagctaattttttgtatttttagtagtgacggggtttcaccatgttgggcaggctggtctcgaactcctgacctcaggtgatccatccgcctcggccttccaaagtgctgggattacaggcgtgagccaccactcccggcccaaccccatgttttctcaggaactggagttccctttaggaagcaagtaacagaggtgctgggctgcccgggcctctaggtcgtcttctttcccaggctctgtgctctcaccagagtgcgcgttcgggaagcagggagaggaccaggaaagacgcctgagacggagagtgggcaccggccgggggcaggcaggtccggcccctgggggtcagagtgcagcgccggtttgaggcagttcggccacttagctgcgactcgaagtgaatgagtcacttcccctcctcgggcgagctcctggctttgccccagcaagcgggaactcccaggatcaggaaggtcccagagaaactccccaggggggaagccgaggccgtccagagagatccagggtacacacagtgacagtgccagctccacattcccgaccaccgggccagggctggttccacgctgtcatttctctccgctggccccagccgcggggccaccgccagacagacagaccggggatc

SEQ ID NO: 38188 - DNA, 2300 bp, Homo sapien
cactcctaccagcaccatgacagtttataaataccatggcaacatttagaagttaccctatatgttctaaaaggaagaattcctagaaaactcatgaataatccacccttatttagtatatgatcaagaaataaccataaaaatagccaaccagcagccctagaggctgccctgcccatggaattgccattcttttattcctttactttctcaataagcttgcttctttcactttactctgtggactcaccctggccccgaattctttcttgcacaagatccaagaacattctcttggggtctggattgggacccttttccggtaacaaaactaaaactaagttgttaatctaccttcagagagagagaatagcaacttcctaaccaggccagtttcagtcttcagtctgaggcagcaaaatagggtctggaggcagggaacataaggccgattcacactttagctatgacaggaaatagcctctgcgtaggccaagtaaatgactttgtaactttgcatcatccctttcatttacatagtgtgtgccccaagcggaggacattgaaactccccaaaattctggaatggggcctttgagcccctacgctcaggcccgctcccacactgtggagtgtactttcatttaccttttttttttgagatggcgtctcactgtgtcaccaaggctggaatgcagtggcatgatctcagctcactgcaacctctgccacccaggttcaagtggttctcctgcctcagcctcccaagtagctggaattacaggcacctgccactgtgaccggctaggtttttttttttgttttttttttttttttacttttagtagagacggggtttcaccatcttggttaggctggtcttgaactcctgactttgtaatccacccgcctcggcctcccaaagtgctgggattacaggtgtgagccactgcgcctggccgtactttcattttcaataaaacccttaattccttccttgatttgtttgtgtgtttcactcttgtcacccagtatggagtgcaatggcgcgatctcggctcactgcatccttcgctgggttcaagcaattctcctgcctcggcctgcctagtacctgggattacaggcacgcgacaccacgtccagctaattttttgtatttttagtagtgacggggtttcaccatgttgggcaggctggtctcgaactcctgacctcaggtgatccatccgcctcggccttccaaagtgctgggattacaggcgtgagccaccactcccggcccaaccccatgttttctcaggaactggagttccctttaggaagcaagtaacagaggtgctgggctgcccgggcctctaggtcgtcttctttcccaggctctgtgctctcaccagagtgcgcgttcgggaagcagggagaggaccaggaaagacgcctgagacggagagtgggcaccggccgggggcaggcaggtccggcccctgggggtcagagtgcagcgccggtttgaggcagttcggccacttagctgcgactcgaagtgaatgagtcacttcccctcctcgggcgagctcctggctttgccccagcaagcgggaactcccaggatcaggaaggtcccagagaaactccccaggggggaagccgaggccgtccagagagatccagggtacacacagtgacagtgccagctccacattcccgaccaccgggccagggctggttccacgctgtcatttctctccgctggccccagccgcggggccaccgccagacagacagaccggggatcctgcctggcggcgtgaccttgggttagtcctagagccgcttctagcccggtttcctccgccccaggttaggaccacgtgggtaagaagatttcctctgtagtaggggctgtttaatgagtaacagaactggctgctggttctttacaattgcccagctgctctgcagaggcgagaagcaattgcgggctgagcctcccgggaccttcgcgggagggtggagaggaggaaggcgggggaggcggggccagaggggcagaggaaggtgggggcgggcggggcttgtctgcgggatggcccaggatgcggtcagctgagttcgccggcccagggcaggcggggcccgagcctagcggtaacccccgggcagggcggggccgctcgcagactccatatgagattcacctcgcaggtggttccctcattcgagtgctccggcgcacagacccgcgccccgccgtctgcgagcctcccgagagccgtcccttcgtccggccctggagcatt

SEQ ID NO: 38189 - DNA, 2300 bp, Homo sapien
gaggacactagctatgtcaaccaactagaacatatcagggagccaagacatgactaggttactgataatctgcgcaagcctttcctgtgtgtaaggctccgtgaccgattctagcagggatgcctccactgtatggctctgccacaggaacagcccctggaaagtgctgagttcatccggggagaggcatcacagaagttgtgacactagggggggtgctctgaagaggagagcaggagaaggaggtatgcagagaccccaaagagaggaaaaggcacaggcagacaagatcagcaaagcatcctgtgtccagtgggctgaggaaccagctgattacttagtttgtctgaagcagagggtgtagggagaaaagagaaaggagataaaactttaacctgtggtggggtgtgggagaatagggtgggtatttatgcagggcttcaaatgctagaaggagctgtttgttacctggcaatagcagactgctgcttccctgctgagcccctgggtccgcagctgttacctatttgacaaattgtgtcgatcaaatggggttttgtctttgacagctttgcatacactttaaagtttcccaaagtgttactagttcttaaatttatatttaaaaagtttatctttcatcactatgtcaatgggcatgttagattgaattacatcacatgaaacatcagccagaacattgacaaagtcacaaccttggcttaacatgggtgtttctccctggttccagcatggtatgggcattccttctatctcaatcatgttgcatgagctcataaagctgctgtactatgcccggtgctccaacgtcactatcatccgcattggcacttctggtgggataggtaaggtctgcagaggggcctcttgccctgtgaatggatgagggactggggcatgccaaggcagcttctacatggtgtggcattagagacaaagagttcctttcttggctttgttcaagggaagcttgttaacaggaggtgtgaaaagaagcttgttttgttgtttttgtccaacctgttctcccaacccgcaccccagagctaggcagtagaagggcaccacaccatgcatatgggggaaactcatccttttggggttacacaatttgtgccttcttgtctgcttgattctgtcttattctttctaatcccccttcttctccattctctcctttcctttgcttacttttcctcctccctaatcctgcagggattttgaagcaccttaggagaaaagacacaggaaaatcaaaggggggaagagagaggcgcagtacaaaactcagataagtgtccttaaattagcttaaaatgtccctatcctcaacagggacattttttttttgtttaaaaaacaaagatggttggccgggcgcggtggctcacacctgtaatcccagcacattgggaggccgaggcgggcggatcacaagatcgggagatcgagaccatcctggccaacatggtgaaaccccgtctctactaaaatacaaaagattagctgggcgtggtggtgcacgtctgtagtcccagctgctggtgaggctgaggcaggagaatcgcttgaacccgggaggcggaggttgcagtgagccaacatcgcgccactgcacttcagcctggcaacagagcgagactccatctcaacaacaacaacaacaaacaaacaaacaaaaacccccacaaacatggcaaagaaagaatgagatttaatgagaaagcaaaagctaacaaattgttgaattgtaagccaaagtctgttaggcagatttgttttaaatacgtggtcttgctctctggggttccaactctgtgccattctttctgctaaaaactgggttctagtgattcctgctcccaccgaggtgttcagagctcagggaagaagcctgcatgtgccctagagaaagttgagctttgccgctgctggccaggcctgtgtgtacttgttccaggctgtctagggcctggactatctaggatttatagcaattctagaatttaagtgtcctgaccttgaaaggggacttgctttagacccaaatattttgaatatgttatcttgtctcttttctttttgttatatagagagattgatgcataaaatctgtgtttgtatgactgtaattccaagtttagcgaaattgtccctaggacaacacaccaacggccatgagctgtctcggtcctgcaagcttagtctccgatgctgcccacctgacacagctgtgcatagcatgctggcctctgccaggaactctagtgaatggttct

SEQ ID NO: 38190 - DNA, 639 bp, Homo sapien
gaattcaacttgcattaagcttgaagtttttttgccaaaactaaaaactcctacatttttatatgagatgggaagaagcatcctttctattcttcctacccacagcttgtttacagagagcggtgtctggaagcttggctgtgcatcagggttatttccactcagtgaatggggaagcttgtgaatcctgcagctatatggctgctcagagccattctgccttgaaacatgagtactgaccctggaagaaaggtgttagatataaaggtttttccattttgtttgattctttttgtctgagcccttagatctcctttaaattaatagcaaggttaataatataataatatgatgttatatattacaatttcaactcaacaggaattccatttctggtagcaggtatatggactcatttcttctttgcatctatttctaggttatttgcagccccgagatctacccagctgtggtgttatcccctttgttcaaagccttctttgtaacactggatcaaggtgtaggaacttcagctatgaagggtcaatggagcatcattttcggtaagagaaacacaaagatctttttcagaaatctcagaaagctgatacatagaacaggcttctgctttttgtaaag

SEQ ID NO: 38191 - DNA, 2300 bp, Homo sapien
ttgaatctttacttaagtttccagaagcttcccctcttacccttaggcactgatcttgctccaagtaccattgttttccctttagggaagtatttcacaacctctgggttcattagagaggctgcagggtttgtactatggtaaggtggctgtaggcaccctgagtttgggtgaacagttttatagtcagcaaagggtagatttgccatttcagccacgcatgatttccttagtttctattacttcaagagtccagggagtaaatgttggaatgaacacacacacacccacacacacacactccaagaacaaatatttgttttcagaatgattacattttaaacccataaggaggagaataaacatttcttgcatccccataatttgcaaacccacctctatcttggtggaattcgtatttttcgctaacatgcttatggtttagctctgcatttgctcaccacagcctctcttccaactttacagtttgccttttgggaaacagagctcccattggcacgatgctactttagtggccactttgttatgtgcacaaaggtccccgatttgaagtaagtgcttgtagaggcccacataattactgtgacaagggccatcatctgtaccaagatttctttgaaggataagatagtgggttggattcagtctcccagacacaatgaaaatgacatcatcattaataacaacagctcttatttatcaggtaccttctatatgaagggctctatgaaagttgattaaatacaagatatggctcaggatgttagggcagcccgacctccatgtgagggccacgtgcaggtgcagctcattcccaagtccatgtactttctgattcactcagctgacaatgaatttctgaagccttcagcaaagcacagtttgctatattaattcggcacatcaatctggtctcttggagctgcgctggatccctgtcactccccaccataagtcaggggccagtcactgtgtgccacttttttttaaagggcagctgcaattagaaagatgagtagaagaagtgacaaaagctacacaccatttctcctgctagagttgtctctatagtatgaatggacagaattctgtcattataagcagagtgcctctgtgaaggatggagctgtgatcccggagccctgaaagtcatctgcagagctaacagctaaaacactaatgagcaaaaataagaagcagtgacaactgggttcctctgccccagcctggaaaacagaaaattcaatatccaaatgacagacagtggaaattagctgtgattttccctgctctgtgcgaagagctggcatttcctcatttatccattcatccaacaaatatttattgagcaactaatatttcctgttgctattttatgcccagtagctacatgaaagatcaagacagaagaaaagccttgcctccagtgtagaactgagaatatgaaaaaaaaaaatcatgtaaaatacagagcatttcagttggtgatagcataagtaagcttcagagggcactgacatttttaaagaatccaggttaaattcacatccctgaacctttctaactgttagacttcaggaagacttttaatctcctcaagccccagttttctcatccacaaaacgaacagtataatgcacatccccaaggtattaggaggattgagatgatgtgtgaatgctatgaatactgtaaagcagtagataaatgtaaattgcttcacatataaggactgctcatattttgagcctcttctcaaatttccaccttggtcacctcaaagatacaaagaaatatttggcaaatgatttgaattttaatgatagatcacatttgtttctggtttacattttaacaatgctagtgcaattcagtgtgctccaaaacacatgagctatatatactctaatgaagataactttcatatagtaccgcaaaggcgtctctgaagttcaagagagaataaaatcagataaacaagttttcacagctcaaaagatgcttctgagtgtaaaaatacagtgttggttatttcatgttgttttgtttttgttttgtcctttagactctgatgccttctgaagcaaatggcttgctcaactccttgctggatatagtttccagcctcagcgccttgcttgccaaagcccagcacgtctttgagtatcttcctgagtttcttcacacatttaaaatcactgccttgctagaaaccctggactttcaacaggtgtgtgtttcatctttgtccctagggaaatattcaaatttgccccttc

SEQ ID NO: 38192 - DNA, 2300 bp, Homo sapien
ggcagtgccttctttcgacaaccgcctttggacaaggggtattttttattacattcctggaaggacaagagacaggtaagagcatgcatgtgtaaaaagtgactctcagtgaatcacgtttttggaaattaatagttatattgcaagtgatccagtaggaagtcttcattatcaagtagagcattcagaatgaggtttggatatttgctttcactgttgtatacacctcccactatctggtagcaccagttttgagaacaatcaagaataatcatggcatcccttgcttcagacactatccaggtcaaccacccagccaatgcttgggtcttccttataccacccttgacgtctggtctggtgagtgaccttctgaaccttccaagatagggtgtgcaaatgtgtccatctgttagatcaggggtccccaacccctgggccatggagcagtccgtggcctgttgggaactgagccttacagcaggaggtgagcagcaggcaagggagagaagctttgtctgtatttacagccactctccattgctcacgttatcgcctgagctccacctcctgtcaggtcagtggggccattagattctcataggagcctgaacgttatgtgaactgtgcatgcaaaagatctaggctgcatgttccttatgagaatttaatgcctgatgatctgtcactgtctcgcatcacccccaggtgggactgtctagttgtaggaaaacaagctcagggctccccgtgattctacattatggtgagttgtataattattttattatatattacaatgtaataataataggaaaaaatgcacaataaatgtaatgcacttgaatcatcctggaaccatcctctatcccccggtctgtggaaaaattgtcttccacgaaactggtccctggtaccaaaaaggttagtgaccactgtgttagatgattgttgacctgggatctgtcttcctggatcctctacccatgttttctagttcttcctttctaattatccctttcacatgaccaccatctacatatttgttggctctcatctttactcctagatttactagattgttcctgaagatcaagatccagaaataggtctaataagcataaaatagagtgcaattatctcataccaatgcaggctaaaatgattttctaaaaatctattggcagcattttttgcttatattgagaatttgacaactaaaattctaaaccagaacagacatatatttcatagatatttgtatggttttttttgggggggggtgtttttgtaaacagaggtaaaaccatgctataagtaaaatttgactctagctattgttgtattagccagttaatttgtactggtctttgagttcttagagtttttcaataagatgtattaaaatgttcttttacagatgagtaatcttgaatgatttcttctaactgatctttagaataaattgaatcaaaatgatagaaacaaaaaatggaaactgttagaccatttgaatattttggtctaaattccaagtacacaatgattaaaatgtatattttattgaactgtagcctggtaccatagggaaatttagaaaggggaatatttttcttaagttgtatgttaatccagaaataaatcacaaacctattgtaaaaaaataataataatttcccaccctagttcttatatatcctattatatattttccaagagcacagagagttacacagtttagaatttgggttctcaaggagactttaaaaaatttttttgaatgcttattttccttaaatataaagtcctttctactcaggtaaataaaaccagatatgagtaaggtgacctttaaaactttttaaagtattagatattaaaaagtagttaacaatccccccacctgatatcattgaaataggtgtaagattgcacaagttaacatttcatgaaaagttatggccagtgatattgaccttctttttgttttagttctgttcaacttcacttgagcttccagaagtaatgaactcatcatgacaaaatctaccataaaagagcttgtgcagttctaactctgacctttttcttcctgctagggattcaatggaataatatgtaccaggctctggaacaagggggcatgacatttggctgggtttgctggatgattctttttgattcaagcctttattttttgtgtggatggtacttgagcaacttgattcctggtaagaattttgccttttgtaagataacacaataaattttaaaaacagtttgaattaatatgcataaat

SEQ ID NO: 38193 - DNA, 2300 bp, Homo sapien
ataaaatcatcaagaagagtgtatatacttgtatgtgtgtatatatatagatagatagataggtagagatataaaatttagtttaatgacatacttttttcctagcaatataatctgtctatatgctgacttaataactgctttatgagagctgtatatggatcaccattgataaatgcattaaatcagtggttccatagactggctgagaatttcaatcttctgggaagttataaaaacacacttttaactctgagtctctggagattgggatttttttttttttttctgagatagggcctggcaaccagcatttaaaatgttcccaggttaatctgatatgcagcctggtttagaaaccactgctttaactacctaatgcctcatcctcattagaactttattcattaaaattaaatactaatttgccttataatttggaagtctaacatgtgactcagcccaagtgactactgggtttggaagtcttctgtccagcacaaaccctgaaatccttaaaaatgggtgtgcaggtctttcttgtcttggtttctgatcacttttaactctcatctcctgccacttgctacacggatgtgccacattctgtttccttgctattcacagagaatgccaggcctatttatacctcctgttttgatctttagacttccacattttcttgtctgcctgtaaactcccagggatctcaaggattctacctgaacgtccgggccgcttggcctgtttctcactttttcctcagcatcccaaggactcactccttggtaccgactctttccagcctgacactttgttacagtgtgctgggttatttctttacatttttatctcaacccgtatgttggggacagaaaccaaagagcccagcgcctgcacacactgggcactcagtaaatatcccaaatgaagttttctcagatatgcatttttatccccatgacccctctacaattctgttctcaatgctgtgacaaatgatgtctctttcacatggtacagcttctttaaaaatgttctcttttgggtcttcaaacttgtttgctgctctctattaactgtatttcagtttggtgtttgtgagcagtacaatccgtttagtacatctgttctttataagactgcctttcttgtgaaatacttcatattggattttctggagtactttagagtcaatcactgggaaaaactatcaccacagctgattgatccggctgagtcctgctttggacgtcgtttaagactgcagtccatgggctacctctgtctctgctcccagcttctcatccacccagtggacagaaaagctgctctccacagcttgtttggaacgtgcaacctcaactccaggagatttactgagattcgttggtagaggctccaaaggatcactcttgagggagcgtggccggatgatcagtagatgaatgatgcacagctcacgctttcctttcgaattttgcttgtggatcgctctgatagctgaggatgttttcacattcgctgcgtcccccagagcagggaagcgggagcagggaggcgcagtgggcaggcgccgggctctcctatgccctgcggggaagtggaaggcgccgggaggagcgggggcggggtgcagggacggtggaactgaggaaaagcaggccgtggggttattccctgaatgaatcccgacccacacataagctggggttttcccaggagagacctggagttaagaacagagaggaaaaggatggtgggagagaggaggaggaagcaaaggagcagcccaggtgtgtcgtccgctctaagcgcagcggagctcacacgccctgctcctgccacgcgttgccacgaggcttcctcttgcattgcagccttccggcccaaggcccagcttccgcactttaggtgcataaaggggacactcaagggagtcctcatggggtgggcctgcgtcgcattcccatggctgcgagatgccgcagggtcaccgagagggcaaacgaggcaaagcgctgtcacctccgcagagctgacccagccgcccttcctcccgcccgtcctgcaggtggctccctagcacggcccgcaactgtgcagggcgtccagctgctccgcgcacaagtggccgcgatcctggcccggaggctccgccgcacgctgcgcgccgggaagagcaccctcgccgacctgctgctgccagtcctcttcgtggccttggccatgggcttgttcatggtgagacccctggccaccgagtaccctcccctcagactcacacctggacattacca

SEQ ID NO: 38194 - DNA, 2300 bp, Homo sapien
ctgatttatattaatatgtctacactttaaagagaaaacttgcagaaccattgattggctttagcttgaggagaaaattgaaatcagtagagatagtgtacaatttccctcctccctcatcggatctctagcatgacatgaaccatcaggatgtcagtcatgaatcatggtgaaactgaaaagagactcacagtagataatcctattggtgaggaacttgaaagcagagagcttccctggggagtggagtcacagaagtgagatttagctccaaaagaaaaacgaagaagaattgtccatatccaaagaggaagctgaccaggaacctttccactcatgaggttttaccagtgtggcaagtggaaagccttgttacctttaattataaacagcattgcttacttgttaaaaaaaaaatcaacaggcaatgaagtgtttgccagaaaatggatctaaatcaattggtaacaagtaattaaaagcagcttattgcttttgtttgggtctttcttttcctttgctctttattttgatattatttgcttaggaagcaaccttattcaaatgtttatttcaaataatttcaaattttcatttgtaggttatggagctttgtagcattaattcttatagaattaatgaaagaaaccaaaaaaggtgactggattctcagatcactctttttcttaaaaaataaaaatattttaagttctggggtacatgtgcaggatatgcaggtttgttccatagataaatgtgtgccatggtggtttgctgcacctctcaacccatcacctaggtattaagcccagcatgcattagctatttttcgtaatgctctccctcccccaccccatcccccaacaggccccagtgtgtgttgttcctgtccttgtgttcatgcgttctcattgctcagctcccacttataagtgggaatatgcagtgtttggttttctgttcctacattagttttctgaggataatggctttcttgctccatccatgtccctgcaaaggacatgatctccttcctttttatggctgcattgtattctatggtgtatccatctatccagtctatcattgatgggcatttgggttgattccacgtctttgctattgtgaatagtgctgcagtgaacatatgtgtgcacatatctttggaatagaatgatttatattcctttgggtttatacccagtaatgagattgctgggtcaaatcgtatttctggttctagatctttgaggaattgccacaccatcttccacagtggtgaacaataagtctgaatatctagtgtaaccagtattaaccattgtgtttacaaattatagtgttaattaatcattttcattgttaccaaatcacagtttatatgatgacacattttgatttcaaacacaagatctggaacatctgtctttcccactggtgaggctccctgttggagcgagggggatgtgggggagcaaaaactcatgttttctaatttatttctttgtataattatcattttcacataatcctaaatcgaacacttatggattgttattctgtgagtttgtgcacctgcatcccccttctatgtatggattatttgttaactcagtgttcatatattgctaacacctttgttcatacttgtgtagagatcattgtgatttccttaaaagtagatgtaaaaatcatcactgttctcaagcaagaaaaccttgaaaggcaaataccagtagatctaattaatatctctaaacaaaatacctttgttttgatggctgtctgagaatatcagtgaatagttgggatagggaagacctggaacacagagctaaccaaggagaaaaagaagttattggtatatattatgaaaaggggaatagcttttaattggattttttttctttttttcactgtgcagaatttacagaatatctatgatgtcctcaagtgggtctttactatttttcctcaattctgtcttggtcaaggactggtagaactctgctataatcagatcaaatatgacctgacccacaacttcggcattgattcctatgtgagtccctttgagatgaactttctgggctggatcttcgtgcaactggcctcgcagggcacagtacttctcctcttgagggttctgctacactgggaccttctgcgatggccaaggtgggttctgaaggactcatcctcgagctgcacttactcctgcaaaatgagaggaagagaaaaattcatcctggaggttgtaaaataaaaattatatctgatcagcattatacatagttcta

SEQ ID NO: 38195 - DNA, 2300 bp, Homo sapien
gtctgcagacatttttgattgtcacaactgtggagagaggatgctagtggactctagtgagtggagcagagacgctgctaaacatcctctaatgcacaggacaatcccccacaacaaagaattatacaatccaaaatgttcattgtgccaacattgagaaaccctatcctgaccgaggtctccacctttagcaaataaaaagacaggacacttagttaaatttgaatttgagataaacaacaaataatatgtatgtattatgtaacatataaataatacattagtatatatatgttcaattgactataaaaatgtggtgcttaatatgtcccaagtttttatgaggtatattttttctaaaaaaaaaatagttcatttgaaattcaaatttatttaggcatcctgcattttacctggcaaccctagatctatctcttgtacaagaatgtgacctattccatgaattctaagcttttctgcaacagaaggaaattttattttgtatgcagcttattgtgccattgcataggctttgtaataaagcatgtctcaatgcagattccatttctgacctactgtacaatcatggagaggttatttaatttctttaagccttagttacttcatatatgttatgggaataattatgacaacctcataggtttattgcaaaaaggaaataaaataatgtatgtaaaatgactagtattcataaaggataattatgatttttattattgatttattattttcctcagtaataccttgaagttctctgtcagcccaggttttatcaagattttttttctttgtaatatattcagtggatttatagcagcttgctttactagataacccaagaatgggttgagttttatcttttcttgtaatgtttgttgaagtaaaacacaatgatcaagggagcgaatcttgattatactcttcatcatttttctttacatagtgaacatactcatgggtatcatccagctcaaaacgcagaacgttgtcagcccccagagactctaccatgaccttttctattcattacacctctaaaaataatgaatatctttatgtccatcactatacattaggattttttttaatttatgatgaatggaattatgtgttaagtacccttttgtgtctggattttcttttcttttttaaaaaatatgttttcttcacattatgtctgtgaaatttgtcatgctgcatatagcagtagtttaatctttttgtttactgtatgacattccgtcatgtaaatatgcaaggctttattcacctattcaactgctgatgagcgtttgggcagtttccatagttttactattggaaatggtgcttttattaatattttgtatgagttttgatgcacatacaaatgcatttacattgggcagaacagttgtgatacaaggcatgcacaattttagggttaagtagatagctatacaattttgcatacagaatgcgctaatttatgttcctactaagagtatcagaaaatttcattgtcccacattgtctctacagttgagattgccactttttataaatgttaattcttatggtgggtaggtaatattatcacattgtggtttgaataacatttttctgacaataatgttgagcaccatttcaaatgcttattggccatagtaatatagcgttttttattattattatgccagcaaagcaggttcgccatgcaatggttatcatttcattccaaagcatcatgggctgcaatttctactccttgcacaagttcaggatacttacaaacacaggttacatgcagtagatttattacctatagacaactagaaagagacaacagaggcctaagattcatgacagcctgatcccagaggctcaggaaagctgccaggacatagtctcgtttgcgcatgccgcacttgcactgtagctcaggaaccttggaaacagttctcctgtttgtcaaacatcgccagacatccaattctaggagagattggaacagaacttgggctgctctggagagcccctctttatctcagaatgttgcattgttagcacattctatagttattcttgagaactatagacaagaaatgagagagaactgggatagtctaaggccacatggagatctgtcttgcactatgttgacttagtttagaggccccggctggagaggagtcaggcccttttcttgtggggtcaattaagtccgatcctcaattacctccttgtttgtctctcagacccttggccgctattcagtcgccatatgtgcctcggagcca

SEQ ID NO: 38196 - DNA, 2300 bp, Homo sapien
tttgggtgagaaaataaaactttctccatgcccaacaccctccacacacattggagttcaacagtaaaggtagaaggagcaaaagggattcaacaatgaaaaataaataacctctctgagaaaagtagagccctttactttcctcccacagagaagcggccatggacatatcttttcagatgtgtcaaaagagtctgttcctgtggctacctgaataacaaagacctaggcagaaatcattgagttgtagatacaaacactctcagactagccagacaattgcaggaggactggggaaggaagaataagatagtatctccggaacttaaggagaagatctcttgagaagcaaatgccaataactagagggaaaccacctcaggctgaaagggtagataacagtctccatcgtctctggtgccacgtggtcaatcattgttgtttctctctaggagtctgctttattactttttcttagaagcatggccttctcagcctacctttcacttatttcagatatggctacccagattaaattttacatgagcatttcactcggggaccgcaaagagaataaggaggggctctgggactcaagtttacctcatagaagaagggatctgagtggcccaacctggatgaagtgacttttctaatcagttgtctttaggatttttaaaattattataaacaggggtctaagtgttcatggatagtgtggtgactatacaagcaaattccaagagcaagactgtctcatatgaaaagtcgcatttcttagcaagaaccaggtctctagcaaagagcaaacattcagtaaattgtttctgaatctattaataaatgataagaaaaggcaagggaaatcaacatcctcactgcatgccttcagacgtgtgtttcctatcagatacgggtattccaacagaaactggagaaaagaaaatacaatgcattcactggacagaaatattgtggacggggggcaagcattgggacagtggtgagcaaaattattcttgaggtccccattaatcaaaatatttgtggcatccagaagcttgaatctttaaggacaaatatgaatctttacccatcttcttttactcttctctcctttctcctaaactaactctaatatatacatttacttttaaaatttcataaagcctatctaattgggaatttaggtctcactccttgtggacaccagaaggatataaatgattaggggaaatcccaccaaacagaaagggcaagaagatgtatgaatgagtagtaagctcaagaacaacccatcagtcctcttctttattttacccccaaaccaaaacttagggatgaagcttcacgaagctctcttttgtgaaggagagaggcctgttccgttgccaaggagtgcaaagctgcacattggctttgggatgacattgggtataaaatttatcacttgtgatatccctgtgtgatcttctacacacattgtttagcttctccaagacttttctttggaaagcccacatagaacagaaaaaagaaatgccatcttttaaactatctatttaactatcttgtggccccatgtttccaaggttggggtattgggagagttggtgaaagagcaatatgtcaacattaacttgtctccaagcaggcatgactttcaatatcaaatggtcacaacctccaacttttaatggatcctaaatgagtgcttcaaaaatactgtcatttggtaataaagtcatactcgaagtaacacttatttggctgaatttccagagactggagagaaggttaagatccaggtggttgctatgacaagagcatgatgacttattcatccaacactttgttgatgtcagtatgatatagcccttcagttcatggtttaaaaaagcaaagggagggcggttgcgggagggagcggggcaggcgctgtgggccaggcccctcctctggctcctgcaccaccgcctcttttcgggctccgccggctcccgccgtccctgcaatgccgctctgtgcccgccgtcctgagagcccgcgcggcactggcgccagccttggcggcgcgcgcggggccgtggtcgttgctccctgactggccgcggcggcctccaggaagcggaaaagcaaggggcggtcgagctgggccgccgcgccccactgctcgccgcgctgctctttgacctcgcagggtgtgaagaagatgcgcagctccacgctgcaggacccgcgccgccgggacccccaggacgacgtgtacgtggacatcaccgatcgccttcgttttgcca

SEQ ID NO: 38197 - DNA, 2300 bp, Homo sapien
ttctcaaactttcttctgtcattgatttctattcaactgtggctggagaatacactttgtatggcttcagcccttttacattgactgatgcttgtaagaattcatgtgtggtctatgctggagactgttccatgcgcgcttgagaggaatctgcactcgctgtggggtggagggttctctagatgtctgttaggtttacattgtttataatgttgttcaaatcaactattttcttactaatttctgcctagctattctacctaatattagaaagcaataacaagtattattaagcaactgttctattacagacattgaactaaatttgtgaccttatttctatgtatatgtctcaaaaataacgacaacaaagaatatagcaattcaaaaatattttaaaaataagtaactatgtacatggactatatcctattatgaaccaatttaaaagaccaaagtaaatatatcaaggctctgaaaataaggcataaagtggaaatcacagcacctaaatttaggaacatctggaaatctgtctgttctgccatagctgttggatggatggtcacaggtgcagtccattcccattacaggttaaataatgaggagagccatagcttcacatgttctgctgcttttttccccatccacaagtcttttctgtattaaacaactcaggacagctacttttggttgatgtattatcatatcacagatgcttgttactgtttgttctctggtatttgtgttcttttattatattttaagttctgagatacatgtgcagaatgtgcaggtttgttacattttttatgactttttatgattcgcgtgtgtttttgtgatgtgtgtgtatttttgtgattttgtgatttttgtgtacttgtgatttttacaagacagaattctacttgtaagtaggaattctgtaatgtaaatgggggacattatgtatttaccaaaaactcatgtctgtttctttctggtcttatttctacaccaattgtcctctacctcttggtctagagtctctacacttaaaaaattattgatgatccccaaaatgttattgtttatgtgttttctgagtgttgaaatcaattgtaatagaaattaaacaagtaaatttgaaaatatttattaattaatttaaaaataataaatctacaatgttaacttattttttcatgaaaaatgaatatatttaccaaaacagaaaaatatgagaaaagtgacattatatgtttgcagatttctttactgcctgaattaacagaagatagctggatttatgtacctgtttctattaatatagccaatctgtttcaattagtggttttggttgaaatatatgaaagtaaatgtgtcctcacacagatatgtagttggaaagtagagtaggatttcaaaagtattctcattgtagatattaattggagctacaattataggcatttttttcttggattctagatcaaaactggagaagagacagttcttaaaggttagttgcaatgaactttatatacatggtggcattaaagtccattgatctatcttgcatttgaatatatcttttatccacgcatgattgttgttacgtaatgatttggtcatttggaaaatattgattcaccggcttatgcaagtcttcctttaactgttagaaatgtaaaagcttggccgtgtgcggtggctcttgcctgtaatcccagcatttgggaggccgaggagggtggatcgcttgaggtcaggagttcaagaccagcctgacagggtgaaaacctgtctctactaaaaatacaaaaaattagctgggcatggtggcaggtgcctataatcccagctacttgggaggctgaggcagtagaattacttgaacctggtaggtggaggttgcagtgagccgagatcatgccactgcactccagcctgggtgacagagtgagactctgtctgaaaaaatcatgctgctataaagacacatgcacacgtatgtttattgcagcactcttcacaatagcaaagacttggaaccaacccaaatgtccaacaatgatagactggattaagaaaatggaggggaggagccaagatggccgaataggaacagctccggtctacagctcccagcgtgagcgacgcagaagacggtgatttctgcatttccatctgaggtaccgggttcatctcactagggagtgccagacagtgggcgcaggccagtgtgtgtgcgcaccgtgcgcgagccgaagcagggcgaggcattgcctcacctgggaagcgcaaggggtcaggga

SEQ ID NO: 38198 - DNA, 2300 bp, Homo sapien
ttcttattagtcacatgtgtttggggctaccccatcgtaaccacatgagagtactgttggcaaaacaaaacaaacaggatgtttaatgacaagaacagaattagctaataagtcaaataacaaaatttgtagcctaaccaatgctataaaagcacttgattttatagaaccgagggcccattttgcacattacatatgatcacacctcgagccgtgtttttattttggtggtgttgtgaaaggtgtgatatttggattagagcatcataaagacacagaagccataactgattagagcatgtgatgagaggcaggtgggtgggtaggcagctgcagccacagcaaatgtggcctgtctcttttctgagggtaacaagaaacgaaagggccgagtgtggtggctcacacctgtaatcccagcactttgagaggccgggtggatcatttgaggccaggagttcaagacaagcctgggcaacaaagcaagatcccatctctaccaaaaaaaaaaaacaaaaaaaaaacaaaagaaaaaacctaaacgaaacaaaacaaaacaaacaaacaaaaaattagccctgtgtggtgacctgtacacccagctcctccggagtctgaggcaggagtttgaggctgcagtgggccgtgatcatgccactgcactgaagcctgggtgacaaagtgagatcgtgtctctaaaacattaaaaaaaaaaaaaaaaggaaaaatgagagtgagaactgaaacagcagaagggctcaaatcatcctgtacatagaaatcctccatccaggccaggcgcggtggctcaccagcattttgggagaccgaggcaggaggatcacgaggtccggagatcgagaccatcatgtccaacatggtgaaaccccgtctcactaaaaatacaaaaacaaaattagctgggggtgatggcggacgactgtagtcccagctactcaggaggctgaggcggcagaaaggcatgaacccgggaatcgagcttgcagtaagtggagatcgcgccactgcgctccaggctaggccacagagcgagactccgtctgaaaaaaaaaaaaaagagagagagagagagaaagaaatcctccatccagccctgttggttgtgtatgtgttggagggggtggaggggcagccttctcaggctttcaaggagggctccctagcacctcagctaagatttgtttgtctatactattaaaagatagacataactgtgtcccaaaccagcctccccagttcccaccagccagagcgcctgaccttgcagggaagcttatctgtttaccgtccgagcactttcagggattctaaaatgccgtgagtgggaaccactgccatgggccatttccatgaaaattcaatttcggggattaatttgaacaggtactattgacgttttctcgtttacacaagatcaaagagtaaaaacaaccgggcctctgcttaacagttgaggattctagcaaagttaggaaacaggtttctatttgtagtagaagagagagcaggcagaaagaggaagatgggagcggggagagattggcagagattcagaaagttcgcgcttgagatttttacgtttcttactcgtaaacgtctatttctctgggtttctgaatgcaaagacgagaaagtctcaacagtctgctaaactaacacggccttcgaatcccaatctgaacacagtagctgaaacaagctgtccacaaagaggaaagccagagggggccaattaggaaggaagaaattaaagaaaagagaaaagccaagatgaaaggtccagcgcaaagtgaatgactcgactggagaatggcagccctggcagggtctgcggccggctgcggaggtggggacgcggccgcgcggacgagtgacaggttggtccggcgcagcaaagggagcgggtgcggcggtagggcctctccgggggcagcgcgagggcctcccccggggcagcgcgggccaaggcggggcctccagagcgggggcagcagaggagggagcggaacgggagccgggcggaggcggctgcggcagggggaggcgggaggcgggcgcgctagctcccatgctggcctcggtgccactcgcgcgccggccgcgctccgggcttctcttttccctccgacgcgccacggctgcccagacattccggctgccgggtctggagagctccccgaacccctccgcggagaggagcgaggcggcgccagggtggcccccggggcgcgcttggtctcggagaagcggggacgaggccggaggatgagcgactgagg

SEQ ID NO: 38199 - DNA, 2300 bp, Homo sapien
cggctaattttttgtatttttagtagagatggggtttcactgtgttagccaggatggtctcgatctcctgaccttgtgatctgcccgcctcggcctcccaaagtgctgggattacaggtgtgagccactgtgcccagccctagtatatctaatttttaagaaaaacagaaaattataatgaaagtacaggtacatctttacatgccctaaattatctttacttcccttaaatttgccatggtgtccagagtaagaacagtaagagttttaagttcattttaggaaaccacaatgggtatcagttaactgtctacacacaaaatatcatttaaatcactaatgtattggttcacttaaaagctctttcacctggataatttcatcttgcatgaactactataagaggaaatgcaaatattagaatttggggtaaaagttcacatcatccttactgcagcaaaaatgttaaaacaggcaagattctagctttgaagagtcaggcacataatcgttaatcaggccaactgtcaagggtgatatgtttggtacaatcagaatgcctatgccccattgaaagtctttacaattttgagatatactattaaacaagtgagattaaattaggtggttaggctgtcagttttaaatccttcatccagatcatagcatatcaagtgacagtttttagtccacccatgatcactcatttcttcatatcaaaagtgataactcacttgtaattaggcattctacatttagttgctcaaacttcattcttcaatgtatttaaaccaactgcttaagatttatttctatcacagctctgctcccattaagtaaatccttccagcagcagaaaagtagaggcatgagtctctttcaatttctctaaaacaagttctagctataaatggcctcttaggctgtgtatgggaaaataataacccccataactttgtacttagaatggatcctttacaagagacagattaacaagagaaaaacagatgtttattaatatatttcatttatatatgaggaacacccagagaatgagtagttctcaaagaagcgtctttgaattccagcttgtatagcatcttcaacaaagactaggaaatttttagagatgtgacaaaggaaaaggactctgagtctctacaggcagtaacttgggctaagcaaacaaatagcagacaaaagatggtttaaaaaaagctaatattaattcctctgatatcatttcaaggctaatgagggtctgacgctgtcttcagtggttaacctttgttctccctggtaaaggagtggggcaggataccttttctctttctaatctatgtcttgcttctgggtaaaaagagggcaggtggacagctctcctgcatctgctggttcttgtcttcagggcagcaatccttcatatttgagaaggtatattctggtctcccacacaggatagatggttttgtatgttttgctgaatttaggtgacactataagatgatcttccggtctattttagaaagtaaatttcatctatggttatttcctctgtccttccatcaagcttctttctgaggctaaaggccttacttacctttaattcccactaagtgtgtattgcatttatctcccaattaagttccacacatccataaaatactatctgctgacattactagatcaaagcagtccactgagggctttacacgtcttaactcatgcattctcactatctgttgttcgaaactgggccccacatctaccacctggctcataaaaagggcttttcgatcataaacgctatgcaaaggtaaaagcacgggatttggggcccaacgattctctctcagctctaggatcttggacaaatcactgatgttcttgaggatgccctgcgtggctgtgttgtcctgaaggcccgggggctgcacagcacagttggcgcgtgtaggccccaccagctatgtggagacacaggctgacccctagtctaccaccccggcggaagtgggagcacgtccatcaggtccgttgttccggtcctccgcccgccaacttccggctgcaggtgggcgcgcgttgcctaacgaccttccgcgcggacggtgggcaggcgacggcggcgtgtggatggaggccttcgcccttggcccagcgcggcggggcaggcggcggacccgggccgccggctccctgctctctcgggccgccatcctcctctttatctccgccttcctggtgcgggtgccctcatcaggtgagggtccgcgccgccctgccggctccgcagggac

SEQ ID NO: 38200 - DNA, 2300 bp, Homo sapien
tgagttaactggctcagacttgcccagcggaatgcccttcaggacacactgagtactgtagtaagagctgcatatgcgctcagggagaatgtggatagacgctgtttgtgattcacgggtaaagggccttctcccagaggcagcagaggcagatcctgtctctggtgtgccctggcccccgacttggaggcctcctgggccaggccaagaccttccccggcagcgatggtctccagccacactcaactgccctgaagggacatttcctgcttattcccttgcccggctgtgtcctccacccggaaggcctgtgccttcttcgcctgcatgtcctaccctgaggaggctcccttggtctttcatcgctctccctatgggtcttcacgccttcccgaaccaccgcgcccaagcaggagcacgttctcggccctcttcacagggcgctcctcctcacaggggtgcccgggatttttattctgtgccttcctggtggctcctacaagtctggaagggcaggaggcgcatctcactcctctgggtcccctcccctagcgcctggcgggagcccaggctgcatttgtggaattcatgactttttctctcctgctcaagctgaacacattgctggctcctgctcgggtggagcccggctaattagagtgaggggctccccgtagggcgaaggggtgcgctgtcagatgtggcattcccgttttacggagacacacggtgtcttacacgccagggagaggtctgagacgcaaagagccgtcgagcgggctgcgggattgcttcgctgtcacctccgcctgcagccacccttccgcacgcacttgtgtgtgcacccaggccaacatggaaggcgccatcctaacttctgccgtgagcaggtgggagggaagagagacgagaggtattccattggttgtctgggaaaatgaattgcaccttcccctcccttgcggaggatcaacttttcccaccccctcgggtgggcactcgcatcctggggccggagcctgaacccgggagccaaggggccccagttccagggacgtgaagctgagcgtacagcgggcgctcccagacactggggaaagtgctttacgatgtcccgagtccctccagtctcgccagcggggcgagcgtgagggtgccccgaccgaccagcggccccgggtgcagggtggcgggcccggcggcgcgcgtccccctccccctcctggcggcccgcacgtgtcgcccgcgccgcgcccccacgggttacgcgcgggtcccgcagcgccgcggccgagccgggctgcccggcccgcggacacagcgccggccgccgcatcccgtgcggggccgcggcgcgatgctgcgctggaatgaggaagcgcggcggcgaggggagggcccgggcgcggtgcgcgcgggggtggcggcggcgcgccgagcgggcccggcgcgggcgagcgggctgcagccggcggcggcgccagcaggtacggcccgcacccgccgccgccccggcggcctttgggggctgagccggagcccggcgcgattgcaaagttttcgtgcgcggcccctctggcccggagttgcggctgagacgcgcgccgcgcgagccgggggactcggcgacggggcggggacgggacgacgcaccctctccgtgtcccgctctgcgcccttctgcgcgccccgctccctgtaccggagcagcgatccgggaggcggccgagaggtgcgcgcggggccgagccggctgcggggcaggtcgagcagggaccgccagcgtgcgtcaccccaaagtttgcggggtggcagggcgcgcgctctggccacccgccgctctgggcggcagcaggtggcaacgcaagggcgcggcgggggcggccggcgcggagggggccaggtacgcggcccgcgggcggcgctgtgcgcgcggggcagccggtcggccgggagcgcgaaagcctggtctgagccggctgggggcggggagtgtggcggagaaatggggaacaatgcgagtgagcaacttcaggaagtcattgtgaaagaaagctgggaagagctccgcggccaagttagcaggacactctaacaagtgactgcgcggcccgcgcccggggcggtgactgcggcaagccccctgggtccccgcgcggcgcatcccagcctgggcgggacgctcggccgcggcgaggcgggcaagcctggcagggcagagggagccccggctccgaggttgctcttcgcacccgaggatcagtcttggccccaaagcgcgacgcacaaatccacgtgag

SEQ ID NO: 38201 - DNA, 2300 bp, Homo sapien
aagagaagatcagctgtggccgtttgtagccatttcctttgtcgaaaaactaagatcgcagtgaatgtattagccaagaggtctaaagccctgttgtactgcaggccactgtcttccttgtttgactagagacttggagtttgagaacagtggttctttggtttggatacattttttgttcttgatttggatgtgtgtgtttcatgcgtggttaatatagcatattttcaatataaatgtcaaaaattttgaaataggaaagaactctctatatattaatgtacttatacacacacttcaagattatgcatttattaacagatacatgaaataaattccatgtgcatatgcacatatgcacacagagcgtgcacacacacagcatgcacacagcgtggagtgagaggcatggggcagtgtggaagagttttaacatcaaacagacctgaaatgagtattaaaggccccctttatttttaaacttttactaaaacaagatggatttccctatgttatataatggtgaattttaggcataaataacgttttttgagtgttgcataattgtacgtattaatgtaatgtaactgtggttaacgaagaattcatcaaggatatcactgttttgtggcattttttttttcctcctctaatctttggacttgtgaaataatttcactatgaaataaatgttggttcttgtcatattctaagggagattgatgtaagtggctccactccagcttacagaaggtaaaccacgacctttttgcgttctctgaaaacgcttgtcttccgatgcctctgtttctaagactgacaagcactctgggggcactgtgacgcctgcttctagcggcagagttgctgcagctcctgtcctggctgtgaacattgttctctctctggtgtctctatgttcataactacagagacttcagctctattccatttcatatttgtgctgaataatcattccattttatgggagaaaacacaagatgtaaaagcaacaagtgacccatcctttgaagcttacaagaagagaaacattaatctatttcacgtcttgaaaacagatcagttttattttgctcaaaaagggcacatgtacatttttgatctaggtcttagaaacgtagagtttcagaggatcagcattatacacactgtcacacacacacacacttaaaattcagatgaggaacaagataggaatgaggttttgttagggacgcagagcacctaaaaccaaaggatatcgacagtaacaaagctgtttttactgtagtgctgactgaacactcatgctggtgtcttcatgtggaccatggctttcttgtatttctttgcagtttaataaatgacttcatatctcaggttacctttccacatctcctggaatatatgtttatgtccttaaagtttcagtgtcgtcactttagtagctttagtttgagtttttaaatgtttggtaatattccaacaaatattttttaagacattatgaaaccttatgaagtgccatatattacaagtgagataaaacagcaagcaaaagaaggtttgcagaaggtttttaagtggcgaagtgcgggcctgcccattttggtgtctccttggtggttactcctgagaagggcctggaggaagagcaactgaggcctaatctacaggcaactgccaaattgtttcagttgacgtttttccctctcatgtttgactataataaataggtagttgccagtggagccttcagccaaccacctggtaataaactgttaaaaatggtgcaaaccctaggtcacaggtgtgggggccatttgtcttgcctgttaacaggcctggccttaattcttttctcccatggccatttctgcctttggggaactcacaattcctgttgactaaaagagcacccttttccaccacaagcctgacaaatcagacgtccacataatttctgaactcgttttggttaggacaggaagcacaggctcccttcctgtctgtgttttcctaagagaaaacggtcttccctccttttttgcatatttggcaagtggttccacctttctctgcaccctggtggagtgtgaaggcagcagaggaaccttttggaggaggaagaggacacagaggccctgtagccaggcaccaagatccctcccaggtggctgggtctgaggggaactccgagcagccctaggtcctcaaagtctggatttgtgtggaaaaggcagctctcacttggccttggcgaggcctcggttggttggtgagtgccacacggtttcttt

SEQ ID NO: 38202 - DNA, 2300 bp, Homo sapien
gcagttaccttccagctctgccacttgccagctatgtgaccttagcaagttgttcaacctctctgtgccttggcttcttcaactgtaaaataggataatgatagcacttcccttatggagtccttgtgaaggttaaatggcagagtacaattaatgtgctgtgtgcccagcgtgtggtattggggttaggtgaaagactgtactgggatcactgggggtgagcctccatgtgccatgccccaaccactatcctcagctaacttcttgtctgtcagtgttaggctggtgctataataatttccattttcatggatgaggaaatcaaggcacagagaagttacatgacttgcctaagatctcagtgcttttaaatagtgcagctaagattccagaccaggtatttttatttcagtgtctggactgtagatctctaaatcgagaggaactccctgaataaaataagcttggagtgctgttaactaagttggttatttaagacagttgttctcagtcctcagtgtacattagaatcttctggagggtatgttaaaacagactgctgggcccaccgagagttcctgagcctgcaactctgggttgagcctgagagtctgtgcttctagtaagttctcaggtgatgcttatgctgcttctcccaaattttgagaaccattgattgaaaatgttgatcaaaaattatgtggtctaggctgagcacagtggctcacaactgtaatctcaacactttgggaggccaagtcaggtggatcactgagctcaggagttcgagagcagcctggtcaacatgacaagacccatctctacaaaaaacaccaaaaaaaaatggctggatgtggtggtgcacacctgtagtcacaactactggggaggctgaggtgggaggatcacttgagcccgggagacagagcaagaccctgtctcaaaaaagaaacatttagtcttgattgtcatctatctcattgatcattttacttggcaaaatttacctacttactcttattagtctgtaaaaatggttattaaaatggtggctttcagtgtaactacaaattctcttagtcattatagtgttggattcaccaatgtatcatcagtcagtgtttctgaagtgtgtaaatgaaataactcctactttctttaggaagaaaaatattcaaatgacataattaccttgtgatgtgtgacttaaaggtaacagtaatgcagagtcaatagtggtcattgtattcaagacactaaaagttcacctcccaccccccccccccacccaccacccaacaaacacacaagcttctttccctttggaaaaaaaagctcttccagatacctacattcataaactatcccaattaacccttcagcaagtggaagaagtgtaagaaaggatacctcttctttagaacacagggtttgtttttatgttatttaagataaacaggaattcaaatggtcatgtaccaaagcaacacaaagaacttccggaaatctgaaagggaactgtggtcagaactctgagcatttttatgtttactgagttttgtcccaaagtttattaatgtttacatgccacaaggaaaggtagcatcacaataagagacgtttttcaggcttgataaccacttattaggtattttgccaaacaagttcacacatcctagagagctggattgtgtgacccagaacccaccctctagggcaaggtgcccatctgatgggtagggtgtaggagtaggcctcagaccactcctgacgtgaacctgcttaaagtgagggcccaattctaaagtgggaactatgtaaatacctttctagtgcattttcagataatcgccactgggcctatggatggagagggctggcagatctccctgtaaccccaggtgcatcccgaggcctgccaccgaagcccactcaaggctgaatgcacggcgagctcaggctgctctccccttggtatttgctaagaacttctgtttagtagctctccacacctatttgattgtctttttgctgctgtgttgttttgttgagttttttttttgcaatgacactgagtggcctcctgtattgtttctttcagccagtaatgttaaagtagagactcagagtgatgaagagaatgggcgtgcctgtgaaatgaatggggaagaatgtgcggaggatttacgaatgcttgatgcctcgggagagaaaatgaatggctcccacagggaccaaggcagctcggctttgtcgggagttggaggcattcgacttcctaacggaaaactaaagtgtga

SEQ ID NO: 38203 - DNA, 2300 bp, Homo sapien
cagactcatccaggattaggaagctggggcccggcgtggacggcaggctcggggccaggtctgcgggcggcttcctttggcagagcctgtccgggggcggggccgcttaccgcaggcatttactgggcccagcggggctctgggcgcccacagcgggggtcagtcagttcccctgtgacccaggcaagctcttaatctctgtgatgagaaagaagggctcatacctttcaggggtcatcgtgaggaatcagaagaagcagtattttatagagtattttctaagtgctgagtcctctgtctagtgctttgcagaattaaaataccttgtcagctcagtgatgttgctgcgcttcttttataggtgaaaaccggcagaaagacattaagagattttcctgcagtcactgctggcagatgatagagccaggatttgaaagcaggcagcctggctccagaccctgtgctcttaactcccgttttgcatcaagaacagaatcctatgaaaggcttgcacagtgcttggtactgagtaggcactccgtcagtattttagtagctattattccaaaggacactgtattctaggtactaagacaatgtgaatggaatggaaaacaattcctccctgcagaagccaactgtctaggaagacagataatgacattattaaaataatcagaacattggcaaaataaagaagattgaaatgcagttcatatgacagtgctaattaatcatactttttagatctaggaaaggccataaaggttaaattgacttggaaatggtaaacaagacaatggttgtgtcactgatcggtgatggccagtttttggttatccttatttgccatttaaatgattgaattgaaaggaagaagtaagacttggaagatgaatattgaaggaaaggtgaagatggaaaagagaagggggtttattctgagaacagtgactagaactctgaggtatggtagaaatttcaggataacagatgataaaggggaatgaagccatggagaggaagagaatgataatattaattgtgaaagtttgtgtcaagtgttttctgagtcacctttctttcagtttctcatttctagtattgtataaatgagtttaacatcaaaatggtatagtgaaaaaaaggatgaactgcttgacagaagaggtcagatctagttttgactctagcttatttagctttacagctttaaataaattacagtgtctttaaagctctggatcttaagttttctaattgttttttaaacaaagatttgtgaacacctacttacaatgtgacaaatgtctttgtaaggcattatgggagataaaagctgcattaaacctggctgttgtacttacaagtaatttggaaggcaaaatttcaaatacttgaacctaaagtagggtttcttggttttcatttaattgaaatactgttaggaaacaaaaatttttcataaatttttcttgtggatatgtaagtaaattctatatatctagcaatatgatacatctatagttctgtttaaaggtaacaatgtgaggaagcttatgcgaataacttgacagaagaaatctaaagtaaaagcattttcctagtaggctagcttgttctcttatttcatttattgtaacagtttcactttttaataattatgtgaaattaggaaacagatattctagggcattctgtttagggtgatgaacttattcatgaatgttattaaaaccatttaaatatgccatagtttaaatttgtgatccatgctgttcaatctgtgacctaggatagcagcatcaaggagcattgtgtacatgcagaagtgcacagtacctggagtgaaactgcttgtgttcgatttctgataccattcataactggctgtgtgatctcaagtaagttctttaagtctctcagcctcggtttgtacatttgtgtgataaggataatgatagttttcagattattttcatagtcattgcttgatttgattcttccaatggttcctctcactttgcagataagaaaactgaagaaccagctgggcgcggtagctcacgcctgtaatcccagcactttgggaggctgaggcgggtggattacctgaggtcaggagttcaagaccagcctgactaacatggcgaaaccccatctctactaaaaatataaaaattatccaggggtggtggcaggtgcctgtaatcccagctacttgggaagctggggcaggagaagcacttgaacccgcgaggtggaggttgcagtgagctgagagcgccactgccctccag

SEQ ID NO: 38204 - DNA, 2300 bp, Homo sapien
gtcttctagtttttaaagtgcattgtccaattcctttttattttgtgaagattttaaaaacttaaaaaaagtcttcaaattgtttgtgccttgcatttctttaaatcttatgtttaaacatcatgtgctgctagttgctagtcattttctctatcccctgccccagaccctctctttctcaggaaaggatatccagggatccgggtcccagttagtcaaggagatataagaggaaggctatgaggctttctgggaaacattttctttttccaagagagaagtgttcagagggaaaaggtcctttctcagtttggctccctctttgtgttttagatctggtcatgtgaggctgcctggcttggattgtgagggcatctctcgacaatgaagtgacaagcctggggaggaaaatccacaggcgagaaggtggcagaatggagagatggtccttcatgacttctttgagtcaccaggtccagatttcccgccaacctccagtcttcttgttatgtgatctgatatcattatttactgcagaggccactgagtggatgctcttacttgtgtctgaaaatccaattcactaaattaatcaaaatacggcactcttcttttgaaaccttgctccagaacaaagtggaaggtaatgatggggtgcttttcaaagttccagggaggtgtccctacacagcagacagctgtccaaaggaatgtagatgttggctgcggggagatctgagttgccagactcagtcagaacaggtgtcctctcccttattttatcttaaacatgcatgtcatttttgcatgctactctatgcggttctttcagccagggaacattgctgagcacccgctcacgtgctgtatggagcgcagactgcagggtgcgaggggcggaggtgatgtgctaggcctgaattcaagagggggcgcagccacaggccccgcgatgccggggtggcctcttgtaacgacgttttaaccgctgacctaagtggatccgctcctctcccgccgcccgctccctgcctgcagcacaggatggcggctggctttcccgagtgggcgcaggtgagccacgcttgctctcccgggtgggcgcaggtgagccattgtttgctctcccgggtgggcgcaggagagccacgctttgctctcccaggtgagccgccgctcgctgtcccggtgaggggaagtgagccacgctctatgggaatccttcgaatcttcattcaatttccatcgcctccttgtatttatttgggagtacttttaaaaatgaagcctatgcacaatgatgtaataagcgtttatagaacaccactggtcggagctagggcctaggtggcggtgcccgggcccaggtgccgcgcccacgccccgcgcgccgaacgcacgcacgcacgcactcacgcactcacgcacgcacgtacggcgcgagtccgagggcgacagcagcgcgcaggcgcacgtcagtccccgcgcttttcggaggctgccagcgtcccacaccagccgcaggtaggatgcggtgacgggaggcggggcaggggcgctgctgacccctgtggagcatcagggttggggcgtaggggagaggcgggcgtgtgcctctggaatgctgggggtcgcggggcggtgacttcgcgggaggccgtgggaggcgggagccaggcagtggctgtgcccttttgcttctgtcttagcgggagggtggctgacccgctagcccagaaccagactcatccaggattaggaagctggggcccggcgtggacggcaggctcggggccaggtctgcgggcggcttcctttggcagagcctgtccgggggcggggccgcttaccgcaggcatttactgggcccagcggggctctgggcgcccacagcgggggtcagtcagttcccctgtgacccaggcaagctcttaatctctgtgatgagaaagaagggctcatacctttcaggggtcatcgtgaggaatcagaagaagcagtattttatagagtattttctaagtgctgagtcctctgtctagtgctttgcagaattaaaataccttgtcagctcagtgatgttgctgcgcttcttttataggtgaaaaccggcagaaagacattaagagattttcctgcagtcactgctggcagatgatagagccaggatttgaaagcaggcagcctggctccagaccctgtgctcttaactcccgttttgcatcaagaacagaatcctatgaaaggcttgcacagtgcttggtactgagtaggcactccgtcagtattttagtagctat

SEQ ID NO: 38205 - DNA, 2300 bp, Homo sapien
tcctgggttcaagcaattctcaggcctcagcctcctaagtagctgggattacaggtgcccaccacaacacctggctaatttttgtatttttagtagagacagggttttgccatgttggccaggctggtctcgaactcctgaccccaggcgatccacctgcctcggcctcccaaagtgctgggattacaggcatgagacactgcacccagcctctggagtctcttttataaggatacttactattctcatccatgaagtctccactctcatgacctaatcacctcacaaaggccccgccccttaaaaccatcacattgggcttaggatttcaacatacaaattttggggggacataaactttccatccctaacattacccaaatagtatctatatagtcatttctaaatatacacgtatttagaaatttctaaatagccagtaaacatacaactgacttggccttgatataactgttttcattttcttttattttcattctacatgacatattttgggtaattataaaataattaaaattagttgataaagtatggaattagaataaaataattttctattactatctaagccatgaaatgaattaggagatgctgttttcagtgaaacgtcttctagtttttaaagtgcattgtccaattcctttttattttgtgaagattttaaaaacttaaaaaaagtcttcaaattgtttgtgccttgcatttctttaaatcttatgtttaaacatcatgtgctgctagttgctagtcattttctctatcccctgccccagaccctctctttctcaggaaaggatatccagggatccgggtcccagttagtcaaggagatataagaggaaggctatgaggctttctgggaaacattttctttttccaagagagaagtgttcagagggaaaaggtcctttctcagtttggctccctctttgtgttttagatctggtcatgtgaggctgcctggcttggattgtgagggcatctctcgacaatgaagtgacaagcctggggaggaaaatccacaggcgagaaggtggcagaatggagagatggtccttcatgacttctttgagtcaccaggtccagatttcccgccaacctccagtcttcttgttatgtgatctgatatcattatttactgcagaggccactgagtggatgctcttacttgtgtctgaaaatccaattcactaaattaatcaaaatacggcactcttcttttgaaaccttgctccagaacaaagtggaaggtaatgatggggtgcttttcaaagttccagggaggtgtccctacacagcagacagctgtccaaaggaatgtagatgttggctgcggggagatctgagttgccagactcagtcagaacaggtgtcctctcccttattttatcttaaacatgcatgtcatttttgcatgctactctatgcggttctttcagccagggaacattgctgagcacccgctcacgtgctgtatggagcgcagactgcagggtgcgaggggcggaggtgatgtgctaggcctgaattcaagagggggcgcagccacaggccccgcgatgccggggtggcctcttgtaacgacgttttaaccgctgacctaagtggatccgctcctctcccgccgcccgctccctgcctgcagcacaggatggcggctggctttcccgagtgggcgcaggtgagccacgcttgctctcccgggtgggcgcaggtgagccattgtttgctctcccgggtgggcgcaggagagccacgctttgctctcccaggtgagccgccgctcgctgtcccggtgaggggaagtgagccacgctctatgggaatccttcgaatcttcattcaatttccatcgcctccttgtatttatttgggagtacttttaaaaatgaagcctatgcacaatgatgtaataagcgtttatagaacaccactggtcggagctagggcctaggtggcggtgcccgggcccaggtgccgcgcccacgccccgcgcgccgaacgcacgcacgcacgcactcacgcactcacgcacgcacgtacggcgcgagtccgagggcgacagcagcgcgcaggcgcacgtcagtccccgcgcttttcggaggctgccagcgtcccacaccagccgcaggtaggatgcggtgacgggaggcggggcaggggcgctgctgacccctgtggagcatcagggttggggcgtaggggagaggcgggcgtgtgcctctggaatgctgggggtcgcggggcggtgacttcgcgggaggccgtgggaggcggga

SEQ ID NO: 38206 - DNA, 2300 bp, Homo sapien
ctgctcctgtctctatcagaggagaacggcccagggcaccagcatgcaagcctgactctgcgttcatattcactcggacagagcgatttgcatttgtttataaaataggggtgcattttccttgagactaagagatgccttaaagggtttcttttgattcctaatgacacgggctgaattgtgtccccaaaaattcatgtgttgaagccctaacccccaggacctcagatgtgaccatatttggagataggctttttagagaggtaattaaaagaaaatggggtcacatggctgggctctaatccaatctgacatgtttctgataatatgaaatttgcctataatcccagcactttgggaggcagaggagggtcgatcacttgagccccggagttcgagaccagcctgggcaacataccgaaaccctgtatctataaaaatacaaaaattagccaggcatggtggcgtgcctggtagtcccagctactcgagaggctgaggtgggaggatgacttgagcctgggaggcggaggttgcagtgagccgcaattacaacactgcactccagcctgggcgacagagtgagacccagtctcaaaaaaataaataaataaaaagaaggggaaatgtggcccccagacatgtgggtgcacagagggaagaccatgtgaggacacagggagaaggtggccatctgcaagcccaggagagaggccccaggagaaccaaccctgtggacactttgattttggacttgcagccttcgggactgtgagaaaagaaattcttcttcgatccacccagtcagtggtattttgttagggaacccctggcaaactaatggattcagggcctgctatgttatcccatttaagttgtaaaaataatcccatttttgtgttttatcatcttcaggtggggaaacagatgtgcagagaggttcactaacttgccccaaatcagcagctaggtagggcacggttaggagtgagcccacgcctgcgctttttagggtgccatgggcctagaaaggtaggggcagcgagcaccttccctcttaagtaagtcgtagaagaaacccatctaccgaccagtatgaaaggacattagaaagggcaaataaaagaaggtaggttcttgttgactctgaaaaagtttataacatgataggtttttacagagaaatatataataaaataattaagtagaaatgctaacctctcttcttaacatttgatgctctcttcattgaccctgatttctcattttgactttgccttgacactacttttacttattcttttgagccaacccacatcctttggtgggacagtaatattgaaagataaatacatttattcatgtttctgtagcactaatggatgggttcaaatatacagatatatgcgtctcttaattcagcatctaaaatgggtactttatttccttcaggctatattttcatgagcaatgattttagacattgttttaggccaggtttacaaaccttggccagaggagagagaaggggagaaaccaattttggctggcaaagctaaatcagccatcccaggaaacccaggctccctgagagcaggcattgtaccttacttacacttctcctatgtaccccatcattcctgtccctgatttcctcctgtccccctatctgcccccacacacattttgtttgtcatgtcccacccattctcattggaaatgtaacatgaaaagcctggtggaaggcacaattccctgttctgatgcttgacaagcaggcgtgactgcagcttccccggctaaattctaccctctgcttgaagcgttggaacgcaggtgttcattctctgaacattctaatgaaatgagtcaccatgaatcacctgaatcaccatgacaactcattatggcttttctctggggggggatgggggagcttagttcatgtcctaagagaaaattcaccttcttaagtcaacaaaatgatgttttaaaagcctgaaggagcaaatcgtcagtagcacatctagaaccacaccaccccgatgccaccagggtggcctggtggcctcaagcatgatgtcaggtggagctctctgcactttgctggcagcagatcttcgcggagagaagcacggggagggtgacatgtggtacagagcaggaacgatggctctgtgcgatagcagcagacaaaggttgccatggcaagcctgctcaggaggtaggaggggatgctggtaaggtctgacgcttctggctgctgatgccgtgagcagaaatgtcctttcatcttcagt

SEQ ID NO: 38207 - DNA, 2300 bp, Homo sapien
caccctgccacccaggctggagtgcagtggcacagtctcagctcgctgcaacttccacctctcaagttcaagcagttctcctgcctcagcctcctgagtagctggaattacaagtgcctgccactgtgcccagctcatttttgtatttttagtagaggtgggatttcatcatgctggccagggtggtctcgaactcctgacctcaggtgatgtgcccaccttggcctcccaaaggctgggattacaggcatgagccactgggcccggcagtctggacatttttttaatagctactgaataactcatgtatcaaagaaaaacaaaatagagattaaatactatttatacataaatgataataaaatatcagcacctcctcatacctgtgtccccctggtgtgtagcccaagccgtgtgcagggtgaagggcacacatccagggagcagtgcagccccagctccgccctgtaggagccctgtgctcagtcacccactgcagcccccaagctcctggccagtcctccctgaccagggctctttctcatgggtgcattgccaggggcaagaaagtgggagtctgtgttcctcaggacagaggagtttcagctcaagaagtgcctggctgtccagcttgacactgtcccctcccacagacctccaatgctcacggctggggcctgcctctcctctgtggtcatggctgaactcacagtgtttggggggatgagccaccttgctgctggcttctggctccccctggatggtgacgcttgggcagctcccatcttgccctctgtgcagatggggcctaatctccttactgcctccattgtccacatggctgctgcctgcaggtccctgcacggctgctggagggagctgcttatgcacaggctgagaccaggatcccctcacttgtaccacctgccaggtccccgccctgcagcccctgcactcatggcatgttctgctgcctggaaggccgctgcctctgtcccagttccatggggatctctgctctagaggggtagcttcttccttgaaaagatgctgcttaaagtcagaggatggatggctctccttggggcatttctagctctggactgtgccacaagccctggatgtggtatgtgtatgtgtgtgtatgcatgcacttaggtatgtgtgtgtgtgcatgtgtgtgtggtatgcatgcatatatgcatgtgctattgtacgtgtgtagtgtgtataaacatgcatgcatgtatgcttgtgtatgtgtgtgcatgcataagtgtgcatggtgtgtgtgcatgtgtgtgtggtcggggcaggggcacctgcaggctgctcgtcatctgagtggaccctgttctccactcttcctcctctgcaaagcccaggcccctttcctagcttcacatgactctgcgtgcaccttcaggagaaacggagtcctgctccttctattgcacccatcaaccaggagtggggggagggggtggaggtggggaagatgatcctccctgttgctgccccatggtgggaggagagactgagcccaaaccatgttttagatgctgataggcttaagggtaacagcacaggagtttgagatgcatgcggctcaacacctaatctacatctcacttcactttctcatctggggaagtgggcttgggaccctgagcctcccgggtatcacagggtcctaatagtccctcacagaaggagcagacccagagtgagcactccccaaatgccacgccgtcccttcctcacccttggagtggagcctggtcgttctcaaagttgctgggagagtcccaggagccctggccccaaatctgcatcctacacagtgcctgggaacacagggcccattttttccttggcctctcgccagtcccagcaggccctgatgctcctctccatcctgctaggatggctctctccccctgggggcagagtgggggcaggaggtggtgggagggtggagggatgctgctcagtaaataatgcagagccggcagctctgattggcttcggggaggcagacactctgtctacataaatggcaatcacatcttctgtgcctcttaactgtcactgtggagaggagagagagaggacagagagcaagtcactcccggctgcctgtgagtactgctctttgtcctcatggctcacgcgtccagctctctggatggccgtgaccctggggtttggggtgggaggtttgccggttgattctagctgtgctgaattctcctcctgcaggaggaaggaggttcggctgacagggacagctgagcatt

SEQ ID NO: 38208 - DNA, 2300 bp, Homo sapien
tatttccagttttctggagaaacctgactgataaagtgccatggttgggaaatcctgccctagatttctttctttggtcctcgaagcctcacccctattccccataaatcccacacctgcaagaagaaaggaaatgtaaaaagagtcccttctgggaacggatgctgattcctatgtagatttctctattgagagataactgttgctcagtagttggacactactagttcacttttttgaggatttcaaaactgaggtctctcttctctatggatgttttttttccagtcctattgcttcaaatatcatctaaacactttcaacccataactttatttcctgtctgggcctctttttctgagctgtactggacatctcaaatcacacgatttgtggatatctgaaatttaattcccaaactgaatccttggtgtccttcacctccccacacccaatactggtccaccccagtcttcttcctctcagtctatgaccgtcatcccctgcccactggcttcatcactgggtagtcgttccatccccttgactcctccccttgtccagcaacctcctaacatgcacacacacacacgcacttatggggaatattagcacgcttcttcatctcaagccccccctccctcccccagcccatctcctagaatggattcacttgaattcactcctggtttgcaggaaagtgcagaaatccaaggaatgtggtgggaattggtggtccaacttaaagggtctaaccctttcacccttatctccctctgatccattttctaccccagagccagagtgatcttaaaccataagtaagctaaggttactgctttctagaaacacttcaatgccttctattacagttggggggatacaaattacgtaacgtggcttgcaagactccccctcccctactttgaatggtccttaggagttggccttctgtcagggcctgggagatgccgagcttgatcctcagtaactttgcagaggctgttccctctttggagcccttccctcactcttccccttaccaaggacaatcacttcttcggttctcagctcctgtgagaccccaggcgggagcatttgggtgtgcgtcattggagggctcacttgccattctttctcttttccctctttcctccaatggctcctgtggaggttttgagactcctcaatgtcactctgcttctctctccagttccagtcctaacaataggaaccctaggtgccccgccccagcctgctccagtcccctaggatagagcaaggagagctcttccctgcatctagcctgtgacaaatggctctagtgacagccctctctgccttgtttccagtcctttaatgagctgcccgcagccagcctcactctcactctgctcttcacacccactgagccccacgcttggagctgctgggggtctgccagaaagaccagctcctaagatccctgcaggctgtgcctgctcaacttctcaatgtggctttctcagccctgctttgtgctctcataaaattctatcgactttggggtttttttataaatttgtccaaattccactcagagtattgtttcatgcatctcaactatgattttgatgggtttggggaaggaaggtgagttcctgggttctgctgatatctgaacctggaaatcttacccatattgctgagtgctgcaccgggaagtgcaggcttactttggggctgccttcaggggcaggaggctgtgtgcaatgcaggcatcacctggtgcagggctggaacatatcagatgacttaatgggctccaaacttgaaatcagggctgcttagtaaaagatgggatgtatgtagaattacataagaaagatccaagcttccaggatttggaatgaaacagtctcttcagaatgtgctctcaggattcccagaggcgagctatttctcaagatttccttgacctttgtcaccatcaggaattaatgtttaactggcacatgtggctggaaatgcaagaagagggaaacgtgtggcttggagtttcaagaagagtgactgtctcagtgccgagtgcctcagcagcttctccacatgctcttcagtccccaaagttggagaatcccatcaaggagagtagccctgtaaggaattcgaatttccagcatgtaagtctctgattttatacctactcagattgtagtagtggaaaacagcaacatgtaccttgactctctggccccatgttactgaacatttgcttaaaggttaactcacttgagggagcttgtgtggtgctttctctt

SEQ ID NO: 38209 - DNA, 2300 bp, Homo sapien
ggtggctgagaaacacttggatgtgtgtaagattataacacgtgagcagggtgaccacctcccaaatcagacaaaaggaaggcttgggtgctaagtgggcctggtagaactgatcaactacttttggggggaaggagtcattgtattttctctccttttactatcctccaaaataaatgtcaggaagaggaaagagtaatacatcaagtcagaagaggaatcagagtaaaacacaaatgaaggtttttcagttttcttgatagaagctgcaaatcattttcacggttaaatgatgagccaaaaagataaggtcaataaacttgactacattggattatacttttaagaatcaaaagtataattaaatttaaagacatgcaaagtgggaaaaacatttgctacaaatgtgaatgaacttacttgcctactgcgtaaaaagctcgtcatgggagaagtggaagcaagtcggtgttcagtaacagagggttgggaggccagcgggccaccagggatgggtgctcacccagggctcagcctggcttgttttccatcataaacagatgagcagattgactcagagaatccaggtaactggccccaaacccttagctgatgagtatcagggttgtgattcattcatggacattttttactgggaaccccttgtgccctcaggatctagtctagctgacctgttaaaggatagcccaaaagaagaaatataaaggtctaattcgcttatgaaaaatgttcaacctcagcattatagacctgcatattaaaaccacagggtggggccactgcttacctctggaattagccagaaaaaaattccagaaaaataaacagtcactggctggcttgggtgttatgaaacaggcggttgcctccactccgggtagaagggtgagtgtgtgaagaagagtttgactgtgtgtatctagaatcttaaaaaagtgcacgtggcctctggcctagtccttctacttctagggatcctaagcaaataatcagaaatgtggacaaagttttgtgctcgaaggtgtttatttgatcattatttatgctgtctgaaagttgaaaacaactacagagtgtctactagagtagtctagaatatgaaaaaaatagtatttactgaagttttaaaatagttgaagacagggacaggaaaacacaattatttacacaatctcacttcaacagtgtctagttgtgtacaacaaaggtgcaaagaccacgggaatgctattatcccactgttgtatgatttaggctaattttctatctactctaggttagatatttatataaaaattttctttgcatggattgttgtaaaattcagaaaagaggaaaaatatttcagatgccaaagagcagactgggtgggaaatgttggccatggaattgcagaaactagatgggggatggctgaacttgaggggctggggctgggaggtaccaccctctcagatagccaggggagcacagctccctcctcagcgcctgttgcggaggttcttggggaccttgccctttcctcccagacactgtgtgctccaaactgtctttcccctctttcttagtggaaagcttacatttccaacaacctgtattttcattagtaggatattggtgaaatgaattacactacacttctacttggtggggtacactagagtgctgatggagatgattgttggcctgaaaaatttcaaaaacgatattaaaacacaatatgtggaagataattatgattcagtgtttatcaggatcatttgtaatccccatgtgactcaaatagagtatgcatgttctctacaaataattcaaacattgcacagatgcacatggtagtttttgtttttgttattctgataaaaagagaggttccgttttaattttttgttcattttttagcatacaaaaatataaatttttatacttagcaagttttacatctgcgattaaaaaatgaaaagaaagctatttcttttgaaaggggaaaaagagagaagctggtgaaaatgtctcccttccttagggctttgttcgttttattttgttttctccagatattctggaggaaggtgtgaacgcaactttgcctcccagggaacaaacatcctccttctaagtggtagatgtgggtgagctgaccctgctggagtctgtcccctgggctaccctctgcttccccccattgtgagtggtccgtgaagcacagcgttgaccagacctaaacctgtttgctcccaggtcagtgtgcacgcagcagagaagtgagcatccatccc

SEQ ID NO: 38210 - DNA, 2300 bp, Homo sapien
tcatgcttagaaatgagccatcttagaaactctccttgccatcctgccctgcagagcctcagcttttggtggagataatggcaacagcattagtgcacatacacgctgtccagccccaggacaccacaagatgtgtgttgtggttccatttcagtgctgtgtccctgaagcttcaggcggggaacctactcttctagtgcagggcttgacgaactgcaatctgcttttgcagataaagttttattggaggctggtcttggtggctcacgcctgtaatcccagcactttgggaggcagaggcgggtggaccacttgaggccaggagttcgagaccagcttggccaacatggggataccctgtctctattgaaaatacaaaaattagtcaggcgtggtggcgcacacctgttatcccagctactcaggaagctgaggcaggagaattgcttgaacccaggaggtggaggttgcagtgagccaagatcgtgccactgcattccagcctgggcgacagagcaagacccggtctcaaaaaataaaattaaagttttattggaacttggccattgggttttgtattgtctgtggctgcttccaagccccatcagcagagttgggtagtgtttgaccctttacagaagaaagttttttctgggacactgactgctagaatgaacctttttggatggacagaggctcaagggggcctccttgtatcagctcatctcctccccattttctgggttagaaacagtcctcagatgagacttcatctgctgatcacatacagctttggattttctgttgggtgccctagattccttaatcttttggcagtgcgtggaggagctgaaagatgacatcatctccgagagttgatttgggctcagttcctggaaatgaattccattcccaaagtctgtcactgttgttattattattattatttttagtgaaagagtgattctgtagtttttcatttttaagtactacaccccccccccatactttggctaaagaacattttattagactacattttctttaagaaatttgttgatagtacctgccactcttaacccttgaggtgggaagttacgaagatcatttgaaatgtctctctttaaattttatttgactgttccagctgataggacatttacctaaaatggttttccaagtcatttaaggttatgattctgaacttaggaacagcagctatgttatggagatattttgtgaggtaaaacaggcagtgtgttgactactattcacctgcatggctttaggcatggtgtttaaattctccacatttcttctgttttcagcgtcattgtgaaaattggaagacacttatataaactttggcattgtgtttagcacacaaaagaccctgttaaatgtgagccactgtttggatgagctggtatgtgatttttttgttttagagtgtagaattatttttaagaatgtaagttttttttttttaagtgatttgtgcgatacttatgtaaatttgagattataatctttttaagtctttaaaatcatgtgaatattcacttaaaacaaatagatggcatttggtttgggaaaatacttttcattgatctggcaaattgctgttaactggctttatttatttaaatcctaggtagttaattacatattagtaaatagtttacactttctgtaactaacagaatcagttgaaaactctattctttaaatgttctaagtaactttgactaatttgtttgttcgcttaccattttatgaacagttgattggcagaccatggctgggtattagggtaccaggtgaacaagatgtcaaccctgcctgcagggagctcccagccctggagggagacagacaggtacaacaaccaaccatgggccaccatgacctgggatgctgtcagtggtgtgctttgtgcagacaagtagaggggagggtgattaatcccccatcccatgtcatttcctgctagaactgtaaaactaacatattcgacagcctgcaagctgaccactcagaggctggcagtggggaaaagattaagctcttcctgtttacttcccttgtcttcagccttccaccgactctgtgaattgggtaccttcatgatacccattttataaatgagaaaactgaggtttttactatatgctggtcatcatgctgaggactttacttggattttctctcctgccaatgctacgcggtggggaccttcatgttctcccctttgcagatgagattatcaaagcagaaaaagaccatctctcctactgagt

SEQ ID NO: 38211 - DNA, 2300 bp, Homo sapien
cagcctggtgggatgtggcagaactgtcacccagcgggcaaggtggccaagaggacactccttcctctcccaggccctcagagatgtgggcgaaggggagagaaacaggtccttgcagttaggggagaaggcagaaagagtgtttagagatggggctaggacatgggaggtggtggggtgaggtagagagtgaggagtcgcacaagagtgtgtttgctggtgtggaaggcagaggccgcctggctgcccgcaggagacatccaggcatggtcctgcgatctggcagcaaatgatttggggcactgatccacctcaacggctaggggtgacggcctgtccagtgaacccaaaccgatatgtgtatgaaaataaataaatatatgtttaaatatataaatatttatattcatatgtattcaatatataaagatttattttaaggaacttgcaagtttgaaatctgcagagcaggcaggctggaaactcaagcaggagtttgctacagtcttaagctaaattcttgtttctctaggaaatctcagtgtttgctctcaaggccttctgtggattgggtaatgcctctgttaagggtcatttcctttaagccaagtaactgtagacattaaccacacctacagaataccttcatggcaatagccagactggtgtttgactaagtgactgggaattagagcctggactgttgacgtgtaacaccagctaccccgaggacaggctgactgtgagccggagaaggctgaggccttggggctgctgatcatggcagaggtgaagggtggatgcgggcacagttctcactgagtaggttggggacgtctgagccaggtcatggacctgctcccttcattgtgccagtacttccactgctattgactgcttcctttcagccccagcaaagtgttctggggcgttctttggtgatttgagggattctagagaaactcttgcagaaaacatggttggtagtaaattttacagatctgggatgcttctgttccttttagctgtgatgagaattccctagtgattttatattttgggtctgtgttagtttagtaaggctgtcataacaaagtgccacagactggggagggggcgaggggacttaaatagcagaaatccatttcccgcagtctggatattggaagtccatgatcaaaggtatcggccgatttggtttctcctgaggcctctctccttggcttgcagatgttcattttctcaaggtgtcctgacatggtcttctctctgtacaagtctgtgttctaatattctcttcttacaaaaacaccgcttgtattggattagggcccaccctcatcatctcattttaacttagtgacgtgtttaaagaccctccttccaaatacagtcacattctgaggtactaggagttagggctgcagcttaggaactttgggaggatacagttcatcccataacagggtcttgtcttgatttttgttgttgttattctgattgttagaattaatatccctcattttattcggtactaggtgccgtggcccacaggggagagtatgtaatgagtttgtcaggttggatgtccactgagaattccgatttgttctatggcttgtggagctagtgttcactcaaatgatgttctgtggtcctgtccccaaacacacacacacaaccccttctgggcttctttggaatttgtctgaatccctatttgcgaaagcttgatgaagtttgcagggtgttaatagatggtatagggaagaagggtgaggcagtgcaggagagtgctgggaatgtgtgagttaaatttagagggtctgatgtcaccctcaccactctgggcacccttctaccccacagacttttgacctcacagatgacctctcagggcaccatagttggggaccatctctgcatgtcagcaaaaagctggtgccccgagcaagtgtccttactgaacctacaagctaagaccaagagctgcccattcagacatgtcacacttgaaccagccataagtagtggatttttttttttttttctggcttggcttctcacagtctgtctttattccaggtgctgcagcgcagtaaatgtaatttgaagaaggcagaaggaacccatggctttagccggctgcccagattcctttttgcaccatccgtactaccaggtatgggcgagcacatatatctgatcctggcccgatggtgctggtcgagggccagggcacacatgtcgccagcagccatggatcgtttctgtagctctcaggtcactaggacacgctg

SEQ ID NO: 38212 - DNA, 2300 bp, Homo sapien
ctgtgtgttgatgggcggacactgaggttattgaggaggcattgtatcttactaactcttcagtttatcaggttcaaagagcatgttgtctttgttttgtcaactgtaaagactaatatcaacttcctagaaaatagacaaaaatggatgaagtgatgatgggtttgacaggacaagtatatttcactttacctcagtgatgtatttaatttatcgtgcccatgagaaaaagcaaacctttcaagcacatgtcttacatttgaagccacatgcctgaagatgccttgggaagtggtcctgggcatttgaatcagaattggggaaaagattaggctctctagagatgggacacacatcaggatatgagaattagcagtgattcgtatgctgttgtgatggtgaccgtaagtccatttcccagtgttcccattgccatgtcacagaccctcatacttgtttgcccatgcacccttttttcttatcttttagtcacttaagctactagaacttagaaatattctagtcgacataatcatcttgatactttccaaacttccaaattctttgagacggttaaagcgatacccttaataaaatgcttttgcataggcaggtgatgttcaactttgatcagtctcataatcatgtatcacatatctccccttttggtcctaaaaagaccagcatcccctttaaacattagcaagcttcatagcttgcaggtggctggtgtgtttcacacctgaaaatgggagaattatttggcatgttgtagttaatgatgagtatacatttgtttaacgtttgctatacgttgaaccctgtcctaagcctttatatgcattagctcatttaatcctaataaaagctccgtgagagagatactattttcatgctgattttatagctgggaacactgaaccccaatgactcaataatttgcccagacatcagccgctaaggggtggcatctggagatgaaccaagactctctggtgcctggatttttagcaagcatgttcagcgggacctgtttcaaaaaacagccatttgactggtcttcttatatctgggcccaggacttcttgatgtcaggtaagaggcaggggcaggtttcattttcaccgtttaacaattaggaaaatttagcttctgactcttccatggagggatctgttgagatcacccacgttgcaggcaggggacctcctccagcccaacagcgataggaggctcctggatggcacccttgctgcatgccagtcacactgctaagccattctctgtgtatttcatttaaacatgttggaatccagtggcattccaatgcagtgtattaaaatcctcagtgaggtgggtttcatccccatgctctgcagtgggaccagagcctgggaagaccagtgagttgcccaggtcactataaagtctcctccggtaggggtttcaattggtctccaccctcttctccatgcctagaacccacctgtgaactgagggctctgcgccttgagctctcagttcataggacttgagtgatgaatcaaagatcagagccagaattggaaccccaggtctgcctgctctgcacccctctcgtggaacacatgtgctccatgcagagtgcccagcggaatctctgctgagaacagtaccaggcattgtgggctggggccaggtctgacatggaggcaggttcctgctgggtgggccgaaggttgtagcctgggaggaccctgacctgggcccgaagtgaattctaggtaactttgccttgcaagagggcaaaggtctgtgtgctttgtaccccgcctgccttggaggcagcgtgctttggagacgcagagatgtgtgggcagtgagcgtagagcccagtgcatcttccctctgtcctctgtctctgggcatcatgtgacaactagaaacctacatcttacttagtcacgtccttgttttgttcttcagaacactcttaaatgatcttcttggaaaaaaatattctttcatgtctgttttaaaagttttattcctgggctcagagtataagttcatttgtataaattctacggaagttcagtgatggcccgtttgactttccagctttggcgctgaccacaatgctgagcaggaagcagcagctgcaggcccagtgactggtagctcagtgaccagcagcccagtgaccggcagccaggtcctcacctgggtcctctcagtgaagccagggtggccgccccagcagacagtgctacagagccaactcctgacaggtaagccctatgcatgacactagtcactag

SEQ ID NO: 38213 - DNA, 2300 bp, Homo sapien
cagtgaaggtctggcttttcaagattccttgtccatcattagatcatttctctcttgctcttcccacatccaggaacagctgcttcgaactgggacctctggcattttgtaatagaggggagtgtggcagggaagccctctgtcctgcacaacctgttgttctagcccaggagatggcagggtgcgtgggatgttcaggcaaaggagttcaccatccaggctgggagctgctgggcagggaggcagaggaacactcgagccacctttgtggggttgactgcagaggtggaagaagccactgtgtcagaccgcagaaaagtctcatatctggagtctggaaggaaagccaagttctcccagtcagtaacctgctctggactttggataagttacataatttctccacactttggtttctccccgaatctcagggtttgattctgtgcttccatttcccattctgtgccttgcgatgttcactatgtgacatcttctctgaggggtgcgcagttagagtcaaaagcgctaacaccttcaatgtttcttgcagtagccaggccatatgtggtcagcccggactgtgagaaaagaaagccttgtgttaccctttgtgttgtgttgaaaactgctcttggctgctttcagaaccagccttaactctgcttttgtttgatcgacttaaacatattggaattttgtggtcatgaccaccgtggaacctctccttttggagtgcatatctgcactttttccagcctcctcctccagtgaccttcaggggcctgacctggcctccgagcagttggactagggtagcttttccactctttgaaccccagactgagatggggttttcccagcgccctgccccttaacgtgtgtgaatgcagtataggatctcagtttcagaatccattgtccactgttgactgttaggttcttactgctgtctacaatgtctagcttttcctaccatgttctctgctagaggggagtagaaaatctgcttactgcttactgtggccttgtaaacggcagtgaatatctccaaacgttctgttttgcttccatcattgcaggctcgtgtgtatgtctgtggtgtatgtgtgtgcgggggtgggggagtatgtgtgatgtgtgtgtgtggtgtatgtgtgtgtgtggtgtgtatgtatgtgtgtggtgtgtatgtatgtgagtgggtgggtgggatgtgtgtggtgtgtgtgtgaggtgtgtgtggggtgtgtgtgtgtgtgaagtgactagcacatagcagatgcttggtatgtataggatctgttctttccctcgctgactctcagtttaaatgggaccctactttgtcctcgttgttcagtaacgttatgcctgtggcttccagaaagagcctctcccttcctggttcttgctctgacattttggggagaagggtgagacgagagtgatcctggaagagtagaactggccggccctgcaggtggaaggttgctcgagcaggcggcatctctagcttgccgcggccgcgatgtcccccgcctgtctgcgaatgcggcgtagcgggtagacatggagggctttcggcatcgtcagagtggccagtgtgcgcgtccttgcccatcaggcgggggggctgtgggggaggagaggaggcagtggagggaacaaggggttcttcagggttgccatgagaaccagggatccggggattgggcagcagagggcccccgccgggcgttggggcgtggccgcgtcacatgggtttggtcctgggattcctgttgtgctccaggaccgggcgctgctccgtcgtcctcccgctcctcaggagcgcccagtccctcggaggctgagtattgcagccgggcggcagccggctccgcggaggggcccccgggcacctgcgtggtgatggcgctgggagcccccgggcacgctcgggcggtggcgcggcatcccaccctcgcccggatggcgtccccagaggcggcgttggcccgcttttcgtgctagcgcgttcgcctggcgcgcggtggccccgaggccccgggtcggttttctgcgccgcaggcccctggccggggcggagccgtggaggaccagcccggcccggctccgagcgctgtccatgcggagcgctgtccacgcgccgggcactgcgggggccgggccccgaagccctacccgggccggcggcgcacacgcagcgaccccgtgcggccagtgctgccgcccgctctccaggtactcaggtgggctccgccgcgggcgctgggcggtgggcggtgggcggtgggcgc

SEQ ID NO: 38214 - DNA, 2300 bp, Homo sapien
tgcacataatatctctactcttaggaaagacacatcaatgtatttaggggtaaaggggccatagtgtatggaatttacccacaagtgattccaaaagaacatatgtctatgtatcaaggaacttttgaaacctctatcaaagcctccttgcctatcaggctatctgactggtgtaggcatggattgctgtttggaccttcagcagaagctagaaggttcaaagctgatgcatttgtgagaagttggctcaaactgagttttctgttctttaattttcttttgagtcctttgtctgcaacaggagtcctctgtgttcctttcttctaggaatctaaaatcctttgatatcatcctctcttgattttcatcttacgtgtttctgagcttggaccaataggcaaaaatttagggaggtctgtttcagttacagggaaggatgacctttccatgagtaacatctgtctaaggtggaataactcctgctagaagcaggtgcctacgaggggctttggtacaataccgtacatggcttccaatccttgctctgcacttaccagctacttgactttcagcaagtcacttaacctctccaagattcagtttcccagtccgtacacagtgggactctaacagtaacacctagagggccacagtgggggttacatgcaaggattcatgaaggttttgcacaaagtgcacgctctatgaaggcaagatattgtcgcagctgcgtttagaacgccaagacccaggaaaagacatacttatcgttatgctatgtgtattagagttttgactcggtagagatattaagaatcacactaacgacaatggcttccgtcaattggggggtaggggagtctttttcgcagtcactttatgttcccagtatgacctcatttaatccccaggacaccaaccctcaggcgggcgttattagcccattgtaaagataaggacaccaggcttggcagcattaagaaaaaatgaagggcctctcactccacccgcacttcgatactcatacgcagatggggcaaactgaggctcaaagaggtgaggccccagacctggctggctgtgagcaaacccaggtttccttttcccaggccgggtgccttcagcccacgacagagtacggggcagccccagctcttccgtcccgtcctgctgcgcccaggataaaggatctggactgcgcagttaatactttgtgcgtttcaaacagttcgcttataaattgtctttcgggacaggtccaatttgtcctttcactggcgaagcctcctgagccgcggcggtcgtggtcccgcgcccgagtcccgaggacagcaggaggggggaacccgctcagcagcccggggcaggaacctccgggagcttctggccccccggccgtccggcccgcggcccgcgcccccgcgccacgccctgcgcccaggccccggctcctcccgcgctggcggccgccgagcggtccgggcggcggcggcgggaggaggagcaggaaaagtagccgggggaggaggcggaggcggaggcggcggcggcggcagaggcggggagggcgggcggggccgggcgagtttaaagcccatcgagggggtggggaggtcgggaggaggcagagagggaagcgagctgcggccgggcgggctcggcgctcggagacccggtggagcccaaagtttccgcgcagcccctgggtggcggcagcgccggcggcgcggggcgcccgggacagtcttgagcgccggcctcgccccgcggggacccgcgcccgccgccggccacgccgagtgtcgcccgcagccacgcggaggcggcggggagccgcgcgcggcaggtacggagttgggcggggagcgcggcggcaagttactttgtggttggcgtccccgcggggcccgggacggccaggcgggtccccgcgccgtcattgtctgagcgctgggcggccgcggccggggacgccgggccccgcggaggcgcggcgggcggaagggcgtcgcctccgggccgggggctccggcgccccgggcccgcagcgggcggtgctcggaggcgggactggggctgcgggcgcgcggcggaggcggaggcagccgggcgccccgcggggctctccgcgctgcgttcccgacccctggggggaggtgtggagtccaagcggtgcattcttgaaccatcttgtcagacgccggcggctcgcgggctgtggcgggggctgcggtcaaggccgcgctcctgggggccgccgcctgggagggtgggcgcccaggcgtccctgcagccccggg

SEQ ID NO: 38215 - DNA, 2300 bp, Homo sapien
gtgggcaggggcatctggagtttgggggaagggaaggctataagatacaatctgtatataggattggctcatccaggatcactgcacagaggacagctgcagcttctgcagccacaagagtgacaagttcatgaacttgcatcagaaagtgtctctgaatgggttctgcccactgatgtctacagagagccaggaaatgtagggaatgagggcctgtcctaggaattctagagacctatgctagcaggaaaacacttaaggacatttatcttgatcacttctctgtgaatagtaatgtctgaaaacccatacattttgagacaactaaatgcaatacctgactctagacctcaatagtggatcttgtaacagagggaaagaaatactatggaagacatagtcagatcaactgactataccggaatatggacctagattggatacaagtattttatcaatataaatttacgaatttggtgactattgtggttatgcacataatatctctactcttaggaaagacacatcaatgtatttaggggtaaaggggccatagtgtatggaatttacccacaagtgattccaaaagaacatatgtctatgtatcaaggaacttttgaaacctctatcaaagcctccttgcctatcaggctatctgactggtgtaggcatggattgctgtttggaccttcagcagaagctagaaggttcaaagctgatgcatttgtgagaagttggctcaaactgagttttctgttctttaattttcttttgagtcctttgtctgcaacaggagtcctctgtgttcctttcttctaggaatctaaaatcctttgatatcatcctctcttgattttcatcttacgtgtttctgagcttggaccaataggcaaaaatttagggaggtctgtttcagttacagggaaggatgacctttccatgagtaacatctgtctaaggtggaataactcctgctagaagcaggtgcctacgaggggctttggtacaataccgtacatggcttccaatccttgctctgcacttaccagctacttgactttcagcaagtcacttaacctctccaagattcagtttcccagtccgtacacagtgggactctaacagtaacacctagagggccacagtgggggttacatgcaaggattcatgaaggttttgcacaaagtgcacgctctatgaaggcaagatattgtcgcagctgcgtttagaacgccaagacccaggaaaagacatacttatcgttatgctatgtgtattagagttttgactcggtagagatattaagaatcacactaacgacaatggcttccgtcaattggggggtaggggagtctttttcgcagtcactttatgttcccagtatgacctcatttaatccccaggacaccaaccctcaggcgggcgttattagcccattgtaaagataaggacaccaggcttggcagcattaagaaaaaatgaagggcctctcactccacccgcacttcgatactcatacgcagatggggcaaactgaggctcaaagaggtgaggccccagacctggctggctgtgagcaaacccaggtttccttttcccaggccgggtgccttcagcccacgacagagtacggggcagccccagctcttccgtcccgtcctgctgcgcccaggataaaggatctggactgcgcagttaatactttgtgcgtttcaaacagttcgcttataaattgtctttcgggacaggtccaatttgtcctttcactggcgaagcctcctgagccgcggcggtcgtggtcccgcgcccgagtcccgaggacagcaggaggggggaacccgctcagcagcccggggcaggaacctccgggagcttctggccccccggccgtccggcccgcggcccgcgcccccgcgccacgccctgcgcccaggccccggctcctcccgcgctggcggccgccgagcggtccgggcggcggcggcgggaggaggagcaggaaaagtagccgggggaggaggcggaggcggaggcggcggcggcggcagaggcggggagggcgggcggggccgggcgagtttaaagcccatcgagggggtggggaggtcgggaggaggcagagagggaagcgagctgcggccgggcgggctcggcgctcggagacccggtggagcccaaagtttccgcgcagcccctgggtggcggcagcgccggcggcgcggggcgcccgggacagtcttgagcgccggcctcgccccgcggggacccgcgcccgccgccggccacgccgagtgtcgccc

SEQ ID NO: 38216 - DNA, 2300 bp, Homo sapien
agaaaaaagctagaaaacaaatcagttatcaggttcagggaaaacaaaaaggtaatttagaaattgtaattatgatatacattatacatctcaggaggagaaaattcctgctgaagaaaacttatatttttcataattttgatatctactataactaaatatatataactaaatagtaaatattaatttaaatcttttgctataattttttggaaaatggagaggaaaagtatgagtctgtgcgtgtgtgtgtgtgtgtatgtctctgtgtgtgtgtgtgtgtgtttgtgtgtatgtgtgtgtcttaaagaaccaaatcctcatcttctggagtagatgccaatacctaacatggaaaaatcaagaaacagtacaataagcttcttatttagaaaaacggaataaatgccaaaaaaaaaatgtgaaatgcttactgctggagagggggtggtggacaataaattgctggttttgactcatctttatggggttatttactttctgttatgtccatgttttatgtaaaatatattacagaattttagaggtataggaggtggttataatatactataacagaaggaaagaaaaaaatatttttagaagaaaaaatagtctagaaaaacatgccaattgttagtagtttgagtattaataaagtgattatgttcttccttttacatatattttttaacttttttgcaataaatgtgtactgctgataaaaattaaaaggagactttttacacacacacactctctctctctctctctccctctcattgtctctctccccctttctctctcccatatacgtggtacacatggtgcaagcatgagttaataaaccagagagcaccaaggtcagagttgaagtggcagaggcagggtgttgcaggcaccattcctatgatgagcccttggaaggccaggaagtacttggactggaggtacagacttggctctgagctactagagagcaggacagctcttgtcatatgatagtcaccatgttcattcttttttttttttttttttttttttttctgagacacagtcttgctacatcacccaggctggagtgcagtggcgtgatctcggctcactgcaacctccacctcctgggttcaagcgattctcctgcctcagcctcctgagtagctgagactacaagtgtccaccaccatgcctggcccattctttgcacatactctgcactgctctatacacaatgttctttaatcaatgaattttaatcaatgagagtgaacgaataaaaactttcgccctaatgaggaggagaggagagtaggattatgtagtccttcagaaacaaagaaatggaatcagtgaattcaattttacagacaaaacagatttcacattcagcaattagacctgcccagtattcatgagctgcctttagaagctgtgtgtctttcactgttgaaagctgtgagcaggagctggatttctgctgtggttgggggctaatgtcccatacaccgatctaataacccatatactaagaaacttcattgcgattctggatcaagatgtgtccacctgtggaccattagatagtcttggctgcagctgctctggaacgtgaacatgcagtcagggaaacaaacctaagtcagagcagggtgaggtctgagctgcccccatcagctcttcctctgtgtgatcacaattcacggcagcccatcctgttccagaaggaattgttctccttacatttaatgaaggactatgggtctcattctcttgtgtgacagggaagtttaccaactctccagacttgcctggagtccctagaaaatatgagctccctgctcataggggtctttggggtgtctatgagcaacactgtgccacctccaggccactccttggacatccgctggtctctcgcctcatggcctcccctgcctgtgtgggaggacctggaaagggaactggccatctaacaaccctcctggagcaccaccttccggtgcaggtccctgccccagcacaatcaccctaatactgccttctttgtacttcataggtacaaagtactttgattgtactttccttctttgtacttcataggtatctcttgggtcacagattgatttacagaagaagaagcggcgagcgccagctccccctccaccacagccaccaccaccgagtcccctgatccccaaccgcactgaggataaggaggagaacaggaagagcacgatgggtgagtgaggctcggcctgccgtctgcatgcggggatgcttgctctgtcctggaatgtcag

SEQ ID NO: 38217 - DNA, 2300 bp, Homo sapien
cacaagtctgtccacaccatgatcttggacttcagcctccagaactgtgagaaatcagcgtctgttgtttataagcctcccaatctatggtattttgttatggcagcctgaagggactaacacagtttctcagtgaaaaaagcatgatttcaaaatgtgcgcaaatagcgaaagaattgctttcctcaaggatgtgacagaatttaaggaataagtcatggcaactttgatgaggacttggaatatttactcctcactaagaaaaagagttgtaaatgggccatgaaaagtgcgagtgccagagctagagaacgatcttatttccctcagtgcgaggtcgggcagggacagtctgtctgggcacaggtaggagtaagggcacaagcaggcccatttgcagtttgcatgccacctctcagaccagagctgctgctgctgctgctggaatggccagggaggcacctgcccacccgcccttaggagggccagagcacatgggggtgcatggcacagcactgtcttatggagcctccttgaggggcttgaggggcacaggaccctggcagcagaggggaggccgcaggagcagccgtgtgggctggaggctgacattgccacttatcacacagtgagcggccgagcttctgctttctgtaaatgggtgcaatggccacacaaaatatgaagataaggtgggaggattcttcagcacctgctccccgcccctccctctcatttctctcccctccccgctctgtgtttggtgcttttctgcatctgagattttttttctcttagctatctggctgtctttttaaattcccttcactcagtttggtcttccaatgtctcttaaccatgtctctttaaaatacacacacacacatacacgcacacatatcccacttactttgctgtgcataaaatgtctccccatgacttgttagatctaaccctcacagccatcctggcatccttgctaattatgatgtctgttgttatctgagttgtggaaactgagtctcagaccaggctgagctgcatgtcagagatgcctgcaaaagaagagcaaagaagtaaatctgggtttagagcagggacactttccctctacaactttgtatgggatgaataaaaaccttagggaggaagaaggtgtcgccatcaaggtggggtttctatgtatccagggacccatcttagagtttaacatacttcagatcatatacacaaactagctgccaagactttctttcagatgtggcagaagttttcccacttcctccactgtgaactgaataacccagcttcatattctggaataccgtgggagcactctgtttccttttaatgttatagtgtccatcctccagtgaaggtcaagaacaatgagtggtattaccattttgtgttttgccagcggttggtaactcaatggcacattgttctgtcccccaaaagagctgagggagtccggatcacccctttgctctctgggactgctcttaagtaaaacacccccagccttcacacacccagccttcaggccagagggaggtttcctttatagccacgccccccagacttttcagcttcttttgtgtgtttgttcctatgtcttttggggcctattgtgaatgctttagtctttcagaaagtcaaaagtctgccttgaacacaaggccaccgtacactctgttcccacaacaacatcctttccccgacctcatacatttttgtccaaagcaaaatgcagccagtgacttctgtacaggaacctgcaccctccccagttgcgtctgtccctgtagcagagggaaaaatactcttggtttgttccctgttcttctgggttccagaattctttccaaagtcataagtcatgctccgctgtttagttgtgggcagcagcctaacaagctggggacttgggtgtctgtcacatcagtggccccgtcccccctgctggcatgatgagctctttcaagaaaccggactctgggtgtagctcacgtttgtgactttccagttctgtgtctttgtagcagccacccatgttgtcactcatctcgtagtactccttggagaaggtagtgatagacggatatgaggtgggaccacaagcgacgaggttgagacagatccagggccctccacgtcccacggccttgagcacacagcttgtatttgccatccacttggctgactccccagcttgggaccgtgacttgttccccgtggtgtccccagtcataagcatatgcctggtgtgtggtggaccctcagtagacatttatgag

SEQ ID NO: 38218 - DNA, 2300 bp, Homo sapien
ttttaaaaatttggtatgtttattataacttaaatatctaaaatattcatgtagatttttcttttttcattttaattgacacagcttttgaacacttgaaatgtggcaggtatgattgagaaactgaatttttaatttaattttaactttaaatttaaattgccactagctaatggctacctgattggacagtgtagttctagaattcttcctgactcaggaagcagttggtatccatagaagatttaaacatcttcccagaggaagagaaaagaaagggaaaaaaacttttttgaaaaactgatgtcagaaatatttattcattgcatttggagaatatcttatatacatagctatattccaggcttttgtttattaattaaaattaattctagtagcttattatatacttttattgtttttgttgttgttgttttgagacggagcttcactcttgttgcccaggctggaatgcagtggtgtgatcttggctcactgctacctctgcctcccaggttcaagcagttcttctgcctcagcctcctgagtagctgggactacaggtgcatgccaccacacccggctaatttgtgtatttagtagagacaaggtttcaccatgttggccagtctggtcttgaactcctgacctcaggtgatccacccacctcagcctcccaaagtgctgggattacaggcctgaaccaccatacccagctttattgtacttttaaataaggctttgatattaatcttttagctaaaattaaaagcaatgttactttcatattcttagcagaccttctaaattttcctgcttttaaaaatggtaatgcagccaacattaatctcctattaatttctaggattgattggttagtgcattctcactgttatctggaacactctgaccagagatttccccttattcctcaagtaaacagtgtttgaggcagagcatctctgtatataccttgcgtcttcccttgacttcctgcttctcagggcaggtgagcccaggcatctgcatgattccacttgttagggcaggagaggaccagtaaaggagcagtaggttccgtcttttctcccaaaatgcattgttatcccagccactgggccctggtacgcaggctggaagagagcgtgaggccttcctttgctgctcttttgttcaatctacatttactgtgtccagctctacagtgtcttagcacaattagagtgatcagtaaaagcggaagaaaaataatcaaaaagtgggagaaaaatgactaccactttatctgcagtcatttagaattagcattagtcaactgagtgtttttcttcctgattattatatatgcctggtgttttttaaaatatatttatagcttaaatacgtgtgtgtagtgtgtatacataaatacatgtaggtctgtgtacacactgtatatgtttcatatatgtgtgtatatagtacatatatacagtatatatgtatttatatatatatatatctatgtacatatatagatattcctgtatttatgtggatattttgactccttaaaactttgatgtcatgtttttggagggtttttctttaaattattcatactgcttccaaacttttttttttagaaaatgcatataagtgccatgtgttcacatctggccagaacccttggaagacagtaaagtatatgtgttggattttaaatgtagagtcttccctgatgtttatttcgctgtgttgttagcagcttgttcactagcaagagattctaaaccagatttattattctagacatttgtttttcaatattcattatgctgttttcccccattactcactcaatttgtggaagaaggattcaggctacacacaatcctgccacacccaattgtcaaattgacacaagagttgaaggcttgtgggaggatatcttactgaattctttttgcctgtgtgttcttccagaaatctgtgcgtttggtcgtgaattacctgcggacacaaaaagctgttgtgcgtgtgagccctgaggttcctctccagaatattctcccagtcatttgtgcaaagtgtgaggtcagcccagagcacgtggttctcctcagggacaacattgccggagaggagctggagctgtccaagtccctgaacgagctcgggataaaggagctctacgcgtgggacaacagaagaggtgaggccccgctgcgtctcacgcacctgcccataatcacacggatgcgcggcgtgtacatgtcccctgttggctctccccagcactctcagtagcgccagggaga

SEQ ID NO: 38219 - DNA, 2300 bp, Homo sapien
gttttcagctctggcccctcctgggcagcccttcccatggtggtgtccagagcaaggaggggctccccagattttgggagagactctctaatacccacacccaaggtgcaagaagagattcattcattcagtgcaccctttgtttactgagcactgactccaccctgctaggcactgccctagatgctgggggtgataaatcagacaaaggcccagcgcttgctaagatcacatgctagggaggagaccaatggcaaacacatgagcaaaatatatgcggaataggatatgttatttatgttttttattccatttatatataatgtatatacatatttataagtttacataaatacaaattttatgcattcatataaacatgtctataaatataacacattacatgtaaacatttctttataaacttacatttaaatataaacacacacatatatacacacatacacatatacacacacacatatatatatacacatacacacatacacacacacatacagtgacaaatgctcagaagaaaattaggacaaggcagcagtcaggagcttgagtgagagctgcttttattttgtgttttaagacaggatctcactccattgtccagcctgctccccactcgccgccccgccccgtagctgggattacaggtgtgtgccaccatgctccgctaatttttttattttgtagaaagttctcccaggttgcacaggctggtctccgactcctgagctcaactgctcctccggccttggcttccctgagtgctgaggttacaggtgtaagccactgtgctccgcagggtgcttttagacagagaggccaggaaaggctccttggggagaccacgggatgaaaaggaggaggaagagcactgtggagcagcatcccagccagaggccctgagccgggaaagcgctccactcatgggaggctgggctgcagggaagtgagccccagggccacctggggacttaggaaaccttctaggtgggagcagggagcacccaagatctgccagccacgagtaaggactcacattttgcatatagactggtctgcccccccttcagttaatgagaaagcaggggatcagagggaggaaggctgcgcaggcctctggatacctcatccaatgacaagatcgcaaggggagcgtcacccccaacgctatcaggctcgcccgatctggcctcttgttggtcttttattcgagtcattgaaaccatatgaaactgccacttttataggtcagcccatcataccaaccaagatcttagagagtggaggtgaagttgggcagataagggacctctggctgacttgctctgggccccggcgtggccggcaggacctgcatatctgcccgccagcccgcactggagtggcagggttgtgccacagtagcgcccagtgaatcaggttggcaaacttaagcgagcattcacctagagcgagtgagttgttagcaaagcgaggccgcgctccagcccgcactgtttctgattccgtgggacctggtgggccccagaaatctgcatttctaacaagttcccaggtgttcctgacgctcccggtcgggactcccactttgcgaccctacgcactagacatttgctgcacggataaaggtcagagagcggtgccggacactcacttctcaccctccaacgtcagtcctcccgggctggtccgcccacctcgccctcgcacggcctccaggctccaggtggttcccctcccccaactccgccaggaggcgccggccccgggatcccccactccgcccagagagggtcgcgctccccccaggggtggaggagcacggggagaagccctctgccgcacccgcgggtgtcggtgcagggcccaggtgccggaggattccttccccggacgctcgccgcgggccgggtcgggactctgagcaggcggggcggggcggggcgggggcggcgctccggtgggcgcggcagagcagccggggcgggggcgcggcgcaccttgctcccggcgcccccgccccgcgccgccgccagcccctccctgcgctcccggcgcccccgcccgctagagacgattccagccccttccgtccgccgcgctccgccgctgtcctccgccggcccgcgtgggaggacgatgggtcagcgcggaaaaagtgaatgagggcggcagcggtggcggcggtagccagcgcctgactcggcgggcccggagcaccgcccgcgtcccggcccccggcaccatggacgcgccgcgcgcctcggcggccaagcccc

SEQ ID NO: 38220 - DNA, 2300 bp, Homo sapien
tcaaaaaacaaaacaaaaacaaagaaataaaattaggaactgtaattatgtcttgatataattttggttgttttaatcaacatagatgtctgactataattaaatatagcaaagttttagactaaaaattctttgcttgttcaagttttaaaacagctttatagctttttatctagacgctcaaacaagagaacagctgagaatgctttagagttctgcagaaagtgtgcatatcaatgatcccttcagaagaagttagggtgtagtggtgattctcaagttcccaaaggagctataacaggtggaatcagggaccaatgaaagatatttttatagtcccctatacaggttttcactatattctaagcattagcatttgtgagatccctagatggctgtctagtgagcaagatgtaaatgtttattttatgaaaccattgtgttttgggtattgttacagcaatgaactgtatgtaattcaatagtttaaaaaaaagtcactttttaataggtaatgagttattatgatgtcatgaaggcaaatgtcaaagtgctgtgtaacactcttgaggatttatggatataaacgttccttgggctcccaatggtggatgtaggtgtgggttaaagaagttgtaagttggaaaagaccctgaacctgccagcagaatagattagattctctttcttatattgcacactacatactacatttcagatgtatttaaagaaatggtatactcacaaaaagatggaggaatggagcagtattatgattgtagtcatggaaatctgtatcaaagatgcaaggaaaacattctaaattaagaaattagaggaaacggtatgttcaatcgttgctatctatagagttgtaaatccctgcaaatgatgagattgatttatacaatacaacgaccacacaaaacataacaaacaaacaaaacacaacatcgttttgatttcatagcaatcttgttggaaataagtaaattcagtgaaagcagaaactccgatttggcagagaccacagcaatgtcaggtctattcgcagaaatcttgggaaggtgatggacttcacacaaaagacaggcagaaagtctagagccaattttgtttcattgcaaaagtcaggatgatataaatggatttataaattatatttagtaggaaatatgaattttagaaggcttattgcaaaatcaaattttgtgatttttaaactataaaaaaatcataatcctgggttttccagaaaatttctttatagtattttcttcacatttacccatcatttccaagatgtctcataaattttaatattttgtgacaatactccatcctttatcaacccagaaaagaaaagagtattgcttttgagacatttcaaaccaatgattctttttttttttaattcagaaattttggacattgatgctaaaagactccccggctattgggaaatgtaacccaaatggttgaagaaagatttttaaattagttaaacataatctgtctacatacattaagttaatcaaaaggcttccatttttgtcaaccagagtgtgctgtaatcacagttgaaatctgcaaggcaggccggcgcggtggctcgtgcctgtaatcccagcactttgggagggggaggcaggcggatcacttgaggtcaggagttcaagaccagcctggccaacatggcgaaaccctgtctctaccaaaaaatgcaaaaattacccgggcgtggtggcacaggccgataatcccagctactcgagaggctgagacaggagagtcgcttgaaccagaaatacggaggttgcagtgagccgaaatcgcaccactgcaccccagcctggacgacagagtgagactcaataacaaataaatattcacgcagacaaatactatctgtgatggctaatcctaggggtcagcgtggctggaggagggtgcctagatggctgggcaaagttctttctcaagagactgtgagggcgttgccagaggagattgacagctgagtgggtgactgggagaagaagacctgccctcagtgtgggggaccagccaatccggtgccagcgcggctggaacccggccgacagaagatggcggatgagcagcgtgcagggttttctccctgtggctcactctctcttactgtgctgggcggttgcttcctctcctgctgcccttgggagtcagactccaggttcttcagcctgtggcccctggggctctcgggccttggaggactgactaggagcacacggtgggcctctctggtttgggggcctggg

SEQ ID NO: 38221 - DNA, 2300 bp, Homo sapien
aaaaactttggtctacattggtaaaactaaaatacccatcaggcacttttcataaggagaacaaaagacttttccaatttcatctttctccttttttttttccttccctcctttcttctttgtttccttcatagcttaaacgcttataactttattttaaagtaattcaatggcttatttgtactataaaagctttctcacactttatttttcacactcttaagcttatttttattgtacttttattgttacagtgatcaagtacttcttttaaatagttgaaatgctttgctaaattaatttagaactcctcttacttaaaataaatgccctttatattgagaactgttttaacagcagataaccttgaagtcaggtcatttccatgacatattatacccatgtttatgctaaaggttgaaataaagccaaaatcatgttagcacattgaaaacatcctgttaggcttaacatttaaagcatatgcaaggttttgttgtttactttccacgtaatgcttagtatggttcaggtgtattaacttggattatgtttctatgttctgaactcattgtccatgaatgtttgaacataaagtgatttcctttcttagaacgataaacttcaaaatcctttgctaaatacaaggaggatacagagtctggttggcctaaacatgaacagatataaaatatctcccatgattgtctccaaatcccatattctgcccctactcacagtaaaaaataaatatactttcagaaaataaataatattgtgatgacgttattgtgtctttagttttctgagctttaagttattgctgcattcagcaatagaagataagtgatttaaaatgcaaccgctatgttaaggttaattttttttctggctagtaaaggcattagccaactacaaattctttatctgtaaaatgaaaatacataccctacattggcttcctgatagcattattaagactaattcatatttcaaactaatactgaaaatttgtggcatagttgcatagaaataataatgggaataaaaaatgtgtgctcttcttagatggcaaatgctattaattttgttaaaaaaaatttaaatccactaatagttggattgcataaggtcagatagagtctttaacataatatacattgttgtttcagttcttaattaaaaatagaatgtacatctcaaatcttcaccaaggcagataagtagatttgttccacattctgaaacttattgtgattttttgtgtctaaaataagattccttattcacttagtcccagggaacattacataagtattgtgctatgcaaaagaaaagcaaataaacaaaacaaaatcacgtaatgaagaccttaacggtatttaaaacccctcccccctccaaaatacatggaagatgaaggaaaagaaggcaggaggtatgtaattttttaaaaagtaaacatagtatggtgggcttttctttccagaaaattccctcaatgcgtgactttttgtactttttctcttctccgtctgccagctggagcgatatggctcctgcatgagctgcttgtactgaaagctgttcagcaagaaattcgtgtgaaatcgtagcatgtgatgctcctggttggagcagttaataactgggtaagcggcatttccctaaatggctgttttcctcggcccacccgtctctcccccatcccattgctccccggtcctcagcaatgccccaactccctcccggaaccttttgctccgagccccccgccagcgccgcaatcccgtcactgtattgtcctcctcggcaccgagcgatctgatccgccgagccagaaagacacccgatgggggagagaagcaaagtggaaaaaaaccgacgtccctgctctccagaagggagaccccagcggcgccgacgagccctgcgccctccgcggccgcccggcgcgagctcccgggcggggcgctgtccagcgcgcacagagttaaaggcatcatcgcagccattagagggaaaagttgcggcgccgcgagcccggcgaagtcctcagcccgccccgcttgcccactccccacttcccgagccggctccgtgtttagggagggcagtgatcacgcaagccggagcggcgggctgacgttggacgagctgccaggtagctgaaagcaggcagccaggcagccgagacacttcccagcgattccagcctgggctccgcaggaagcctcgctgaatcccagccagctggttctaaccttccagaatcgcaatcccttctccccacagccagc

SEQ ID NO: 38222 - DNA, 2300 bp, Homo sapien
actacagaaggaaatatttattttcatctgctttgtgctggatgctgagcaaattactttgggaaacttgagcaaaaacagattaaagcaaatgtctaaacagttcattctcaggcaggtccttgatagttctgccgtatgtgtatataggctcctggaggcagtttttgctgccaaaaaactaccatcacatcttacagcaacaaaaatggcagagagtgctaatatttagataaaggttaaatagataatttgagtgagagacaaaatattttcacaacaatttttaacattaaggaataaaattaaaaaccctaaaagcttttagaaaaaaaattggatcaaccctaagataaaattcagactgtcttcaggcattttctttataatgacaaataacagagatcacctaggcaatgaatgtctgcagagtactgagtagatgaaaaagcatttaatgcctatatcctcactacatttatattttcaaatatattcgcataggtttatataaaatattcttataattttaatttcctctatatcacttctgtgtccctttcttcctattttaaatatattttttttcttttgtttggtagctgtatgtgtcttcagcccattttccaattagtcagttcttttcttatttataatctccttaatattaagggtataattcacttatctgtgtttttttttttccttttttcaagttgttgtctttcaattttttgtttacttacagaaattttgtgtttcaacacagtttattactttcccttgtaattgcttatttccagtgcttcatgcttagaagtttttttgccaccagtttcgaatgtcttgatttttccatgtaattgtctaatcctctagaatgttcatgggtttgtggtgaatagggactattcaactgcctttttaatcaaatcataattactgattgaataccccaccttcccagttcctgtccatctcatctttatcatgtattattatttaaatacaatcaagcactttctggaccatttgttgtgtttcattcatcttcctgtcaatttttggacctgcaccacaatcttttaattattgtactttcattatcttggtggttaactctccattcatttatctttaaaaatcttctttggctattttccttcatttcttctctaagatcaagtttaaagtaatttggcaaaattccaaaaaagaaaaaatccaccaaaactatctaggatatatttggagatgcatgactttaggaaggattgttatctttatagagactcattctgaaacagtgtataattttccagtaattaatcttcctttgcgccctcagtattttgctttgttttgttttcttcatttaggtatggcatatttcttgacattgttattcttgctaaatttatgtgtgtgtgttctcattgcgaatgcatttccatttccattatgttttttctaactaacatagaggaaaatgctgttttgtatattaatattttatcttttatcatactagagtcaattactagctccaaaaaagtcagtttattctgttgtgctttttagcagataattatattacattccaattgtaatgattatactctttccagtttttgtttcttatttctcttttgtgctcactagattattagatcaatattaaatattaaacattaatagcagagattctggttgtttctaagcttaatagaagtgtttgtagtgtttaaaagttaaaaaggtggtctgttgttagttttaaatagatttaatttcttttattgagaaagtatctttcaaattcaagtttataaggttattttaaaaatattttaaatgttatcgaatactatttattgtctatggaggtgattactatttttctagtgtattgcagtcttgtactatcttgcctaacttcatcttatcttaagtgtatacgtatgcttgcttgggctcaatgcctggggctccgccacacaggggctgttttggttgctacaactgttgagtgaccaacttgctgatagtagaaactggcgctgagacccccacattcccaggatgctctggtattcagttggtgacactggattctctccatcatggagggggtgggcctttgcttgggaaaacacaggctttctgcatgtgggttttcctctctatgatcgtgcttttgccggcactattatcccaacattgcctctgattaatgtgcttattgcacagaggacatgcgttgaaggactcaggcccagaggactcaccatactacacct

SEQ ID NO: 38223 - DNA, 2300 bp, Homo sapien
gacagccaaagtcaaagtttggggtggggatactattttgaattaggccataacattatattgctcataagcttcatttcgaccaacattatatacatacaaaaagtatgtaccgtaaggacacacatcaagctggaccgcaggaaaaaaaaccacaacttaggatttacctagtcagccgctactagagagcaagcaccgcgcaaggccgctggggctcgtgctgtggacgtgagtgggttgaggtcgggctggtggggtaacccgggatccagccggaaaaaagggataacgctagactcacactcctaaggaaggccaacgccccaactagcgagctccgcaatgcatctcttccaggaagcgtggccgggcgcacgtcgcgctgcgcttgcgcactgaggtttcgcgtaaggaaccaataggacggaggagtgggcgggctgttggcagaaacccggattccggttccggtgggcctccatcagcaagctccagtgctacgtgtccctggcattttaggtgtcggttgggtaggtgagtttcttcccaccggtcggtacgggcgaacggggcggccacacctttgcgactcttgggggcagcgggcgtgggcgagccggcgtgtctccccgggcggccgtcgcggggcgggcggtaagtggtcccctggctcagggccggggtctggccgccgacatcccaccaactcggcctctggcggaaggcagacccagggccgcggactcccggcgagctgggtggccggcccgcggggctccagggcttagcgtcctgccccggcgtcttctgtgctgcagccaaagatgatgtcctgctgcccgatcccttcggggttggctctgtgtgctgttgtggagtcctgtctgggaagagctgtactcagctctggtcctgccgccgcttccgtggtttaaagtgagagcattggtctagagtctagttcgagagatcatagttggtttttggatctctacccctgacattgagtgcggtattgtgtgtagcgtgcgtttttctggataaagaattcttagcttccttcgtgacaactatgattacaaaaagtttaagccctttggatttcaagagcaaagttgagtgaaatactgagaaaacagacattactgtgtttttgcccccagaacgttgcagaattcctggtgtttcattgacattatttcatttcgttgtccacaccctacactaaggaaggcaactggggcttacagaggtttacattccatagccagtgatttgaactaccacctggccactgttctgagtactggaaatggaggaaaatacaaataacaccctggctgctttacttactatagcagtggctctcaaagctaagatcggataacatttctattgggtaatagattcctcaaaagaacctgtatggtaaaatatatagccctgtttccttaaaagatgtgttcaaatcgaaaagtttgaaatttagctagtagcttctcagaatttgcgtcttcctttagccattctttatactttagaaaagtatgttgtattggcacgttttagaaaaatcaaggttgaaattcacgtttgcctctattctaggctcttgcagcaccgtagttggcattcactgtacaagacactggcttctgcgtagtttaaaataaaatatggaaagtaattgttggatctcaacactgatggttccttaggagcggtgaggggactgtagaatgagaaatggatgggactgcagagtgagaaaaggaatggatgtgttaccaattgcgtaaccttttttaaccttttaatagagataggctttttatattgcgtgtgctgttctttgtcagtgaagatatcatgagtaagatctgtgcttttcttattgcctttgataattaactgaaatttccaaaaataatatcaatttaggctttggagtttgttttttgttttattttaggaggtggaattgacccatgttagacgtgaattcagtggctggtctcatttacatctttatataaatgagcaagtgcttattgtatgagaaccaataccagtgagtatcttttttgttttaaacaggcagtcatggatcaggtaatgcagtttgttgagccaagtcggcagtttgtaaaggactccattcggctggttaaaagatgcactaaacctgatagaaaaggtaattgcttgactatgagagaaaaaattaaatctttgcattttctaagccttttgtttgattaacatcttgattaatagcccttgcattactttgatca

SEQ ID NO: 38224 - DNA, 2300 bp, Homo sapien
tggagtactattctgttgtgggactatacctgtatgtttattcattctattgatggtaccctgttgcttttagttctgttatcaataaagttactacgaacattcctgtacaagtctttctgtgaatttagtttcatatatcttcaataagtacctggaattggaattgtggagccataggtggtgtatatatgcttcatattatgataaactactaaacttttcccaaaagggttatgccattttacactcctagtaaccaggaattagagttctagagttctgattgttacgtatttttgcacagatttgctgttatcagcctgtttttttttttttttttttttacagacggagtcttgctctgttgcccaggctggagtgcagtcgtgtgacctcagctcactgcaacctccacctcccgggttcaagggattctcttgcctcagcctcctgagtagctagggttacaggcatgcgacaccattccagactaatttttgtatttttagtggagacggggtttctccacgttggtctggctggtctcaaactcccgaaatcaggtgagtagacaattataacaatacactgtaatgaaagttatttgaatgtggcctctcccagattaccttctggtacacatctctttttgaaccagattttcttggataaggggaaccactgtatgtgttacttgattttctgtgttttgctgaaaatactgtcaactcagacatttggtggttggggtgaacttgccaacatgtgattttatgtttttttggaatgaattatttttttgaaaattatttattgagcatttactgtgtttagcactttactagatgctatattatacccacttggagcttatggtctagtaaggggatttacagtgtagggagacagaccgaggaataaataaataaatgttaatacaaatgctatgcagcaaatgaagaaggtattgtgaaaaaggaaaaaagagcatgagatagacaggattgccttagatggtcactataggcctctaaggagatgacacatgggctgaagtcccagggatgaagaactagtcaaacgcatctcagtctgttcagaatttaaaagtgactcttaaagctaaggcaaggtatgtgtagtgtgtatggaccacctacagtcagatatacggaggtgtgtgacctctaaccctgacccactgaatcaatatctggaggttctggggttacaaatttcatttactaaaaaacttaacaggagatttcagttactgaagaagtttaagaagcactgagagttgtaacacgtcttaatgttccatcagctcttcctgagttatattgttcctcagatcccgttatgctccattgctaaaaggaaacatggccgggcgcggtggctcacgtctgtaatcccagcactttgggaggccgaggcgggtggatcgcgaggtcaggagttcaagaccagcctggccaatatggtgaaaccccgtctctactgacggtttcagccatccggcggggggttcctggaatgcatccttgtgggtaagtggggagctgtgtgtacattatgaccactcccgtaaccaaacctagcgtttgacaaaggcctcaattacagcggcattcattaccgtgaatgacagccaaagtcaaagtttggggtggggatactattttgaattaggccataacattatattgctcataagcttcatttcgaccaacattatatacatacaaaaagtatgtaccgtaaggacacacatcaagctggaccgcaggaaaaaaaaccacaacttaggatttacctagtcagccgctactagagagcaagcaccgcgcaaggccgctggggctcgtgctgtggacgtgagtgggttgaggtcgggctggtggggtaacccgggatccagccggaaaaaagggataacgctagactcacactcctaaggaaggccaacgccccaactagcgagctccgcaatgcatctcttccaggaagcgtggccgggcgcacgtcgcgctgcgcttgcgcactgaggtttcgcgtaaggaaccaataggacggaggagtgggcgggctgttggcagaaacccggattccggttccggtgggcctccatcagcaagctccagtgctacgtgtccctggcattttaggtgtcggttgggtaggtgagtttcttcccaccggtcggtacgggcgaacggggcggccacacctttgcgactcttgggggcagcgggcgtgggcgagccggcgtgtctccccgggcggccgtcgcg

SEQ ID NO: 38225 - DNA, 2300 bp, Homo sapien
gtattaaccagctcacaggttatcagataagcttagtctgaccaatgcttaacacagcaactgggccactattgtcattcctgtggtggtggcacacacacccagcctctgtccgggccatggtctaggaccaccctccacagaggctgtgagctagagccctaactgtgcagggccctaactatgccaggctacttatctctcttaagaggacttcattagtgcctgctcggccatacagttttttacttaccaagtaacacagttatcagcacactccaggtactagccaaggactacaaaatcaacgtgaatgtcagcttttgtatcaaaagctcaaaggagaaactcaaactttacatagatgtcccatgaagatgttcagcaaacccattcttctctgttccctggaatccatcccagtattgtgctatgtgtgtgtctagtaattctttacaaaaagctctgtttcttgtgatgctatcagatcacattgaagaatatacaagccgtactatgaaggctgttgtctcatatagtcctaacgtagtgagaactgatgttcttacatgctgtctttttgggcactcaaagaaattcctgtacagtcttacaaatcagttgtagcttaaattgatttgtgttgtgacttgtacacacaggtcacattcccttgacagaaaatatagtttaaaaccaaatttgcagcccttgttaagtgaatgcacaggactttattgtattcaggtcttttattgtaagactcactcctgtcttcattttatgttccactgttgtgcttcccatttgcctttctctagttttgttttctgtgtttctacggactgctctcagcccaggtgtgcaggaagcacacacatgcctgcagagccttcatggcctctgcattcagggcatgacttcaacgcacagtggctgtactgatttgttaaaacaaaggaacagattacttctcctaattcacagggaagttccaggttgtgcgggcagtgagcagacctgtgtctgtctgcgcttgccctggtgaaaaaccccaccgttcaggctgcagggtgcgagacccaggcacaaacattttgctggatgaggaggaaagatgtaaggttgctccccttcagagacagcaaagggcaggtctgtagcttcacttacttcaggattgtgatttttgacagagccgagagatcagggttgttgaaccaggcctgaaggtcctagtgaatctcgtgaagagaggaggggtctggctgtaacatggacctagaggacatttttactgcaggagaaggaacagtggggatggggtggacttgccaaaggaatatagctcaagttcctgcagcccaaaaaagctcagtttcttttggccaaagcttccgcgagtttccctggcatttctcctgcgggagctacaggggcagtgggacacttagcctctctaaaagcacctccacggctgtttgtgtcaagcctttattccaagagcttcacttttgcgaagtaatgtgcttcacacattggcttcaaagtacccatggctggttgcaataaacattaaggaggcctgtctctgcacccggagttgggtgccctcatttcagatgatttcgagggtgcttgacaagatctgaaggaccctcggactttagagcaccacctcggacgcctggcacccctgccgcgcgggcacggcgacctcctcagctgccaggccagcctctgatccccgagagggtcccgtagtgctgcaggggaggtggggacccgaataaaggagcagtttccccgtcggtgccattatccgacgctggctctaaggctcggccagtctgtctaaagctggtacaagtttgctttgtaaaacaaaagaagggaaagggggaaggggaccctggcacagatttggctcgacctggacataggctgggcctgcaagtccgcggggaccgggtccagaggggcagtgctgggaacgcccctctcggaaattaactcctcagggcacccgctcccctcccatgcgccgccccactcccgccggagactaggtcccgcgggggccaccgctgtccaccgcctccggcggccgctggccttgggtccccgctgctggttctcctccctcctcctcgcattctcctcctcctctgctcctcccgatccctcctccgccgcctggtccctcctcctcccgccctgcctccccgcgcctcggcccgcgcgagctagacgtccgggcagcccccggcgcagcgcggccgcagcagcctccgcccccc

SEQ ID NO: 38226 - DNA, 2300 bp, Homo sapien
gaatgagagttagaggccatagtctgtcagctgggaaagcagcttttattccaaggtgtgccaaccgaaaggccacatgttattgtcacaacctggtacctacatcagtgctgacatctttaagaaccttagaattgggaaatcagtttagccctatctgcatgtgtagccgacaaccacacaattgttccaacttgaggttgcattcagagcaacctcatttcccccatactcctgaggaaaagcagaccagagacgctgggtcaatccagagttatggttggaaaaatgatggaataattctgcccctggtgataggagagagggactccatcttgtcaactgtcatggttcccatgtgaaagctatcattatcactgaaattgaatgagaacacagaagggaagaacagggaaatccccacagagttaaagaggatgtgaagattgcttcatgtttaatgtttgtgtaagtgctttgggttggttatgtgctgtctgaacatgtgctcatttccatggctcattgagagggcagacagtccaatgatactctttagaatcattcccatggggaaggaacaaagaagcctgtaaaatagaaatgcacatgtaaaaagcattgaagaaagtgccagtgtattgattttggccatggtttgtgctctaccacctggttactgtgattgcagaagtgcctttgcagatgaggaagaacctggccaaggctcaatccaacatccaaagccagaggccatatttcttcactcttaagataatttgggttcaaattatagtccctttacacactctctgcctcaaaaggcccaagactctcttttgttatgcttgcctaaacatgcctttcaaagaactagttctgtaaatacaactttattataaacctctcctttgcttttaaaaatggatcaccacgtccatttctatggtccaactttgtcccttaatttaaaattttttcttggattaagtttgatgccttgaaacattaggaactcaagcatacaagattgtatgctggtggtgagggaagtaactgtgcctccgcctgtgctgggtggatcaacatggagtgtggacgagcatagggatgtgtgggtttctcactagctgagagtgtttttaaatgttgtattttgatgtttgttattttctgaatattctacagttagacctttgatttattctttgatgcattcatttgaataatatttttaatctccagccagttaggtttttaatttacacttttgtccctgattttaggtgtagtgttgtgtacactactgcccagtgtatgttatgtttgtaaacattcattgcacgcacaacaatgtgactcacaatatttttgagaagtaaaaagttcattatatagttattaactcaaccctacagttatattcgtgaaataccttgtgaaatttattttttgcctactggagctcttacaggttaatcctgtcttcaagattttcatagaattttcatctaccacccacccctttaaatttcaacatttttttattttggcattttaatgcaattcaatgcattatagggacaagctatctcttattatgaattgcaccttatataaacttaaagatcttttatcacaaatttctttgctgtgtcctttagtgagaatttgtattatcagtcactaaagctcactaagttagtaagctttgcgcccagatgacctgggcaggaatgggtgagtctctgtgtggagagagtgaagaaactgctacccttaatacctggaccttgagggattgttttattttagtttttctgcatttctcagtatttcatgtgatatctgtctttttcttccagtttgccaaggcacgagtaacaagctcacgcagttgggcacttttgaagatcattttctcagcctccagaggatgttcaataactgtgaggtggtccttgggaatttggaaattacctatgtgcagaggaattatgatctttccttcttaaaggttggtgactttgattttcctacacaaataaaattggagaaaatctaagtggagaaaggcctgggcagaattccacttgaagtgtgtttatttttgctatggcaatgacaagtcttacagagctacaaacgagagttttatgagaaagccattttaccagctaatgtcaagtaataactagaaaaggatatcaaatagaaacaggctaatctggagttccatgtcatcatagacactgacgtttatccctgaccattacctcagtcatgatgtgctgccatac

SEQ ID NO: 38227 - DNA, 2300 bp, Homo sapien
ctagaaatgctaccctgaccctggctgatcctgacccacggcctctggtgtccttgtcacatgcacctttctccctgctggctgctggggtcactgctgacccctgctcctccttgcttgacggatgcctaccttgctgagcccaactgtcccaggctttggcctaagaatggcagcctgcatctctctgcaagggccaggctggcaggtgggagaggctgggaggggtcaagttctgcagacttcttattattgtttctaccacactctcttctctctccaccaagagggtgggccacctttctagttccctttatggctgatgttcatgtactttctagtacagagtgggcacgacagaaatgcttgctgcggtgcagcaaacagaaacaaacaggcatctctagcctgctccactctgccgctcctgtatggagggatcccactgtagtgtgactgcagggaaaagctgtagatgtggatggattcccaagttttctggcaaattgttttttttttgcatgaatattatgtgaaaatgatttgttgaattggcatgtcagagcaaaattaaaattttttctttctcaggcaaaaccagtcatcataagaacctagggtctcgcaaagatgctatgcagaattagtctttgggcgccgtttgtgaggcctttaatgtttttctcttttggaaaagagacgcttgcctgacacccacgtctcatgactacatggactgtcccctcaccctgcactgccgagagcgctcctacgggtttccgatgctgctggacgttagtgcttccctgcctacttaagaggaaatgagcaggttcttctctggacaacacttccagattaggaagtattatgtcaggatggtgggtggaaagggagaggagagggggggcagaagccgaggaagcgcttcccaaaagaggactggcccagactccctgctactctggcagcctgggtctccttcagaggcaagctccctgcccccgctgtctgcctcgtttgactcctgcgatgctgacttgctctctgcctggtaccctgtctcttacagagcaaggcctctgtttattaaatatcatgaactcctgcccattcgaaagggagagttaggctcagcctcttgctggttcaactgagtgtctaccttcttggctgtgtgaactcccaggctatctcctcttctctcttctctgtcccttgatttctcaccctcacccttgctttctcctttctttctaccctgttcgttcttcacatttgtaccttttgttcgttcttcacatttgttgaaggcgtcctctgtggtagctgttgagcaggagtggcacaggcctacagtaaagagccacacacaagtccccatgcagaggaccaggaacctctccctttctccctctctatttaaaatgcgtggtttctacatattcattaagcccacaaggaggccctcagagcacattcccagcttcgtttcaccaccactgctaactttcattctgcctctttaaatgcttagcggagattttggtatactgggcacatttttaaaacggcctgttgaagaatgaacaactgaatgaatgaatgattgaatgactggtgatagcagctgacagtgctgagcactggcgatgtgccagccctttcacacacgtccgtgcagacaccttttctatcccagtccccacacgaccacctcgttagatgacctggggtccagagactgaagcatgtggctgcacagaccaaataccctgagaccccaagaccactactgggaccatggctttaattgccctgctgggaaatgcacctgctaagccagaggctgcttggggttttatatatatgcatatgtgtgtatatatatatatgtatatgtgtatatatatatacacacacacacacacacacattatgtgtgagagcatgagacagcgtgagcatgcaccttggtcccgtgcctctggggaagtccgcgtcactctgtcaatctaacaaatccagctgacctctggcccagcccttccccactcctcacaccagggctttaaaggacctgagccatttctacacagtgtctgtttcctcagaacaccggtcttcaccaaaggcgtgggaaagggcagagagcacaggacatattctggaattcaggtaatcagttggagggttttaagtcagagacagctttgggacaaggagagaatcccatgtgaacttagaggagacttgacgcatgggtctccgtcccactgccggcacatttgaaaggacaa

SEQ ID NO: 38228 - DNA, 2300 bp, Homo sapien
tcatttccactctattatgctctcaaatacccctaagcatctatactagcctggtatgggtatgaaagatacaaagataaataaaacatagtccctgattctaagaaattcacaatttagcaaaggaaatggactcatagatgctaaccttaaaacaacgtgacaaatgccagacaggacccatcagccaggcactgtgagagcacagagcagggaggttgggtcctgcctgaggagacctggaagggaggcctcacaggaggatgaccaggtctcagtcagcggggaggtggaaagtgcaggtgcatcaggggcaccctgaccgaggaaacagctgccagaggcctccactgctaaagtccacataaggctgaggtcagtcaccctaaacaacctgctccctctaagccaggggatgagcttggagcatcccacaagttccctaaaagttgcagcccccagggggattttgagctatcatctctgcacatgcttagtgagaagactacacaacatttctaagaatctgagattttatattgtcagttaaccactttcattattcattcacctcaggacatgcagaaatatttcagtcagaactgggaaacagaaggacctacattctgctgtcacttatgtgtcaagaagcagatgatcgatgaggcaggtcagttgtaagtgagtcacattgtagcattaaattctagtatttttgtagtttgaaacagtaacttaataaaagagcaaaagctattctagctttcttcttcatattttaattttccaccataaagtttagttgctaaattctattaattttaagattgtgcttcccaaaatagttctcacttcatctgtccagggaggcacagttctgtctggtagaagccgcaaagcccttagcctcttcacggatctggcgactgtgatgggcaggtcaggagaggagctgcccaaagtcccatgattttcacctaacagccctgatcagtcagtactcaaagcttggactccatccctgaaggtcttcctgattgatagcctggccttaataccctacagaaagcctgtccattggctgtttcttcctcagtcagttcctggaagaccttaccccatgaccccagcttcagatgtggtctttggaaacagaggtcgaaggaaagtaaggagctgagagctcacattcataggtgccgccagccttcgtgcatcttcttgcatcatctctaaggagctcctctaattacaccatgcccgtcaccccatgagggatcagagaagggatgagtcttctaaactctatattcgctgtgagtccaggttgtaagggggagcactgtggatgcatcctattgcactccagctgatgacaccaaagcttaggtgtttgctgaaagttcttgatgttgtgacttaccacccctgcctcacaactgcagacataaggggactatggattgcttagcaggaaaggcactggttctcaagggcggctgcccttgggaatcttctggtcccaaccagaaagactgtggcttgattttctcaggtgcagcccagccgtagggccttttcagagcaccccctggttattgcaacattcatcaaagtttctagaacctctggcctaaaggaagggcctggtgggatctacttggcactcgctggggggccaccccccagtgccactctcactaggcctctgattgcacttgtgtaggatgaagctggtgggtgatgggaactcagcacctcccctcaggcagaaaagaatcatctgtggagcttcaaaagaaggggcctggagtctctgcagaccaattcaacccaaatctcgggggctctttcatgattctaatgggcaaccagggttgaaacccttatttctagggtcttcagttgtacaagactgtgggtctgtaccagagcccccgtcagagtagaataaaaggctgggtagggtagagattcccatgtgcagtggagagaacaatctgcagtcactgataagcctgagacttggctcatttcaaaagcgttcaattcatcctcaccagcagttcagctggaaaggggcaaatacccccacctgagctttgaaaacgccctgggaccctctgcattctctaagtaagttatagaaaccagtctcttccctcctttgtgagtgagctgctattccacgtaggcaacacctgttgaaattgccctcaatgtctactctgcatttctttcttgtgataagcacacacttttattgcaacataatgatctgctcacatttccttgcctgg

SEQ ID NO: 38229 - DNA, 2300 bp, Homo sapien
gccttgctgcctgctttggctttagaagggagctcaagctcagcggcttttggggcagccacgttaggtgctggggaatggaagaggatgacactgcctattttgactcagatcttcaaggatgagcacaccctcccctggtagcaacttctgcacccgccggccaccccgtagggccctgccccgcaccgcacccggtggcctccccggagggccgtgacccaagcaccgcacccggcggcttccccaggtgctgctccgcccagtgcccccccagatctcaacgtggtgccacaatgccgccctctcgcacatcgtgtccttggactatgtcttcctttgaaaggtcagttgccaggggccctcacgactccttgggtgtgctttgggccggcatgtatgtcctcttgcccttctcttacacagaagagtggggagggtgtcctaagaatttggcttgtcctaaggaaaataaagttgtaatttcaaggcactgaccaaggtctctgtactactcaagagctcaagagtggccacgggggaagatagccctgggtgtaaaagggccgcagaagggaatcccctgtgctctgcattaaaaaacccccaggggacaggaggctgaagaaagggaacctaccacttctccataaaatagtgtcagtgagctgtccaggagggcaggggatctgccgataagagagcatttaggaaaatatgccgactccttaaattgggtttcgatttttcagcttttgaaaatattggttttctttaggacaggtttctgtacttgccaacagttgccagttatccaccagcagactgcaggaagaagagacaatcttcacctccctcctgggtagggagagctgagaattcactaggcttagcctaacaaagcccgcagtggacgtttctgctgtacctgtccaaggcgtgatagttccccagactttggggaatatcaccgtgggttattttgtctagttaagtccctgtggtgggataaggatggctcctagagcatgtcggcatcagtagttcctggagtggattttcctacaccgtctaggtatgaaaatttggtgggagaaaagaccccaggaaaggggaaagcaggaaagtggagctaagggatgctgctataacactcatcctgttgtatctgttctgtttccctgaactttgaagatagttatgctgagtaccccctttaaaatgattttcttctacactgtaccttcccatggtcatgttcttggtggggtgtgtttcacatgtccagccctgtggggttggggggacactagaagaggtagtgggaagccagactttcccacatcattccaccgaggccacggaggcaggaggaaccgagccttccctgtgctcggcactgtgtttttcttcatcatgtcactttttacattaacgtgtatttttgcttgcttccagaaaagcacctacatcagctatgctgtaatccttgcttttctcacccaataactgggaatccccagagagccaaaactatctttttaatctcttatttcttcatcacctagtaccatttggtgctcaatcaacgtttactgagcggaagaaaacggaaataagacattttcctcaaggagcagaaatcattacacgtatttggtccaaacaaataaaaataaagagaaccaatgaagactgaagtaaaccacatcacgattacataaatgtaaagatctggttgcttgtgtcctttttataatacatactatgatctttgccaattaacactggaggactctttctggtcgataaaatgtttggataattaagtatgctttcattttatgtcccggtatcaaagatgtccatttattcaaaacaaagggagtgaacataaaacataaaaagaaaaaaaaaaaggcctgtggctcctcctcccagacacccccctccaacagtgatgaataggagggactgtctccctcccccatccctcggagactagccttgcagtgttttagactgttttgaaattctgttctttagaagagattttttttttcttcttaatatcaaacaaagaactgctgctattcctttgggctggcgcagcaggggccggtgaaatgcaggctgacgacggcgcgccaggggctgagctcgccccggtcggcgacgcgcacacaccttgagtgacagcgacctcttctctacaggttttccccgcgggagcgtggccctagcgggcgttcggttttctttggaaatcgcggagggggctggccgggcgcagcgatccc

SEQ ID NO: 38230 - DNA, 2300 bp, Homo sapien
gttgttcactaaagaacattgaaaaattgggaaaaatagaaaaaaaaataggaagaagggagtataaagttcagaaaagcaatcatttgggataacataggagaaatgattttacaataagtaaaaagaagaagatccaagttaggatctacaagggagaatgaatacaaccttggaatgaatgaaaattaactgaggatgagtaggaagtgatgtatcttctgttgtctgtgaataagaggtattaaatcactgtgccaggacaagcaccaagataacatgtacaaacatggtttctgttctttcctccctgatttctctgtcttggttttattttgtttattcatttttaagaaatatatgaaatgtattgttttggtgttacccgtttggaaacatagatttatgtagaagaaggtatttcatgtaattataaataatgtcctgaagataaaaggaaaagataataatgcttttcttttggggtgggaaattattccaggcatagcccttttgtacctgcagttgtaccgggtcacatgtgaccaaacctacctgctccgatccctggattacgtaaaaagaacacttcggaatctgaatggccgcagggtcaccttcctctgtggggatgctggccccctggctgttggagctgtgatttatcacaaactcagaagtgactgtgagtcccaggaatgtgtcacaaagtgagttttagaactggaaacattttctcccaattcccagtggaagctcttgctgtagaaagatattcagaaaggaaactatttttccattcatccattgttgtaaacagatcactccaaaatgttaatcttgagcatagtggtgggatcatatgccctctttttatccaagcatgtgtgtgccttaattttgggaagaataaatatatttccttattttaaccatgtttcctaagcaattttttgttttcttcaatgcatgaaaattagcttacctgctttagattcaccataataactaaactgatgttaggttcaacccttaagtaactgattagatatgctaatgatggaacaattagggaatgtaagcttttattgcacctattggtttacgttcttccttgaagaagcagaaatcacggttcattcctagggtctggtagagtatctggcacgtgctagtcagttaatgtttgttgaaagataggatgacgctgggtatagtggcatgtgcttgtagttccattaacttgggaggctgaggcaggaggatcacttgagctcaggagttcaaggctgcggtgagccatcatcctgtcactgcacaccagccagggcaacagagcaagaccctgtctctaaagaaaaagaaagaaaaaaaaaaagacagaatgacagtctaattcccaagcattggtgacattgcagtccttttttttttttttctgagatggaatttcgctcttgttgcccaggctggagtgcaatggcgcgatctcagctcactgcaacgtccgcctcctgggttcaagggattctcctgcctcagcctccaaagtagctgggattacaagcatgtgccaccacacccagctagttttgcatttttagtagagacggggtttcaccatgttggtcaggctggtcttgaactcctgacctcaggtgatccacctacctcggcctcccaaagtgctgggattataggcgtgagccaccgtgcccggcctgcagtaccatttttatttaaattttaaatcactttcttttacttctggatttcaaaataaaattttatggtttaaaatagatgtaaaggtagaaattaacagaaagatgttttgtttttaattttgacattcaaaaggggactagtaaactggagacgtttttgttgtgttctggatttgggagtatttttaaaaataattgttttaaatgtaaaataaataataggtaattcctaaagcaacagggttagtgtttcaggaagaagtactttagacttccactgggaaaaaattaatttttcttattggttagacttttgcagctccagagatcggttgtctgccaagaatcagaccttcctgatgagctgctttatggacgggcaggttatctgtatgccttactgtacctgaacacagagataggtccaggcaccgtgtgtgagtcagctattaaagaggtactatggggtatgggtaactatgggcgtctctaccattcaaacctatttgctagcattgagttgtattaacagctggactttacttctaggtagcattacttttttaaagcaac

SEQ ID NO: 38231 - DNA, 2300 bp, Homo sapien
acacaattgtgaatacaaatctaagaaatgaatgagatgtactgaaatctgattcaaacacttatcttaaactgacttctgtcaatcctctgtcctgtgaagtaagtcccgtttctcctttgcctggagggaccgagctggaattactgtcacatgttacagacatgaggcaggggttaatgcagaaccacggaacagcacctctgatgacatctagtggataagtaggaaggtgtcaacccaggtggcttttaaaaaaatctgtaaataaaatctcctcctttattccacagattttaatctttccctcagtgtgttagaaagactaatagtgtttttcaaacgtgtgtggatggactcacctggggagacacccgcatcctaggccacctttgtggctgctctgcagacacctggctgcacccgctgcctcctcgtctgagaggggctgccctggagagcaccgtgctggctgtgttgcctactggcttcccttgagaaatggggaggcaggacctctactgagtgctgtgatgtgttatgttttgatgtggtgggtggggaggatgggaacaatgttatttggatgagattggacatcgtgtgaggtcttcagcaaagcagctaccctcagctcattgacgacagcatcctgcctgcaggtgtgggctgctggactgcctgcaaagcccatcaacaggccctggaggccaggtaaaataggatcaggatgatttctattcacagaagtcatcaatctaacatgaaagaaaataatgactcaggagcaagggtgtctgcagcaaacagactctccaggcatcgtttagaagctgaatgtcacacatttcgggtgccagccccacacataaccacacaagtaaaaaggaagcttttctcctaaactgacattcttttttctcttttctgagaggtgtggacactggggctgggaaatgctcaggcctccccctgcagacaaggactgggctgttaagagaggcctcttgtctttcatgacacaagccttagctcacaagacgagaagtacctagtcccagaccacctcttccatgatgacagaaacccttctaaaaactgaaatctatgtgatagaattaatgaaggtaggctaacccaaattactgctcacattttttcaaataaaagtcacacaaataccataatgttgttggttagaacattatgtttctcatatctataaataagggctagtactttttatcacccaaaagtagacaaaaaataggaaatgcattcattccaaatttagattttgataactttccaaaaggttgaagtaagtttaattgcagggacatgagtccagttgagtgtctttctgttaatctgcaataacccatctggaactgtatttacttttcttagaacagtaacttataatgttgataaactgaggtggagcctgttttagtaacatatacctgggtaaatgttctggaactgccagtgcttagtcactgctgcctacagtgtggccatcaaaggcttcttgggaaagctccctttgggtccagaagtctccccaacaaagctccagctgccctggactctacacaaagcacctgaagcctctgctgggaatggggccctgacagagctgcaatgcactctgaggcttctttaaaacacgaaggtgagtgtaaaatccaaacgggaagcgttcagctgtgcactcccaaaccaccccagcacgcccctgcagaactgctggtcctgtccgtccttggagtggtcgctccctcattctcatctggaaggtgccacagaaaaggctgacaatgtattatcactaggatagaccctagataatctttctgatatacaagatagacaccacctgttccctcatttgtcaatatggaagaaaccccactttatacattttatacagaaaagtggacactgccatacattcatgcatggtcagctctgagccctcaggaatagaagggccttccatttaaaacagcttacacctggagacaacaaacaccaagaaacatgcaaacactacagagaatctgtatgtgaagaagtcatattttatattgatgagggtgctgttagaaaatgttgatggatggcttcggtcactcatgctagtctaaccagaggggcctgtgacggtgtctgcttctctttcaggattcccagttgtttctgtgtcaggcactaagcaatctggtggcttttggtccaaatgggtattttagttgtctttttgcaccttttaatccctcttcgaagagtcaagt

SEQ ID NO: 38232 - DNA, 2300 bp, Homo sapien
ttttacagtaaccattgtctttgtagttatttctctctccattctatttctgggatgccttttctctctcttttttgttaattagctttgctacatgttcattatattacttcaaagaaaaaatgtcaaaagaatctcaaggctggatgggattctcaagggcacccatcccaagctcaccccgtgcgaataatctccttactccacacccagctggctggcacagagaccactccactgaggacatggtgctgtcctcagcagctccagcctgcactgctgctcacccccaccccccagcgactgtaggttggagaagtgcgtgatgagatcataaaggaaagcacctgtgcttctctaggttcagtgaagaaagactggcaagggggtggaaggaggctcacgaggatgaatctccacaaagtcaagtctgatgtgtttgacagttcctgggatgtctctacagtagctcctcttgaaatctaaagcaacatgtccacattctaaaccactttcaaagatagtaataaaagttaaaaagttgggggaggtcagggaaacagactagataagaaacagcaaggaaacaaaaacaaaacatggcagaggaagatcatccacagtctatattatggcagtgaagaggaatgtgttaacactcctctgtaagaagaaaaagatggctgggtgcggtggctctcgccggtaatcccagcactttggggaggctgaggcaggtggatcacctgaggtcaggagtttgagaccagcctgaccgatatgatgaaaccctgtctctactaaaaatacaaaaattagccaggcatggtggcatgtgcctgtaatcccagctactcgggaggctgagacaggagaattgcttgaacccaggaggcggaggttgcaatgatctgatcgcactgttgccctccaaggcaacaagagcgaaattccatctcaaaaaaaagaaaaaagaaaaaaggaccaacatgttgtgttaaaatcaacatccaagtatattctgctttaatgagagaggctaaagagcatgacatgggaaagtaacagaattcaccaggagggattagcaaagaaggggcggggtcaaaggtgacttgagagccacataggagagcttttggagagaatcataaacctaagcaaaggaacccgagagagagctgtaagaggcactgccctatttggccagggtggggcattgggatggtgaggacagagcagggatggggtccttcctgggcccagagttcatggaacttactgaagggttgagtgaagggaaggacctacccttcatgactcagattccccctctgtaatgagggatgataatcataacatgttatcaggatccatagacacttatcaactgcctcgcacctgctggtcaaattacagcctgaagacatgcatggtccctggagcctgttagaaatgcaggctctccctcaccccagcgccacccagagccgctgagtcagggtctgtatttcagcaaggtgaatgatgaaataggtgatgcaggatgccccctgcactgagaagcgctacaggtttgatgaagacacaagcattgaaggatgggctgtgctggccacagtcatacaagttcagcattaagaatagcgtgagcacctgtgaactctgcagagccggagtgaaagttagtgctcgtctcttggaataacatgactgcttttactctaatttctggcagatgcttgaggatctgctctgtgtaatgcactggaattctctttattaacacagttatttttgcttttgtttttaaaaaatcagcagcagcaagcaaaaccgttgtcttcactcagcttctgatttatacagctaggaaagaaaaagtgaaaacttagtgtgggggtttcattttctacttaatcttgctcactaagtttgtctgtgccttttcttgtgggacattagggccccaatgtcttaaagcaatgttcacatgcatctcagctgtgtttcaagtgtatggtctctgtaaaccctaacaggtcggcctgaaggctgggtgcctaatacccacatgtttttaactcccttcctcctcttggccggacgcggtggctcacgcctgtaatcccagcactttgggaggctgaggcaggcggatcatgaggtcaggagatcgagaccgccctacctccctgactaacacggtgaatccccatctctactaaaaatacaaaaaaaaaaaaaaaaaaaaaattagccaggtgtggtggtgggtgcctgtagtcccagctactcgg

SEQ ID NO: 38233 - DNA, 2300 bp, Homo sapien
tatagttggttcagcaaccacttactgagcctgcctgtggccacctctgtcccaggtccacgcaggaaggcagtctcccttcagcatgccacctccagagggactcaactccatccgtgtcaggggctgttgagctcacagcggggctgatgatccagttgtgaattattcacatgctttgtttccttccctttcagcctcacatgtggccctttaacagctcattagttttgttttaaggacaggcagggagagagcaatggggagaagctgaattcagtttggttgaatctttgggatgaaggggtgagtaccaagtggaatggaattcttaaatcatctggggatttcatgtgttgatcttgttcctttttctcatagataattgatttggtggttttaagtttttaaatacaataaatacacgtactttttttgttattgttggggggatcaagtttcgctcatgtcgcccaggctggagtgcaatggtgtgatcttagctcactgcaacctccgcctcccgggtccaagcgattctcctgcctcagcctcccgagtagctgggattacagacgtgtgccaccatgcccggctaatttttgtatttttagtggaggagggggtttcaccatgttgcccaggctggtcttgaactcctgacctcaggtgatccgcttgcctcggcctcccaaagtgctgggattacaggcgtgagccatcacacccggcaccccgcccctccccccccccctttttttttaaaggaatgaaacaaaaaggaatgaaacctttccctccccaataccttctcaaccctagaccctctacagagaaagaggcatacctctctgataagtttcttgtgcaacttttttttttaagattgtatacccaaatatttggttaaaagtacacagatgggatcatattatagacagtgttctgcatcttgtttctcctttttttttttttttttaagaaatgttgcttggagatgtttcctcatcagcagctcaaacccacagcattccccttagaaagcgttcctttataggaatggccatgactcattttaatccgccctctcttgatgaacagctaagtagtttgtagctgtttttgtcattacacacaatgctcagcgaaactcttgggtatctgtcttctgtgctcttgcaggtttgtatagatggattattatgtttgttattaaaccatgtaaagcagtttacagtgatcctcagttggactgtggaatcctcagtctttggaccatagggttgttctttttgtgtggtttgtgtagcctggcaggaagggcttgtgtttagattttgagagggtatttgagcatcaagttagcaaagaacgaaacattgttcatttcaagaataagtctgaataagatgttggatatattctttgcagcttcataatgctttgcagactggaaggactggctacatctttacctggacctagagaaggaccagagagtgtagctcagttggagaagagagttcctaagtgcggactgcataagggatggtgtttgcaaatcgctactcagagtggtttgtagcaaaatagactgactttgcaatacttcgtgttccagaaacacttctgcaatgagagcggtctctagaggggatcagcaggaaaagttttccaccagttcagctggtgaaagaggtgtctcgaagccctaaagtgggagaggcagagggcagcttagtgtggtcgggccaggctggaggcagtgtttggatctgggtgtgtgagctgaatgggggctcctggggcctccttgctggctggtggagaggaatggcaggtgggcaggagacagcccagattcacgctggcctccatctctgcctggtggggccacttggcacttagtaagtggtttgggggagaatgaacttttgtgggcagttccccctttcatgggtttgaagtagtggaagttggaggggaagtgggggctgtgggaagtgcatgttccttggtggcctgggcctgggggccggacctgcttttcacactgtcacaagcgctggcttcttgaatccttgtagcgtcctccatggtagatgttctcaccactcaacagaggaggatactgcagggtctgcgggcgccagagctttatttatgtgtgctccgtattggagggctgcgtgtgacccagcagtgacaggaccgtgggcgactggctggcgaggaggtgcgctgcctgcatccttgcgcctaacagaatgcgaaggacgggctcacatgctcaggtgctt

SEQ ID NO: 38234 - DNA, 2300 bp, Homo sapien
cgctgggaatgaagtggctcaatcagataggaagctggttatgattctcaccttaagcaggggtcatttgtcttatacacacacacacacacacacacacacacgttttaatggagacaggttcttgctgtgttgcccaggttggggttggtgaactcctgggctcaagcaattctcacacctcagcttcccagactgctgggatgataggcatgagccaccctgcctggcccatttgcatttttacaggacgagatcacttctatccccactggaaaaacatttgtcttgctaacacacaataagctttcagcttagttttctacaagttaacttttccattaaaaagagttgtaaaatgtcctcattgtaaatagtaaaactactagagttcaatggcgtttggcaggcttgtcagataggtgccttagcatgactgaaggccataggcattgtttctgtcttacttgtaagttctggctctgacaggtatagtcaggtggtgcatgctctatattaatcaaattaggctttgaaagctgggaaagagttggggacttgcctcgggtgacatctgttcgtgtgaccccctccttccacctcctgtactgcgcagctcatgtcctttatgaccctctgtgatgcacccacctcctggtctccgcactcagcattctgcatcaggtggtttaagcgactctccctccctctaggctacgggagcagttttcttgtcctcctctcagcctccaactcaggatctggtacatcttacaagtttaatagtgtttgttgaataacctcatgaagaaggtgggatctgagctgtgttgtgaaaaaatagtgtctgtgaggacatggaggtggggtcagcggaggcgaggacagcgcgagctccgcacagttttctgctgcgggagggtggcctgcaaggcggggccggttgcggtcaagttcaagtagggtcagagcaggagaacactggcataaaaaatagccacatccaaggaagcagtgaggtgtggggaccatctatttcggtgggccttcccacccccaggccggccttcccatcacgcgtgggtgtgggggcactgcccccgctgcgcgcaggaacagcggggagagccaggagcggagcggcttcgggatgccagactgagcagtgggttcgtctgcggccacctctcagggaacaagcttccccccgcggagactctgcttcttttaaaagccttcctgggtttagtctagggcgacaggacgacctcccttgggaagggagagcctgccagtccccctcccattcgccaggcggtgcagcccctcctcccgcccggggcgcgcgcacctcagcgtcgcgggcctagcgcccagcagccgcgccccaggccgggcctcgggttccgggagcccgcaggcgcgcgcccggccgggcgtgtcgggagcgcgcggcggccgggggcggagcgcagccagggctgcgcggcgcgccccggctcccgcccgctcccagccgggccccccagcggtcggcgggacggctcccggctgcagtctgcccgcccgccccgcgcgggggccgagtcgcgaagcgcgcctgcgacccggcgtccgggcgcgctggagaggacgcgaggagccatgaggcgccagcctgcgaaggtggcggcgctgctgctcgggctgctcttggaggtaggggccggggaccgggtgctgccggaggcgcggcgcccaccatgctggcggctgggggcgcgcagttccgaggcgccccagaggaccttgcctgggagcgcagacggtggagcgacggggagccacagccctgcgcgcctcccggagctgggaggtgcgggaccctggtgacggggaggctcccgccccggtccgcgccttccgtcgttccttcggttttcgcaccccgcccccaccctgcgggtgagcgcgtttcccgcgccgaccgcctccgttagctcggggtgacctttgtgcaccgtccgccccctctccccgccgcagagggccgaggatcggatggacccggggttgggcgggggtggtcctcgggcgcggcgcaggcgcggagagcccggggcgccgggcagtttggggttaggaaaggatgggtgccgagccggggtgaggggagcgggcggaggggactgtggggaagtgtcgcgggagtgccgggagttgtggaggtgagcagcgggaggaggcgttcccgcgtgtgaaaatgaagtgcagcctttaggtgcggggaggaaattctgcggagagcctggctgggtggg

SEQ ID NO: 38235 - DNA, 2300 bp, Homo sapien
actcctcaggggcagctgagcagaccaggacatgtccagtcctgccccaaacaactcatcaagaactttcttctaaccccaagtccaactttaacagttgttctagtgaatgcagctttatcttgtaactttttcagtggtatctgatgcccttataatttgtgctcaaggaaacagcctggctggttagcctacaccccatcctccaaccatgccaagcaaccaccacatcattcaggaccaaacagagagcacacaggagaggtatcagactgaggtgaaagcagagtcacagttctaattttattcttggaaaaaaacttgcacaaattacaggaagtcgagctcagcaaaacaatcttccaggcagagagagatgcagaagggaggttatgtcagacactagtaggttgctcacaatgcaacagaaccacaatttgcacacgaatacatcgtggacacaagtcaaagttccattttaacccattaatgatggaaacagtgggatgacaaaggtgcttcaaaggagaatgcaggcaagtgacctacacacacagtcaaaagcggggagaaaagagaaaggaaacgctgggaatgaagtggctcaatcagataggaagctggttatgattctcaccttaagcaggggtcatttgtcttatacacacacacacacacacacacacacacgttttaatggagacaggttcttgctgtgttgcccaggttggggttggtgaactcctgggctcaagcaattctcacacctcagcttcccagactgctgggatgataggcatgagccaccctgcctggcccatttgcatttttacaggacgagatcacttctatccccactggaaaaacatttgtcttgctaacacacaataagctttcagcttagttttctacaagttaacttttccattaaaaagagttgtaaaatgtcctcattgtaaatagtaaaactactagagttcaatggcgtttggcaggcttgtcagataggtgccttagcatgactgaaggccataggcattgtttctgtcttacttgtaagttctggctctgacaggtatagtcaggtggtgcatgctctatattaatcaaattaggctttgaaagctgggaaagagttggggacttgcctcgggtgacatctgttcgtgtgaccccctccttccacctcctgtactgcgcagctcatgtcctttatgaccctctgtgatgcacccacctcctggtctccgcactcagcattctgcatcaggtggtttaagcgactctccctccctctaggctacgggagcagttttcttgtcctcctctcagcctccaactcaggatctggtacatcttacaagtttaatagtgtttgttgaataacctcatgaagaaggtgggatctgagctgtgttgtgaaaaaatagtgtctgtgaggacatggaggtggggtcagcggaggcgaggacagcgcgagctccgcacagttttctgctgcgggagggtggcctgcaaggcggggccggttgcggtcaagttcaagtagggtcagagcaggagaacactggcataaaaaatagccacatccaaggaagcagtgaggtgtggggaccatctatttcggtgggccttcccacccccaggccggccttcccatcacgcgtgggtgtgggggcactgcccccgctgcgcgcaggaacagcggggagagccaggagcggagcggcttcgggatgccagactgagcagtgggttcgtctgcggccacctctcagggaacaagcttccccccgcggagactctgcttcttttaaaagccttcctgggtttagtctagggcgacaggacgacctcccttgggaagggagagcctgccagtccccctcccattcgccaggcggtgcagcccctcctcccgcccggggcgcgcgcacctcagcgtcgcgggcctagcgcccagcagccgcgccccaggccgggcctcgggttccgggagcccgcaggcgcgcgcccggccgggcgtgtcgggagcgcgcggcggccgggggcggagcgcagccagggctgcgcggcgcgccccggctcccgcccgctcccagccgggccccccagcggtcggcgggacggctcccggctgcagtctgcccgcccgccccgcgcgggggccgagtcgcgaagcgcgcctgcgacccggcgtccgggcgcgctggagaggacgcgaggagccatgaggcgccagcctgcgaaggtggcggcgctgctgctcgggctgctcttggaggtaggggccggggacc

SEQ ID NO: 38236 - DNA, 2300 bp, Homo sapien
ccgactgctcagtgctgagtaagaagggagattacctcaaatatcactacaatgcctcacttctggatgggaccctgctggactccacgtaagggcaaccagaatagtgtgggagtgagcctggagggtgacagttgcatgctcccaccatcctcctctcttgggtagatgctggttgagagcttttatctccatgctgccccactgcatagctcgtggctgcatcactgctcaggtgcattgtgttaagagtttcctattgatggtcttgccctgctccaggtcatttttcaccccatgaaattgtctttctgaaaagcagatctcatcgtataactgctatctttccttccttccttccttccttgctccctccctcccttcctctttcctttctttctctttctttctcttttttttccttcctttctttctttttttttctttttttttgacaaagtctcactctttcacccaggctggagtgcagtggtgctatctcggctcactgcaacctctgccttccaggttcaagtgatcctcccgcctcagcctcccaagtagctgggattgcaggcacgcaccactatacttggctaattttgtttactttttagcagagagaaggttttgccatgttgccctggctggtctcaaactcctgggttcaggtgatcctcctgcctcagtttcccaaagtggtaggattagaggtgtaagtcactgcacctgacccaggctaattttttaaatttttttagagatgggggtctcactatgttgcccaggctggtctcgaactcctgacctcaaatgatcctcccctcttggcctcccaaagtgctggagttacagatttgagccatcatgcccagccgaactgctttctttaaaaattgatgcacagaggctgggtgcagtggctcatgcctgtaatcctagcactttggcaggccaaggtgggcagatcacgaggtcaagagatcaagaccatcctggctaacttggtgaaaccccgtctctactaaaaatacaaaaattagccgggtatagtggcgggcaaatgtaataccagctactcatgaggctgaggcaggagaatcgcttgaatctgggaggtagaggttgtagtgagccgagatagcgctgctgcactgcagcctgagcaacagagtgagactctgtctccaaaaagaaagaaaaagaaaagaccctatggatatactcttcagagctctccctctcggtatgggatcctgtatgctaatgcatttaatgtatttcaacaactctaaagggcgtgatggaaacatttcatgtatctctgaccaagtaaaaacgctaattgatgacatactgtcggtcataaaatgtatcctaattatacaaaggttaaactgtgaaaaaataagcattttagaatcagtgaaatatgtgctaggcttccagggcccagatgtacagggacctggcttacaacagaccttgcaaagaaatcccaaccactgactattggaagctagcgggaggcagggcagcagggaaggggcatggcttgtagtgcttttgtggatcaagtgagctcctaagagtgaaaatggtccatgaggttagaagggtctgtaaggtccgtggctgctgtcactgctcctgctgatgttcatattcctgtccgctgatcctgaggctgaggaaaggggaagtgggtgtggggaatgaacaaaggaattccttctcagaggctccaggatctgcttctcacgtggggcggggagagtcagtctccctgcctcctgcttgtgtttggaggactcataacatcctggcagagcactgaggagccacatgagccagagctccttatcaggaagtgcattttgtactctgagagcctctgtattacatgtaaatctgcagcagaagagtagcggctggcgtccctgctggtgtcttcctggtgtgagcttcagaatagtgggctaatggaaagcttggccagcacctgcctatctggtcccagctagagccccgtgtgggctgggccccattcatcaggactaaggcagcagctgctgcctagaagggaggagaggagtgggagtgagccggagagggtgaagcaggcaggaagctgcaggccggcggtggatggggccaggaagcatgcagggggagtgaggaccgtgtatgagagaaacactgcccaagagagaagaaagaaaatcacaggacccgaggaaaaagaatgagtggtgtgttcagagatgacacatgacaacaaattgtttgcttggaggatt

SEQ ID NO: 38237 - DNA, 2300 bp, Homo sapien
ttgtttgtttgtttgtttgtttgatgcggtttcgctctgttgcccaggctggagtgcagtgacgcgatctatactcactgcaacctccacctcccaggttcaagcgattctcctgcctcagcctcccgagtagctgggactacaagtgcatgccactgcactcggctaattttttttgtatttttagtagagacagggtttcaccacgttagccaggatggtctcgatctcctaacctcgtgatctgcccgcctcggcctcccaaagtgctggaattacaggcatcagccaccatgcccagcctaatttttgtatttttagtagatacagggtttcaccatgttgcccaggctagtcttgaactcctgcgctcaggtgatttgcccacctcggcctcccaaagtactgggattacaggcatgagccaacatgcctggcctgccatatagtttatttcttatttattttattttttgagacagagtctcactctctcacccaggctggagtgcagtggcataatcactgttcactgcaacctccgcctcccggtacaagcagttctgctgcctcagcctcctgagtagctgggattacaggcacctgccaccacgcccagctattttttgtatttttagtagagacagggtttcaccatgttggccaggctggtctcgatctcttgacctcagatgatcctcccgcctcagcctcccaaagtactgggaatacaggtgtgagccaccatgctcagctcctgccatctagtttagaactcaaacatttacctactgatgtgatttttatttttgtaggcatttgtcttggttataagagggcagggaccacatcttactctccagaagccctgacattgtccagctgaatgggtccccagcagtggtgcatgtactgatgcaggagagtgcagtgagggataggaggaagccaggaggcgaagacgggaggatgtaaggaggaaggtgctgtgtactcagcaaaggcaccctgggggaggccaggcttacctctctttgcaggaatagtttatgtttgaaacacctggctgggtgcggtggctcacacctgtaatcccagcactttgggagcccgaggtgggcgaatcacctgaggtcaggagtttgagaccagcctggccaacatggtgaaaccccatctctactaaaaatacaaaaattggccgggcgcggtggctcacgcctgtaatcccagcactttgggaggccgaggcgggtggatcatgaggtcaggagatcgagaccatcctggctaacaaggtgaaaccccatctctactaaaaatacaaaaaattagccgggcgcggtggcgggcgcctgtagtcccagctactggggaggctgaggcaggagaatggcgtgaacccgggaagcggagcttgcagtgagccgagattgcgccactgcagtccgcagtccggcctgggcgacagagcgagactccgtctcaaaaaaataaaaaaaataaaaataaaaataaaaaaaataaaaatacaaaaattagccaggtgtggtggcaggcacctgtaatcccagctactcgggaggctgaggcaggagaatcatttgaacccaggaggcggaggttgcagtgggcagagatcacgccattgcactgcagcctgggcaacagagtgagactccgtctcaaaaaaaaaaaaaaaaaaagtttgaaacacttactgctctctattgctcctgcaacctttgttttctgattttctaaaaatcatttctcctccgggtgctgtggctcatacctataatcccagcaccttgggaggccgaagtgggcaaatcaccagaggtcaggagttcaagaccagcctggcccaatatagtgaaaccccatctctactaaaaacacaaaaattagccaggcgtggtggcaggtgcctgtaatcccagctacttgggaggctgaggcaggagaaccacttgaacccgggaggcggaggttgcagagagcagagatcacaccactgcgctccagcctgggcaacagagcctccaaaaaaataaataaaaataaaaatcatttatctctcttttcttacttcttaggatgctttcattggatttggaggaaatgtgatcaggcaacaagtcaaggataacgccaaatggtatatcactgattttgtagagctgctgggagaaccggaagaataacatccattgtcatacagctccaaacaacttcagatgaatttttacaagttacacagattgatactgtttgcttacaattgcctattacaa

SEQ ID NO: 38238 - DNA, 2300 bp, Homo sapien
tctcctgcctcagcctcctgagtagctgggattacaggcatgagccaacacgcctggctaattttgcatttttagtagagacggggtttgttcatgttggtcaggctggtcttgaactcctggccccaggtgatctgccagtcttggcctcccaaagtgctgggattacaggcgtgagccactgcgcccggtctgtccatggattttttaaaaaacgtgttttgagcaatctaaaacaaaagcagtctgcctaaaatttatatttatgtatttctactatattacagatattgattttgtggagctataatttaataagatattttaacagtaataaaacattatataattttgtatattgttatttcctaaaaagtttagttatttaagtgcaaatgcaaaaggcaggagtgctcatattgaagcactaggaaaaaactttgtgggtaaaaattcaacctcaaatatgcaaatatttaactttcaatgtggaaattatgtctttttacaaaagaaaaatgaacatatttgtttgcaaggtgttcttatacacacacacgcgcacacacacacatacatacacacacggcctttagaatatggtaaccaggccaggtgtggtggctcatgcctataatcccaacactttgggaggctgaagtggttgtatcctgaggtcaggagttcgagactagcctggccaacatggtgaaaccctgtctctactaaaaatgcaaaaatcaaccgggtatggtggcgggcacctgtaatcccagctactcaggaggctgaagcaggagacttgcttgaacccgggaggcagacgttgccctgagcctagattgcgccattgcactccagcctgggcgacagagcaagattccgcctcaaaaaaagaaagaatatggtaatcaaaaacatctatattctttttaggtggtctttgaaaaacaatagcaaatctatctgcaaacacatctaggcggggcaagagagtgaaaatgggacattaattaagattgattgatggaaaaagtgatgtaaaaagtagaaggacaaaatcccttccacaattttgaggaaagttctttgaatttgtcttttatcactcagcttaataagaaataaaattgaaaataaattaaatagaccaggcacggtggctcaggcctgtaatcccagcactttgggaggctgaggcgagcggatcacgaggtcaggagatcgagaatatcctggctaacacggtgaaaccccgtctctactaaaaataccaaaaagtagccgggcatggtggtgggcgcctgtagtcccagctactcgggaggctgaggcaggagaatggcatgaacctgggaggcggagcttgcagtgagccaagatcgcgctactgcactccagagcctgggcaacagagccagactctgtctgaaaaataaataaataaataaataaataaataaaataatttacattgtcctactatttacattttactaactccatatgtgtagaggtataagggatttttagaagagaaacaaggttgagacttctaaacctgaatttggataaaagatcaatcttcaaaagtattgataattttggaaaataatttttaagaaaagcatgacagccagtgattacctagttatgcaatttgttgtcagagattgtgaaggctttactataaaaactataggatggctgggcgcagtggctcacgcctgtaatcccagcactttgggaggccggggcaggcggatcacgaggtcaggagattgagaccatcctggctaacacggtgaaaccccgtctttactaaaaacacaaaaagaaattagccgggcgtggtggcgggtgcctgtggtcccagctactcgggaggctgaggcaggagagtggcgtgaacccaggaggcggagcttgcagtgagccgagatcgtgcccctgcactccagcctgggcgacaaagcgagactccgtctcaaaacaaaaaacaaaaaacaaaaaaactgtgagatgaacaatgatgagattttgtttgtcttctttcttcataggtgaatattataccactgattgccaaagcagacactatttctaaaaatgatttacagacgtttaagaataagataatgagtgaattgattagcaatggcatccagatatatcagctcccaacagatgaagaaactgctgctcaagcgaactcctcagttagtgtaagtttcagtaacatatctgacaaagaggctagaaatgagtgtttatccagaatccagtgtgagaatttttaa

SEQ ID NO: 38239 - DNA, 2300 bp, Homo sapien
aggcacccaccaccatgccaaggtaatttttgtatttttagtagagatgaggtttcaccatgttggccaggctggtcttgaactcctgagctcaagcaatttgcccaccttagcctcccaaagtgctaggattacaggtgtgggtcaccacacctggtcaggcaagaatatttttaaagaagttaagaaaaccctaatttagtattaggttggtacaaaagtaattgtggtttttgccattacttttaatgccaaaaactacagttgcttttacatcaaccttatataaccttatcttagttggtttgcagaaatttgcagtggctatattttccaagctcaatctatagttctggtagttctggtagcatttttggacctctatgcaaatgcaaagcacatttctatatttcaatatccctgtaactgtgcagttgaggagttctcacctaaccttcaattggaagtgattaatctgccatataatgacatgctaaaatgcaaatttcaagagaatataacagaactctattcttccaagcaatgaatatgctcaagttaaatcatatgttcatggacggtatcagtgtttggcagtacgtatctatcttaaaaacattttcaaagatgaaatatgtaaaatctcattataaccggtagaaacagatgtacacaattttgatgctgaagaacactaactctggggcctagcacagtgctgatgcctgtaatcccagcaccttggggggcctgaggagtaagaatcccttgagcccaggagttcaagaccagcctggacaacatagtgagatccccatctctacaaaaaagttttaaaaattagcagggcgcagtggctcagggctgctgtaatcctggctactggggaggctgaggcgggaggatgcttgagcccaggagtttgaagctgcactgagccatgatggcaccattgccctccagcctgggtgacagaacaaggccctgtctgaaaaacaaaacaaaataaaacaaaaaaaactaactaactccgaactccaattaagcaaaatgttacgcctaaaaaaattccattctttggccaggcgcgatggctgaagcctgtaaacccagcactttgggaggccgaggcagggggatcacgaggtcaggagatcaagaccatcctggctaacacggtgaaaccccatctctactaaaaataaaaataaaaaaaaaattagctgggcgtggtggtggccgcctgtagtcccagctacttgggaggctgaggcaggagaatggcatgaacccgggaggcggagcttgcagtaagcggagatctcaccactgcactccagcctgggccacagagcaagactccgtctcaaaaaataaataaataaataaataaaataaaattccattcttcgcatcagtagcatatactatataatgatataatgatatcattattgtatttttttttgagatggagtcttactctgctgcccaggctggagtgcaatgatgtgatctctgctcactgcaacctccccgtcccgaatttaagcgattctcctgcctcagcctccggaatagctgggattacaggcgcccgtcaccacgcccagctaatatttgtacgtttattagagacgggggtttcaccatattggccaggctggtctcgaactcctgacctcaggtgatccaccagcctcaagctcccaaagtgctgggattacacgcgtgagccaccgcgcccggccaataacatcatcatcattatattttgagtttcatcaatatgaaattgatgggaaggaggggtgattccaggactgaaaggaaggcttgtgtcgtcaccatggagatggacagtccaacgcttctaattggcagggacgaagggacgggtcctcggcccgtccccctcgttcctctaggaccggaaaattctgggaaggctcgaggccgcggtccccggggtccgcatagtcccgatgaaaaacagacccgggaaagctggtgggagtcaggagccccggcgatgaggattgcgatgaaggaagcaggctcggagcgccgccagcgcatgcgtattggggatctgaggccagcgtcttgcgccgccattgcggggaggctgtcctcagagcaggtctggcgcgccggtggctggaccggccccaggagcccagtcaccgggcgtcattggctcaggctgcggggccctcggcaccttctccctcccgggtccaccgcggcggcggcggcggcggcggcggcggcggcggcggcgtcagggggcggagcct

SEQ ID NO: 38240 - DNA, 2300 bp, Homo sapien
caggcttcagtgcagtggtgtgatcttggctcactgcaacctctgcctcccaggctgaagcgatcctcccacctcagcctcccaagtagttgggactacaggcacaagccaccacacccagctaatttttgtattttttgtagagacagggcctcatcatgttgccctagctggtctcaaactcctggcctcacgtgatctgcctgcctcagcctcccaaagtgctgggattacaggcatgagccaccgtgcctggctccactgcgccccagcttctacccatgggttctgtgacaggttccagtactcttccctcagccttcccctccagccacggtcattctcacctgtaaccttggttctttctgcagacaactggctctgccatctctagttgcccatcttggggaaaaacccgtctgcttctcctgactgtggggcttcttccaagcttatgcttagggaatgaagaacctatttcttaaagtgtttttaaatcactcctgaaaggtctgactgttaatgaaggacttttgaaatgttagattcctgccatgcttggaatggctgccttatctcacaggaccatttcactggaactgcagttttctcttttaaaaaattgctcctcagaatggcttctttctttatttccatcactcacattttaaaatagatttctcaggtcaacctttgtgaacagaaaaagatgtattccttcatgattattagcaaataataatacaatcttactttgttgttgaaacatgtgtttttccatctttctaaagaaaacagtcattgtttctcgaggcagagagcatgtgttctctgttctggaaaaggtaagaaaaggactgaggctgaatttgttgttattgacacatgtacacctctgccttttgtaatgtgtgaatctgagaaattctaaaagtgctttttgattcaagaatgccacaccttactgtgctctgtctgtgtgaagaatagtttgtatgtctccttacagactctgtaagcccctaggtggctgagactgctggatttcttctgctgaccctggtgcatctcattacaggtcttcaacctaaaattctatcttacaagatccttgccaggatgcagatttgaatactatagtgaagtctgtacatgaagaaatgatgcttttagggaggaaaaaaaaaggtaataacaaccttcaagagccccttcatctcaactcggcataaacaaggcaagattctgagagtggccgcccctggaagcagaaattattcttgtggctatccattggctcctgaggctctaatcagagatggggcacctttagtaccaggggagtgactgttgcccataaggtactggacatcaactttcaagagcagccccagctccttaagctgctggtcctggtgcatctgctgactttcatgtagaagatagcagagctttggcgacattacaacataagaactgcagagaggtgtaatcccagtggaagactgaatcgagagactcaaaaaggaaggtaaacacttggaaaaatcagaatagtgacatctcctttgcatattggaaggatcaccttaggggagaggagaggcagatctctggagtattcactttggggtgaattcattccttgtggggataaagagtaagaatggaccctcacccatgtgctctccatcgcctcatcccagtagttctcatctacacttagagtcacttggagactttacaatttaaaatgctgttgctcagacccatgccagatcaattaaatccaaatctctgagtgtaggggctgaacactggcttctttttaaattgccatcagtatttagccagggctgaaagcccctgagctcccctatgccacaacaaggggagttgcacccccgaagacagacagttctgcattgaattcccgaactcctgaacatcatagaagagtagagacgtcacaacctttaggcttatgtcttagagggcttctcagtactgtctgccatacctacacaaagcagaatctccaggatttaaatttaaccttcgtgtcatatattaacaagatgcttctctttttcctagttatgccttctcagaatgctgttttttctcaggaggggaacatggaggaggaagaaatgaatgatggctcacagatggtgagatctcaggtaagttcagttttcctctcctctgaaatgccagtgttctcagaatgtgggcacttttactttttcatttctcagaagtgctgagtcacaaaaatccagagcccaggagattca

SEQ ID NO: 38241 - DNA, 2300 bp, Homo sapien
cctcggcctcccaaagggctgggattataggcgtgagccactgcgcccagccttaaagttttaatttttgaaccattttaatgatttacacattcaaaaaataagattaaaaggatatggtttttcctatcctcgaatacaaaattgtatacaaacatataaaaatgaaggccaggcacggtggctcacgcctgtaatcccaacactttgggaggccgaggcgggcggatcattaggtcacaagatggagaccatcctggctaacgcggtgaaactccatctctactaaaaatacaagaaaaattagccgggcgtggtggcgggtgcctgtagtcccagccacccgggatgctgaggcaggagaatggcgtaaacccaggaggcagagcttgcagtgagccgagattgtgagcgagactccgtctgaaaaaaaaaaaaaaatctaattgtatagaatattgttacaaccacacagaagaaaaaaaaagaatcccaagaaatgttgaacacagtgctgtcattgtacactctaaggacaaaaagaaccacaaaaaataatctcacgcatcacttagaaagtttgtttttagtcgggatattgttagtacaactccaaaagcatatagtgtatactataggatttagcattaatcattgatgttgtcggggtagggaccagagttctaactgtggaagaaaggagataaaaatacggaactggtgaagcaaaagaagaaacccactggtggctcatgcctgtaatcccagcactttgggaagccgagacgggcggatcacgaggtcaggagatcgagaccatcctggcttacacggtgaaaccccgtctccactaaaaaaaatacaaaaaattagccggcctggtggcaggcgcctgtagtcccagctactcggaaggctgaggcaggagaatggcgtgaacccgggaggcggagcttgcagtgagccgagatcgcgccagtgcactccagcctgggcgacagagacagcctccgtcccaaaaaagaaagaaacccactgctgtttaaaggtaggtgtgtgtgtgcgtgtgtgtatgtttcaatgtatcgatagctacatctgctgaaatagcctacaggcaggaaaatcccagtagcaagttgctcacctagcactcagagctttgttgctaagtaccactccccactgatatttttcgtttgaaaaacttctgatacaataactggtcagggaaagtataggtaaatctggaccagccaggcacagtggctcatgcctgtaatcccagaactttgggagtccgaaataggtggatcacttgaggccaagagttcaagaacagcctggccaacatggtgaaatcccgtctctactaaaaataaaaaaaattagctggacgtggtgccagatgcctgtagtcccagctactcaggaggctgaggcaggagaatcccttaaacccaggaggcagaggttgcagtgagtcaagatcatgccactgcactccagcctgggcaacaagagtgagaccctgtctcaaaaaaaaaaaaaaaaaaaacacttttaggccaggcacggtggctcacgcctgtaattccaacactttgaaaggccaaagtggttggatcacttaaggccaggagttcgagaccagcctggccaacatgtgaaaccctgtctctactaaaaatacaaaaattagctgggcatggtggtgcacgcctgtaatcccagctacttgggaggttgaggcagaagaatcgcttgaacccgggaggcagaggttgcagtgagcagagatcgcgccactgcacaccagcctgggcgacagagcgagactccgtctcaaaaaaaaaaaaaaaaaaaagaaacaaaacaaaagaatgaaagaaaagtccgaaacctcctgcgccactgtccactagctgcgcgcgttaggaaaccagaggtcagcgcccccgaccccgccaccgccgcgggtccctttaagggagagtgggcggggtcctgcctttaactccgcccacggctaaggagatgcacggcctacgagaggggtagtgtgggactgagccaatgcgtacggcgtgacgccatcccgctgcgaccggcgctccccggggcaggtggctgcatagtcttggcggaggtgagtctcgtggtggaggtgagggcaggctccggggtattgctgccgggggaggatttgctggggacccaaggcaccctcgcgtgagagccctgagagcgaatcgcttcgtctgacctcggggttgtctggggcgagggcacgaatcacc

SEQ ID NO: 38242 - DNA, 2300 bp, Homo sapien
ggagtccgaaataggtggatcacttgaggccaagagttcaagaacagcctggccaacatggtgaaatcccgtctctactaaaaataaaaaaaattagctggacgtggtgccagatgcctgtagtcccagctactcaggaggctgaggcaggagaatcccttaaacccaggaggcagaggttgcagtgagtcaagatcatgccactgcactccagcctgggcaacaagagtgagaccctgtctcaaaaaaaaaaaaaaaaaaaacacttttaggccaggcacggtggctcacgcctgtaattccaacactttgaaaggccaaagtggttggatcacttaaggccaggagttcgagaccagcctggccaacatgtgaaaccctgtctctactaaaaatacaaaaattagctgggcatggtggtgcacgcctgtaatcccagctacttgggaggttgaggcagaagaatcgcttgaacccgggaggcagaggttgcagtgagcagagatcgcgccactgcacaccagcctgggcgacagagcgagactccgtctcaaaaaaaaaaaaaaaaaaaagaaacaaaacaaaagaatgaaagaaaagtccgaaacctcctgcgccactgtccactagctgcgcgcgttaggaaaccagaggtcagcgcccccgaccccgccaccgccgcgggtccctttaagggagagtgggcggggtcctgcctttaactccgcccacggctaaggagatgcacggcctacgagaggggtagtgtgggactgagccaatgcgtacggcgtgacgccatcccgctgcgaccggcgctccccggggcaggtggctgcatagtcttggcggaggtgagtctcgtggtggaggtgagggcaggctccggggtattgctgccgggggaggatttgctggggacccaaggcaccctcgcgtgagagccctgagagcgaatcgcttcgtctgacctcggggttgtctggggcgagggcacgaatcaccccaacctttccgaagcctggtggaatggcttgtgaactgatctcaaaagcagcccaagtcatccgtcgctgggccggggagggggacaccgcggcggccccgccgagtgctacctgggcactgagcctgtggggagaggcgacccagcggggtggagagagataagggaccagtaacgtccagcgtttgtccgtggtattgagcgttctgtgggtcaaattctcaaagcactcctgcgaaataggcctgcccattttgcagaaggggaacgtgaggcttggcgaagttaaagttaccgctttgtaagcgctgtaaagatgagaggttgggtagtggggaacgtgtaagcatctctgaaatggtgattcaagccgggcgcggtggctcacgcctcttaatcccagcactttgggaggcttgaggcgggcggatcacctgaggtcaggagttcgagaccagtctggccaacatggtgaaactctgtctttactaaaaatacaaaaattagctcggcgtggtggtgcgggcctgtagtcccggctactcgggaggctgagggagaagaatcgcttgaacccgggaggcggaggttgcagtgagccgagatcgcgccacttcactccagactgggcgaaagaactaaacttcatctaaagaaaaatacatatggccgggcgcggtggctcacgcctgtaatcctagcactctgggaggccgaggcgggcggatcacgaggtcaggagatcaagaccatcctggctaacacggtgaaactccatctctactaaaaatacaaaaaaattagccgggcgttgtggcgggcgcctgtagtcccagctgctcgggaggctgaggcaggagaatggcgtgaacccaggaggcggcgtttgcagtgagccaagatcgcaccaccgcactccagcctgggcgacagagagagactacatctaaaaaaaaacaaaacaaaactgtttctgggtggaggggggaacgaaaaagaaaaaaactgtttctggactaacctggacagttcttgtgacaaaattcatgtggcatcataaccaccagaatatgagactttggaatttgcttttcaggtgaccaaagccacgtaatgtccgtagttcgctcatccgtccatgccagatggattgtggggaaggtgattgggacaaaaatgcaaaagactgctaaagtgagagtgaccaggcttgttctggatccctatttattaaaggtgagaaacattcttgtttccgggtggctttggtaaatcaccaccatgtcctgggtcc

SEQ ID NO: 38243 - DNA, 2300 bp, Homo sapien
ccttggcctccatcccactggcctccaagggacaggtgcctttccctgctctggggcaaagccctcctccatccacagggtccacctctgtcctccctggtggctccttgccatattaacgtgttcaaattctaccccagtcagaaaactgcaccccttgagccctgatgctcccttggcccccaagattaccagcttcagggaacctcccagtttttgtccaccttatgacctccaagcaacccagtcctgagggcactttcctctctgcctctgcagccccgcactggcctggaaatgctccctttggtggccagagcccctacttctcccaggttctcccccacccccagggtccagcttccttcctcctgccctcaccttggttgcagttttcatggttatatttgtggcttttttctttttcttttctttttttttttgagatggagtctcactctgttgcccaggctggagtgcagaggcacaatctcggctcactgcaccctccacctcccaggttcaagcaattctcccacttcagcctctcgagtagctgggattacaggcacccgacaacatgcctgcctaatttttgtatttttgtagagatgggatttcaccatattggccaggctggtctcggactcctgacctcaggtgatccgcccgcctcggccacccgaagtgctgggattacagacgtgagccaccgtgcctggctcatttgtggctttttaaaaaatcttcctggaggacacatttttccctctatagcgccagccacccagatccacgcctttgcttaagttatttcctcaagacagggatgccctcccttcttcccctgggactgatatgtcctgccagctccttggagaactttctccccatctatcctctaattcacagccacccccggttacatgctctctttccgtgcctctttcgtgtctcatgaacctgtccattttgacacttaacacactcggtccaatcatcattgtacattctgtccccactagacccagacggccttgagggtaaggtaccaaggactccccatggccagtgcccaccggtgctgaaatgaatgggaacgatgcagtcccaagacctcaagagaaccttcccagtcctttctccttaattttttttgtgtgtgtatggtgttttttaattttttcctcacttgctttcttttcttttcctttctctctttctttctttctcctgcctccctcccttcctttctttctccttccttccctcctttctttctcctgcctcccttccttcctcctttctttctccttccttccttcctttccctccctttctttctctctctttctctctttctttctttcgctacaggacgtcgtgtgtttgcccaggctggagtgcagtggcacgatcatagttcactacagcctccacctcctgaactcaagcgatccttctgcctcagtctccagtgtagctggcatcacagacgtgctcctccatgcccggctaatttaaaaatgtttttgcacagtgagggctcgctatgttgcccaggttggtctcgaactcctggcctcaagagatctccggcctcagcctcccaaagtgctgggatgacaggcgtgagctattgcgtccggccccagaatgcacttgttaaagcgttgtggggctttttgaaatgacaatatattcatatactacaaaatttaaaagacattggcggggtggggtgggggtaaacccactgccactgccccgccccaggccctggattcccctaggcacagtgttactctttccttttggagttttccctgatcattgaagttatgcccttgtcccttctgcacccgcgcttctgggcaccgagctcctcccgctgaagtgatcggcttgcactgactgcgcttgggcttcgcgctttcccgcagcggccgggccttggcgcctggacgccccgccgacccccgcggccgcgcgccctgctccccctggcggccgcgccccgcactgcagtggccgcgttggggcccggccgggggaggggtcgcgcggcggcggcgtcagcggcggcgcccgggcggtgggagccgaggcgccgagcaagatggcggcgcgagtgctgcgcgcccgcggagcggcctgggccggcggcctcctgcagcgggcggccccctgcagcctcctgcccaggctccggtgagcagcgccgcccttcccgggaggtgccggggaggggccgccgcgaggcggagggcgcgggtttcccggcgccggtctccgccccg

SEQ ID NO: 38244 - DNA, 2300 bp, Homo sapien
gatttagtctcaccccctgctctgcatttttcgattactagcattgtcacatcccttacctcattgtacccacccaaaggggaatccctttggtattattatttgtttgtttgttttagaggtggtcttgctctgttgcccgggctggagtacagtgcatgatcatagctcactacagcattgaacttgtgggctcaagcgatcctcctgcctcaggttcctgggtagctaggaccataagcacgagccaccatgcccagctactctttttatttttttttgtagagacagggtcttcctatgctgcccaggctgactttggtgtttctgagatatgaaataaatgctcagttggggtgatttttatttcaaaggcatcctttatcagtgaaaatattatctgtctataaatatacataatatatgtttgcctctgtatttctggaaggatatacataaaactattagtagtcattgctttagtatttcttattttaagtgaaactccctagtcagtatttttagacactttttattatatccctttcttaattgttcataattgttattcctaagcttttacaatttatttaacaaaaaaaattgtagacacaatttctgtttaatgaacttaaaatctaaaataaacacagaaattggctgggcacagtggctcacacctataattccagcactttgggaggccgaggcaggtggatcacctgaggtcaggggttcaagaccagcctggccaacatggtgaaaacccacctctactaaaaatacaaaaattagatgggtgtggtggtgggtgccgctagtctcaactgcttaggaggctgaggcaggagaatcacttgaacccaggaggcggaggttgcagtgagctgagattgtgccactattgccctccagcctgggcaacagagcaagactctgtctcaaaaaaaaaaaagaacatacagaaattacatagtcccataaacaaatcttaaaactttctactttgtgtatcactaattttatatggttgccttaaagtaatgcgtaagtttcttttttctttttctttttttttttttttgagacagagtttcactcttgttgcccaggctggagtgtagtggcgtgatctcggcccactacaccctgcacctcccgggttcaagcgattctcctgcctcagcctcctgagtagctgggattacaggcatgcgccaccatgcctggctaattttatatttttagtagagacggggtttctgcatgttggtcagtctggtttcccgacctcaggtgatccacccgcctccttggcctcccaaagtgctgggattacaagcatgagccactgtgcccagcccatgatattattaaacagatatccctaaatgtagtgtacgtaaaacacttcaaactaattgacaaaatgtgctttcatttttattggaatatggctgggtgtggtggttcacgcctataatcccaggactttgggaagctgaggcaggcaggtcacttgagctcagaaattcaagaccaacctgggcagcatggtgaaaccctgtctctacaaaaaaatacaaaaattagttggatgtggtgctgggcacctgtagtcccagctacttgggaggggttgagacaggaggatagcttgaacccgggaggtcgaggctacagtgagccaagatcacgccactgcactccagcctgagtgacaaagtgagaccctgtctcaaagaaaaaaaaaatacagaagagaaaagcacaatatagacattatatggagaaagctgtgtgtctttcccctctatccctttaaaccattttctcagggaaaccaccattaatgctttcttaatttttaggaatttttatatatagtaaacacaaattggaagcatcttcaacttacatctgcaaatgccacttaatactatatgtttttatctttcaagaaaaattgcatttactggtattgttattttgcttgtttaaagtgagtttgcttctttttaatctttgaaggatgtgaaaacgtgcttttatatttctttataattatttatagagcacattttatttttaatttattttattttattttattattattactttttttgagattgagtcttgctgtgtagcccaggctggagtgcagtggcacgacttggctcactgcaatctccacctcctgggttcaagcgattctcctacctcagcctcctgagtagctgggatcacaggcgtgtgccaccacacccagctatttttttttttttttgtagtgttag

SEQ ID NO: 38245 - DNA, 2300 bp, Homo sapien
gagcccaggaatttgaggctacagtgaactacagtgagctatcgcaccaccacacaccagcctgggtgacagggcaagacccagtctcaaaaaaagaaagaaaaaatccatgagtaaagtatagtttgtgacttgagtcaaatttatcctcactttctgaaagcattcacaatagaaatttaattatgagatgaaaattagcaaattatgtgttaataaagttggtattctgaggtttgtgggggcagttaaaaaatttttgatttttaaagttaatttttacaaatcttgattttttttttggccaggctcggtagctcctgcctgtaatcctagcactttgggaggctgaggcaggtggattgcctgagctcaggagttcatgaccagcctgggcaacacagtgaaaccccatctctactaaaatacaaaaaattagctgggtgtggtggtgtgtgtctgtaatcccagttaccctagagggtgaggcaggagaatcgcttgaacctgggaggcggaggttgcagtgagcccagatcgtgccactgcactccagcttgggcgatagagcgagactccatctaaaaaaaaatttttttttgatttttaagttacttgaggggtaaattttttttaaagaaagaatgtatttcattttccttgtatttttaaaatatttttattgtggtaaaacatatatacataaaatttgccatttaaaccatcttaagtgcataattcagtggcattacttatattcacattgttgtacaatcatcaccactatctgtttccaaatcaaataatattttttaaattgtggcaaaatgtacgtaatgtaaaattcaccattttaaccattttaagcatacagttcagtggcattaagtagattcacattttggggaaacatcactaccattcatcttgagaatttcttcatcttcctaaactgaaactccttaccccaacctcccctttcctcacctcctggcaacctccgttctgctttctgtctctgtgggtttatctactctaggtatccatgtatattttttctgtgtcaaaaattgctttgaaaaacacatagtgcaaattgcaaagataaatgtgggctctcttataggagtgccacacattttacatttttctttgcttctgcttcttggagtgcatgctgttgtcatggaaagcaggcattctttggtagcccaggttctggaacggtgcctagaatagctgctcactgtgtttgccagattaactgatggatatatgaaaacagtatactgcgtgacaacacctttgttattccataggacatggacatcttccagcaacagatctcgagaagacagctggctaaaatccttatttgtccggaaagttgatccaagaaaagatgcccactccaatctcctagccaaaaaggaaacaagcaatctatacaaattacagtgtgagtgacaggtttgctatcttcatagttgactttttttcccctttgttcctaagtttatcgttgaattttcttttgtttcagttcacaatgttaaaccggaatgcctagaagcatacaacaaaatttggtgtgtataccaaactatcctttacttggggaaaaataatgactttatttgttagttaattccactaacacttgatagcatagagagagatctttcatccctctcttttgaagctgaacattcagaggctcttaaactgagcttcatgtgggattgccgaaggcgttttgattttaagcactcacacagctaaatcatcatataggctatcagactttagaatgttaccagactcttgtgtttggaggaactttgccaggctgtctagtccatctacttatccagtgctggagtcctttccacagaccttcctgactgcctgtcctgaagtaagttccatctctggacagctctgagtgttaggaataagaattcacatctctgagtccttcattgattcccctaagtaaaactgccctgtgagagtcctgtatgtatttgaacatagctgccatttcttcccaactcctctgttctccaggatccaagtcccttccgctgattctcctatgatttgcgatctaaacctgcttacagaatttgtaaactttaagacgaaaggggagaactaagcttaccagcttttaagttaacagaaatagtattttaatgacccatggtgagcaaatgtgaagaaaaaggtttttagttttgttttgtttttacctttaatatctactacgttcttaagaaagcaaacaattttgtccc

SEQ ID NO: 38246 - DNA, 2300 bp, Homo sapien
agtcatgattgtaccactgcactccagcatgggtgacagagtgagaacttgtctaaaaaaaaaaaaatttgttttgactctctgtcctctgcagcttctgtagcagtgtggcttccagagtttcttcctgtaccttcaccattttcgttctccttcccaggctcaagtcaggacataaaggtggtggtcctgcaggctctgtccttagcactcttttcttctccctctctctattctccctggactttatttttatgattttttcttttcttcagacagggtctcattctgtggccccatgctggagtgcagtggcgtgatcttggctcactgcaatctccgcctcccaggttcaagagagtctcctgcctcagccttctgagaagctgggactacaggtgcacgccatcctgcccggctaatttttagttttttagtagagatggggttttgccatgttggccaggatggtcttgaactcctggcttcaagtgatgctcccgcctcagcctcccagagtgctgggattacaggcgtgagccaccgcgcccagcctcttcctggactttaatcagaccatgtcttcaactagcccctgtacattggcgacattgtgtatgtttagccctcatatttagctctgaccttttttctgaggcttaaagcctttcccagtatctggaagttaaagtctaaactccttagcctggccctaggacctgcttagtgtgaattcctgatgcacagccaggcccctgggccaagccatagggtagcttccagcaggtcatctgcttccttctccttgtctttgctcacactcctcgctctgccatcacaagcctccctccttgtctccacccccgctccctctcctcccagcacatgccaaatcgatgccctgccctttgacaacccactcagagggccacttacctgtcagattcagctcaaatacttgtgcctccttgaagccttctttttttttcttttagttagagtcagggtcttgctctgttgcccaggctggagtgcagtggcacgatctcagctcactgcagctctacctcctgggttcaagtaattctcctgcttcagtctcccaagtagctgggattacaggcgtgcaccactatgctcagctaattttttgtattattatttttagtagagacttggtctctctatgttgcccacgctggtcttgaactcctggcctcaagcaatcctcctcctgccttagcctcccaaagtgctgggattacagggatgagccactgtgcccagtctgaagccctgtttcatagataaggctaaacatttttcctgtgttcccacagagccttatgcacacctctgcttttttttttttttttttttttgagacggagtctcgctttgtcgcccaggctggagtgcagtggcgcgatcttggctcaccgcaagctccacctcccaggttcacgccattctcctgcctcagcctcccgagtgggtgggactacaggcgcctgccaccacgcccggctaatttttttatatttttagtagagacagggtttcactgtgttagccaggatgttctcggatctcctgacctcgtgatccgcccgcctcagcctcccaaagtcctgggattacaggcctgagccaccgcgcccggcctcacacctccgctttaatgcttgcttcctcactacaattaggtagaaaaaaaaaaaacaactatatatatatctaaaagaaaagaaagatggcttcaaggaggcacaggtatttgagctactcaggaggctgaggcaggagaatcacttgaacctgagtggtggaggttgcagtaagccaagatcgtaccactgccctccagcctgggcaacagagtaagactccacctaaaaaaaaaaaagaaagaaagaaagaagaaactggtgtagtgtgggaagtaaacaaaaagaaaaggaaaaaaaaatgaatctgtgagaacactcttatgtggcctgcactgactttgacacaaattagattggcttagtaggcaaggtgggatcttttcataattttatttgatgtctttaaatacatttatcttttttcttgtaggaggaaaattcttccagcgatggtctcccactcagagctgaggaagcttttctactcagcagatgctgtgtgttttgatgttgacagcacggtcatcagagaagaaggaatcgatgagctagccaaaatctgtggcgttgaggacgcggtgtcagaaatgtagggatagcatttattcactttatgaaatgataaagact

SEQ ID NO: 38247 - DNA, 2300 bp, Homo sapien
gccgccaccatgcccagctaatttttgtatttttagtagagacgggtttcactatgttggccaggctggtctcgaactcctgacctcaggtgatccacccgcttctgcctcccaaagtgctgggattacaggtgtgaatcactgtacctggcctttattattattattattttttttgaggaatctcgctctgttgcccaggctggagtgcagtgacatgatctcggctcactgcaacctctgcttcctgagttcaagcaattctcatgcctcagcctcccaagtagcttggatcacagatgcacaccaccaggccaggctgatgtatttttacagagacggggtttcaccatgttggccaggatggtcttgaactcctgacctcaagtgatccgcccacctcggcttcccaaagtactgggattacaagcgtgcgccaccatgcttggcctcctcataacatttttaacagcagttataataaatccgcatgcacaccgtgtaatgcctatggaactaataactagtcttctatcgtgcagtgctactagtcacatatatagatgtttttgtgattctcaaatacacaaacccacctaagagcatcatatacccagatattcactgcagtctgaatagcagactgtgaacaacttaaacatcagtcagtaggtgaccggttagttgtgtcattctttttgagaaagggtcagctccgtagcccaggctgaagtgcagtggcaagatcatagctgactgcaacctccacctcccagattccagcaatcctcccacctcagcctcccaagtagctgggatcacagacgtgcaccaccacgcctggctaatttttgtatttgttgtatagatggagtctcgctatgttacccagactggtcttgaactcccgggcacaagtgatgcccccgcctcatcctcccaaagtgctgggattacaggcgtgagccacccagccctggcccctagttgagtcattcttacaaagaacatcacgctgctgttaccgaggacttcccattagtcttgatatggcacaatctccaagacacttaaagtataacacaccctgcagtgtgtattatgaattgccatttgtgtggggaaatgattatattcatatgtaagtttataaattcagaaagcattccgaaaattcatagagtacccaggggtaactttgcttgtctctagtgttgaactagaagtgggaggaagatttaattttcactacatgccctttggtgccttttgaattcagaacaatttccgttatttattaaaaataaaatacagccgggcgcggtggctcacgcctgtaatcccaacactttggaaggccgaggcgggaggatcacttgaactcaggagtatcacttgagctcaggagtttgagaccaccctgggcaacatagtgagaccctatgtttacaaaaagaaaataaataaagtaaaataccacgtgttactgaatccctggtatttggcgggacactggatactggaaacaattgtggagctctttggaaatttaccttaaaagggagtccgctcaaaggcaggaatgactctacaagggtgaattttcaaatctgccataggggcctcgggcctcagcagcatccagagccctacggacgggcaggttcttacgtctcaactcccatcgcaccagtcctgcagctttctaaaggtatccagcactttctaccttgcattctatcttcatcttcgctaggcctcacagcaccgcatgattccgggggagggtgcttatcagactcgcgtgtggccccacggcacctagggcaccgtcgagcacacggtccgggaagctccaatgaaacggaacaaaccgcgagatcaggggaggtaggaggcccaccctacgccctgcccccgcggagcacaagccccgcctgcgtcccgagctcccgggtccgcaaagctgggccccaaagagctccaacgccggaaccaaggagcacggaatgccgggaacaagctcctcccgtgcgcgatgacgacaaggccgaggcgcgaagggtgggaccgcaggagccgtgcagccgcggaccaatgagcgggcgccggacgacctgtggcccaatggcggcggcgcgcgggcacgctgggggccggccagacgggccgacttttccagaagacccggatagttcctcccggccacgccgcgccggctctgggcactcagcatcgtttccttttcctccgctggagcagctatggcggcggtgaagaccctgaaccccaaggccgag

SEQ ID NO: 38248 - DNA, 2300 bp, Homo sapien
gtttaagcgatcgattctcctgcctcagcctctgaagcagctgggactacaggcgtgcaggaccacacccggctaatttttgtatttttagctgagtcggagttttaaccatgttggccagggctggtcgtgaactcctggcctcaaatgatccacctaccttggcctgccaaagtgctgcgattacaagcataagccaccacacctagcccccaaacaattctgaagtcaagtttaactgtggctccacttttcaaacacgggccaccactgagcccactaaaaacaaaaactacacctcctaggttagcaagtccttactaaagatatttcatctggatgttgatggcatggtataccactagcaaaaccctacatattattctgaactcaaatcagcaggaaataatttccttttcttggatttgaactgctaagttttgggaatttagggatgagtaaaaagcatactcccctcaataatctaatattctccatccctaagacttgcaaagagacagatttatctcccctccagttggagatagagatgagacctaacagagaaactgctgttttaaaaagagaaaacccagctgggcacgggcctggtaatcccagcactttgggaggctgatgcggggggatcgcctgaagtcaggcgttcaagaccagcctggccaacacggtgaaatcctgtctctactaaaaatacaaaaatcaactgggcgtagtggcgcgagcctgtaatcctagctacttgggagactgagacagaagaatcgcttgaacccgggagggagaggttgcagtgagttgagattgtgccaccggactccaggctggtcgacagagcgagacttcgtctaattaaaaaaaaaaaaaaagaaaagaaaagaaaaatcatcctcatgcattttgcccatgtgattgtgtcaacctctcttaatttttcaagttttaaaataattaactttaatatacaattacagccctttagcccggactgtgaatggcaaaaaagcagggattcaaaggcagggctgtcagactccaggcactcaggactattactgattacacgccacttctgaatgttctcctaccttgaaaatggacactgcaaatctttctacaaagaaaacattctacggaaaatcaagacctttctgacctagcccagagcacctctcaccatttcgtgaagcagcacattgccgtctttagtaagtttgatgtctccagcgccagaaacgagcctgtttaaaggacagaaatgaaccagactatgactttttcaacgataactaaaagtcccattagaaaacgggcttttcccagattttagggagccagggatgtggggctagttatgtccagcaggatggaggacaggtgtagtgcccaccccgtccccgcagagattgtgccgagtcctcagggtgcctggaagccccagagggcggggaacgccgcgctctagagccgctttgttctccgcggagactgcatcgatgcgggaagaaatggccgggacggtggggcttaggagggacacaggaccgaccccggaggacgccgagaaggacggctgcgcagccccgaggcggcgggctccagtccgcggtcccgggcccgccaggagcgcggcggcgcgcggtgcccgcccggccctccggttcagccccgccttacatcttcatggtgcccttgggccccaggttggtccttagcacgtcctgcagaccccgcgctgcgctgatgttgaccgccagcgccgcctgcgctcgggccacctcggccttggggttcagggtcttcaccgccgccatagctgctccagcggaggaaaaggaaacgatgctgagtgcccagagccggcgcggcgtggccgggaggaactatccgggtcttctggaaaagtcggcccgtctggccggcccccagcgtgcccgcgcgccgccgccattgggccacaggtcgtccggcgcccgctcattggtccgcggctgcacggctcctgcggtcccacccttcgcgcctcggccttgtcgtcatcgcgcacgggaggagcttgttcccggcattccgtgctccttggttccggcgttggagctctttggggcccagctttgcggacccgggagctcgggacgcaggcggggcttgtgctccgcgggggcagggcgtagggtgggcctcctacctcccctgatctcgcggtttgttccgtttcattggagcttcccggaccgtgtgctcgacggtgccctaggtgccgtggggccacacgcgagtct

SEQ ID NO: 38249 - DNA, 2300 bp, Homo sapien
gtaggatcttcaggtaatttaagaaataggccgggcgcagtggctcatgcctgtaatcccagcactttgggaggccaaggcgggcggatcacgagatcaggagatcgaaaccatcctggctaacacggtgaaaccccgtctctactaaaaatacaaaagaattagctgggcatggttgtgggtgcctgtagtcccagctgcttgagaggctgaggtaggagaatggtgtgaacccaggaggtggagcttgcggtgagccaagatggcaccactacactccatcctgggcaacagagcgagacttcatctcaaaaaagaaaaatgtgactgcgtgaaatatcaataccttctcatttcagtgtttaatatattaaatacccatctgaaaatcaataaccataattttgtgtgtgtttaaacagcttaatcagagggcttgttttggaccacggagcacggcatcctgatatgaagaaaagggtggaggatgcatacatcctcacttgtaacgtgtcattagagtatgagaaaacgtaagtttatagccccttaacagtgaaatggagaagcttcgtattttaggcgagttacttttttgtgaaactttgtttcccactgtaaggacaataatgctcaaattggtttgggggagctataggaaacagtctctgaagatgcataaggggcaggattggagctcagtgaactgttaaatcttaggactaatccagtttcagaagctgctttcttaatgtttccctgctttctgtaacttttttttttcttaatagagaagtgaattctggctttttttacaagagtgcagaagagagagaaaaactcgtgaaagctgaaagaaaattcattgaagatagggttaaaaaaataatagaactgaaaaggaaagtctgtggcgattcagataaaggatttgttgttattaatcaaaaggtgagaatgaaaactcaatgtataaactaaatagtacgtatcatcctttttacttttaaggtgaaagatgttgaaattaatttttatttttgttacagggaattgaccccttttccttagatgctctttcaaaagaaggcatagttgctctgcgcagagctaaaaggagaaatatggagaggtatccgagtaatttgacttttactcattttgcaagtgaattgggattatttctttttccttatactttatttttgggtttttcaactgtatagttaattggcattaactatattcacattgtgcaccccgtcagcactgtccatctctaggacttttttcatcatcacaaactgaaactgtatacccattaaatagttactccccatttctccctcccccttgccccttgtaaacattattttactttttgtttctgaattcaatatacttttttccaaagagctccccacaataaaaagctttttttaaaaattttttattattattttttgagacagtcttgctctttcgtgcagtggcatgatcttggttcattgcgactaccacttcctgggttcataggattctcagcctcccgagtagttgggattacgggtgtctgccaccatgcccactgaattgctttgtgtttttttagtagagatggggttttgccatgttagctaggctggtctcaaactcctggcctcaagtgatccacccacctcaacctcccaaagtgttgggattacaggtgtgagccaccatgcctggctaataaagagctcttgtccaccttttagatttcatttgctaacttggggagagtggtttaaatggagggttaagagaaaagactagtttttagctggttgatggcaaatggaaaggcttaaagtacattttaaaatttaattttgtgtgtaattctgaaaaattccttcctaaaaattactggtcttatctttgaaattcactggtaacgttgcttatccatctcccttaaaatgctatttcaggctgactcttgcttgtggtggggtagccctgaattcttttgacgacctaagtcctgactgcttgggacatgcaggacttgtatatgagtatacattggtaagtgtatttttttcttaaaggtaatagaaccttttagctcgtgaattatttttgtttgtttgtttgaggtggggtctcactcctgcccgggctggagtgcagtggtgtgatcacagttcactacagcctcatcttcctgggttcaagtgatcctcccgcctcaggcttctgagcaggtgggaccacagacgtgtgtgctaccatgactggctaatttttttttttct

SEQ ID NO: 38250 - DNA, 2300 bp, Homo sapien
atagatgtggtgattatattcatgggtgaaaaccagctaaagatagcaattaatgccagaaaaggggatgtagaaatctagtgaaatggtgacagccctgatcttaggttcctgtaacaaaacaacacaaattaagtacaaagtaggagataacaggtacctccatgcagtatgtgcaagacctattgtcaacattaatagaaaaggtttctggaatgagggaaatgatcagtccattttagtcagattatagttgaagtgctatacttcagtatgagtaaacagaaatgtatccagaagaagagaggggtgttcaggacttctaagtataagtcagacattcatcaaatattgtggacgggggtcatggtttagagtagaaaattgggctaacagagaagctttgaattctcatagttaatactggaggaaatgagtcatcagtgataagcaaagctgcacacaatattgttggttcttactgactgaacttattttaagatttggttgccttttaggtgagccaatggtggcagcagaagtaggcgtatgggataactattgtgtaaagaaacagcttcttcactcctggtaagtttgggaaaatgaaaactaaactgttagagaatcatacttttttcatttggtgttctctgtttagttgctcctttcccccatgaataatgtgatcagctggaagtatggaaactgaactagccctctgatgtgtagaggggaagggggaaatttaattggatgtaatgtgtgcagcttggttggaagtgggaagttgagtcgaattagggctcctaatcatctgagccatcttatttttgtccccctttcagcactgtgattgccaccaacattctcttggttgatgagatcatgcgagctggaatgtcttctctgaaaggttgaattgaagcttcctctgtatctgaatcttgaagactgcaaagtgatcctgaggattacagctgtggaatttttgtccaagcttcaaataattttgaaagaaattttcccatatgaaaaaaggagagaacactggcatctgttgaaatttggaagttctgaaattatagtatttttaaaaattgcactgaagtgtatacacataaagcaggtcttttatccagtgaacaggatgttttgctttagcagcagtgacataaaattccatgttagataagcatatgttacttaccttgttattaaatatttcttgaaaagcaaattttaatggtttaattttatgtggacgtatgttaaattatccaactaccctattgttaagcatttggttttaaaatttttatgctaatataaatgctcaagtaatttaaaatattgaaagcatccctgttggtataaatttctgagtaaatgcattggatcagttggactttgaacgcctttgaaatggctttgctaaaatgctcccgccacaaagttgtaggaaatgggaagaggagtcaactagaggcaagggagttgagagagctgcaactgtaaagggcaagaacaggcagaggtaaaaagatgatggaaggtgtggtgactaagggccacggttattgggtgaaatttgagattgtaggccaactgtattttcaagcttctgaacttaggcaaaatattcatcgcaaagtctctagcgtcatatttttctcacccaaattacgtttccacgagattatttatatatagttggtctatctctgcagtccttgaaggtgaagttgtgtgttactaggctgtgttttgggatgtcagcagtggcctgaagtgagttgtgcaataaatgttaagttgaaacctcctttctgttcttgcaatggtatgacgcacaaaagcaatcttaaggggaatgaaaactgtccaaaggttcagaaaagtagtgaaggggcctctggaacggccgggaccctcaacgtggttttccttaattccctgggcggtcctgaaggtggtgtggccagtcctccgcctcgctccgtcagtttccccctgctgaactattgggtgcggggcgggtggtggcgcagcctgcgcatgtgcataggggtcgactgccgctgcggtgcatgagggcgcatgcgcagcggggccgtgggtgtacgcggcgcagcgcggcagtcctgatggcccggcatgggttaccgctgctgcccctgctgtcgctcctggtcggcgcgtggctcaagctaggtcagtgaaccggccgtccatcctgggggcgctgggaaggggatggggcgctccgccctgacgggagagagccttaggcccttctg

SEQ ID NO: 38251 - DNA, 2300 bp, Homo sapien
catgcctggctaatttttgtattttttgcggagatggggtctcgccatgtagcccaggctggtctcgaactcctgacctcaagtgatctgcccacctcagcctcccaaagtgctgggatgacaggtgtgagccatcacgccacgcctaaatcctacatctgaagcaggagttgagttccctggtaggagcctccatgttcctgacacaaagcggggtagctcagcgcctctgtgtacaggcctgagtgtcctggctctgtactgcctctatcctgcagcaggacccctcagggctcactggccattgttaagtaggacatggggcattcttccagcaggaccctgagccaaaggggtacctgcccaacccttgactcacattcaaggtatagcccctgccggacacctgcactgggtatggggggcagagatggctaggacatcctagagatgataatctagtgggggaggtgacagcatacactgacaagtgacaccagaggcggaccaggatggacccacccagctctccatccctcagagcacccagcatggtggttggcaaagagtgggtgttcagtgtctgcagaatggagatgtaatgaatgagtgagtgagtgattatgaaagtcccagttatggatagaatacatgaggaagggccaggtgcagtggctcatgcctgtaatcccagcactttgggaggccaaggtgtgtggatcatttgcagtcaggagtttgagaccatcccggccaacatggtgaaactccatctctactaaaaatacaaaaattagccaggcatggtggtgcatgtctgtaatcccagctattctggaggctgaggcaggagaattgcttgaaccttggaggtggaggttgcagtgaaccaagaccacaccactgcacttcagcctgggtgacggactgagactccgtctccacaaaaaacaccaaaaacaaaaacaaacaaacaaaaaaacatgaggaaggagcagtgggatggagtgcaggaagcctgtcctagaagggggtgtgttttcagagaacacagtcacaacaaggggagataaggagaggctacaggagtggcctatttaaaaggaaattgtggccaggtccagtggtggttcatgcctataatcccatctctttgggaggctgaggcgggaagattgcttgaggccaggagtttgagactagcttgggcaacatagggagaccccgtctctacaaaaaacttaaatattagggcctggcatggtgtttcacgcctttaatcccagcactttgggagaccaaggtgggaggatcacctgaggtcaggagttcgagaccagcctggccaacatggcgaaaccctgtctctaataaaaatacaacaattagccaggcgtggtggtaggtgcttgtaattccagcttcttgggaggctgaggcaggagaatcgcttgaacctgggaggtggagggtgcagtgagctgagagccaagattgtgccactgcactccagcctgggggatactttagtcctagctactcaggaggctagggtgtgaggatcgcttgagcccaggtggttgagccggcagtgagctataatcgtaccactgcactctggtacagagatgggtaacagagcatgaccccatctctacaaagatttttttttttttgagccggagtctggctgtgtcgcccaggctggagggcagtgatgcgatctcggctcactgcaacctctgcctcctgggttcaagcgattctcctgcctcagcctcccaagtagctgagactacaagcgtgtgccaccacatccggctaatttttgtatagtagagatgaggtttcaccatgttggccaggctggtctcgaaatcctggcctcaagtgatctatctgcctcagcctcccaaagtctgggattataggtgtgagccaccacgaacggcctcaattcacaaacatttatttggaacattcactataggccagtgtagtgccaggagatgtaaggatgagtgagaaacagttccagaccccaaggagaacagcccctgggtcaggaaggctgacagcttctttcttttcccctctcagagccacccagagttccctcactgaagatctgagcatgacccgggacgaggcactgccggactctcattctgcacaggacttctatgagaattatgagcccaaagagatcctgggcaggtaaagcccaagctttccccacgaagtgctgtcctaggctccagcagaccctgtgggctacagccagctctgctccaccccga

SEQ ID NO: 38252 - DNA, 2300 bp, Homo sapien
aattagccaggtgtggtggcaagcatctgtaatcccaggtactcaggaggctgaggcaggagaatcgcttgaacctgggaggcggaggttgcagtgagccgagactgtgccattgcactccagcctgggcaacaagagtgagactccatcccccaaaaaaaagggccaggcacggtggctcacgcctgtaatcccagcactttgggaggtcgaggcaggcggatcacctgaggtcaggagttcgagaccagcctgaccaacatggagaaaccccgtctctactaaaaatacaaaattagccaggtgtggtggcacatgcctgtaatcccagctacttgggaggctgaggcaggggaattgcttgaacccgggaggcggatgttgcagtgagccaagatcacaccattgcactccagcctgggcaacaagagcaaaactctgtttcaaaaaaaaaaagaaagaaagaaatacaaaaaatagccgggcatggtggcttgcgcctataatcccagctactcgggaggctgaggcaggagaatcgcttgaaccccagagccagaggttgcagtgtgccaagatcacaccactgcactccagcctgggcaacagagcaagactccatctcaaaaaaataaaataggccgggtgtggtggctcacgcctgtagtctcagcaatttgggaggccaaggcgggcagatcacctgaggtcaggaattcgagaccagcctggccaacatggcgaacgaaaccccatctgtactaaaaatacaaaaattgctcggtgtggtggcgggcacctgtaatcccagctacttgggaggctgaggcaggagaaccgcttgaacatgggaggcagaggttgcagtgagccgagatcatgccactgccctccagcccaggcaacagagcaagactccgtctcaataaaataaaataaataaaacacataaataattttaaaaacccacacatctgatgtaagattaaaggaaggtttttttgttttgagacagggtctccctttgtcaccctggctggagtgcagtggcatgacttcggctcactgcaacttccgctttccaggtttaagtgattctcctgtctcagcctcctgagtagctgggattacaggtgtgcactaccacggctggctaatttttgtattcttggtagagatagggtttcatcatgttgtccaggctagtctcgaactcctgacttcaggtgatccacccgccttggcctcccaaagtgctgggattacaggcatgagccaccgtgcctggccttaaaggaaggctttttagatgaaattatggagggtagatcagaggtggattcctgcaggggaaggtcccttattgattgattgattgattcagactgagtctctgttgctcaggctggagtgcagtggcatgatcatagctcactgaagccttgacctcccaggctcaagtgatcctccccactaagcctcttgagtagctgggaccacaggtgtgtgccactacacctggctaattttttaatttttttgtagagccagggtctcactttgttgcccaggctgctgtcaaactcttggacttaaacaatcctcccgcctcggtctcccaaagcgctgggtgtgagccactgcacccggcctccctaacctgtacaggtctgcattatgtagggtgatcatgcacactgtccctgcgacagcccgggcagtcagctgctgcagtcatgcattgagaaagtctccagggcagtgctctcagcatacgtggaaatcaaaattgctcccagagaagcaagtgccctccgcacaaggctggatttacgttctctgggcctggaggccaagggagctccagaggggagactgatcactcttacatcctgtctggcctggtctcaggccacacaagcttccctcaccctccaccagaggtcccccaccttccgcccggagactgggctccatgccctgtccctgcggagccttggcctgcctcccgggtttgcagttgtgatttatttttggcacgttagcctccggtcatcaaatagcaaaacccaaaacaacagcagatgatatcttccaagtgtctgctcgggacacggcttcagccctctgtggtcccctctccccggggggctttgggattcttgtcaagctccttcaagagcctgcaagcacttaaccgtgagtagctagcccagtgatggacaaaagccaggtgataggcagggagcggggaggactgggggtggagaagatagaaacccccacatccattccatcca

SEQ ID NO: 38253 - DNA, 2300 bp, Homo sapien
tttttaaccaatattctattggcaggaatttaggttttctccaatcccttaccaacacaaaataactttgtgtgaacatctaatagtctttcaatttaggaatgaatgacttagccacgtttgagtaaaatggtgcctgttctggtctggattcctttctgtcttgaactgtccaaagttctcctcgctctaaacccttcttgtgccagaatgtatcctttataagactgcttttcttcatctctgcttttgaattatctaaaagcaagtaaaaagtcttattatttgtaaagcattcattcttttaagaagttatgtaaaaataaagctttgttttttacaaaagatttttatataattcaccctttttattgtttgaaatctttttatttcaatacttttgggggaacaggtggtgtttggttacatggaaaagttctttagtggtgatttctgaggttttgatgcacccatcacctgagcaatgtacaccgtactcaacagtgtagtcttttatcccttacccacctagcacatccctccaaatccccagagcccattatatcattcttttgcctttgcatcctcatagcttagctgccacattattcaccctttagttccaagtacattctgctgttgctgggacacaggaaggctgttttaaactctacttcctctgatggaagggagaaatttctgattgacatcaagcagaaatggttccatgtgtgcttcctctcctcaataaacctcactccaaccgcaagggactttcccatgagccccttatgaaatgccactagccaaatttccccttattttagcgatgtttaatgtaactgttgaaagcatttcaggctgggcctggtggcttatgcctgtaatcccagcccttgcaggccgaggtagatggatcacctgaggtcaagagctcaagaccagcctgaccaacatggcgaaaccctgtttctactaaaataaaaaattagccaggcgggttgacgtgcgcctgtaatcccaactactcggaaggctgaggcaggagaatcgcttgaatccgggaggcggaggctgcagtgagctgagaacgcgccactgcactccagcctgggcgacagagccagactccgtctcaaaaaaaaaaaaaaagcatttcacaccaagtatcactaaagcacagatccttggggcctttgcaattgctgttctctcttcctgtagtgttcttatcttcataaacacatggcttgcttccccacctcttcaagggctccgttcaaatgactcccccccgccccgcctaacctctaatttccagtctccttcctctcttttcatgtcaccaccacctgatttacgtaggcgtttgtgtctcccctccttgaaacttaacttcgtgaaggtagaatcttatctgatttggtgcagtatctccataacccagttagacagtaaatttttgttgaatttaccagtgtatggttactgtcccaattctggacacaaattctataatacatatgaaaaggagctgaaaatatatagtaatacataaatgtaaaacattattgctgcctgaatttaacttttgctgactggatccacagacaagaaagagaaataccaaatacaactaattcaactctgtttatttttgacgaaaccgatttctttcattcagttcatactacgcgtccacactgtgcctccaaaaatatttgcccttataactgaatgctcagaaaggctaagaaatctgcccaaggtcccctggcaatccagccagagatgtgagtcactcttaaggttggatttaatacaaatgtttgaaggacggagcgacaggccagctgccctagggaagcaaaatgctaagtgctctgatgcgaggaccggaggacaaggttcgcggatgaaccacaggaacttccgggttttaaagatcctggcgccaagttcagggcgttgaccgcgaaggacgaggcgtccccgtgacgtcctgctcttccaatgaacttcaggcctgcggagacgacggagaacggaagttctctgcctgtgtgctggttggttgcgcgttgaggccagccccgcctcccatcttccggtctcctcagaagtcgcttagctcttcggtggttgtcccacgtccggaggcctagccgtcgcttacctaggatgccgcgtggaagccgaagccgcacctcccgcatggcccctccggccaggtgagaccatcgcagggtttgagaccaaagcgcggccgtccggactctactggggcaatgacgcagagg

SEQ ID NO: 38254 - DNA, 2300 bp, Homo sapien
ggaggttgcagtgagccgagatcatgccactgcactccagcctgggcaacaacagcaagactccatctcaaaaaaaaaaaaaaaaaaaaaaaaaaaaaaaaaacagactccatctcaaacaaaaacaaaacacaaatgtggtatggcaatgaaaataattgctgtgttaaagacagtttcatagaaaataaaagaccactcaaatacaataagctgtctttttagatgggtataattattatccttatttaacaactaaagaaacaggctcagaggatgttatttgattggactgtgttgcatctctggacagtgcagctgagatcagacttcatgtgtaactccactagcctaccagggtgcctctcataaaggtaaaaaatgtaaatctggcctaatctacaaagttgccagggcagcactgggtcaattctacatacagtacttctatattcataaagagaaacattaagggaaggtgaaaatgcttctagaaggcgactgaacaccagcacccttgcttactacctttgggctcttctttaaggccaacagtgacctgaaattattgactgacttttccaatcaactggagaaaatggtaccaaggtcaccaacatcagacaaattcacttgaggacctatctatgtgctttgaaagacaaaactgcttttgtaaaggatacagtatttcagaaaaacaatcatattaacaactaataatactgtaaaatgctgatgtgttgaatgctactttagaaaaacaggttcaaatctaggaaaaaaatttccgacagaaagctatgtatcaattatctagctagctatctagagacatggtctcattctattgctcaggatggagagcagtgggatgatcatagctcactgcagacttgagttgctggccccaagtgatctccctgcctcagcctcctaagtagctggggccacaggtggacacaggtacacctggctttttttgtgtgttttgtagaaacaaggtttcactacattgcccaggctggtctcaaactctggagtctcgatctgtcgcccaggctggtctcaaactctggagtctcgatctgtcgcccaggctgggatgcagtggtgcgacctcggctcactgcaacctccacctcccaggttcaagcaattctcccatctcagctttctgagtagctgggattacaggcatgtgccaccacacacagctaatttttgcgttttttgtagagaccaggtttcaccacatgggccaggatggtctcaaactcctgacctcagatgatccacccgccttggcctcccaaggtgaggcggagtcaccacactttcttatgttattaaatagcctaacccaggaagggttacagctgtaatcccaacaactctaaaggccaaggtgagaagatcacttgaacccaggacgaaactggcctgggcaacatagcgagacccccatctctacaaaaaatacaaaaattaggccaggggtgcaccgcgcccggctaatttttgtatcttttgtagggacggggtttcgtcatgttgcccaagccatccatcctcacgcctcggcctcccaaaatgctgggattacagggcccagtcagcctcatgttttctttaagcagtccctccctattgcacacttggatagttttcttttttatttttttagacagagtttacctcagtctcgcaggctggggtgatgtagtgggaacatagctcattggagccatgaaccttggagttcaagtagctgggaagctgaggtgggacttcagagatggggtcgcgccatgttgcccaggctgctcttgactgcctggcctgaagggatcctcccacctccgccgcgcctgaacatagtttcctatttttgaccaacataaacactgtgctgagttggagtttgtcagctacccttctccagcaacaacaggacctggcggggaggtcccggttaccaggctgcactccaaggagaagacagccctgctccaggcactgtaccgccactgtgacgtcgtcgaaggtccgcctctgtggcgtcgccgaaggcacccccaccttcacgcggagcccatcggaactcgaggcggggctgctgggtcttccaggagcgcccagacgcgggcaggtggccgccggtggccacaggcctgggcaggatggaagcgcccgcagagcgggcgcttccacgtctgcaggctctggctcggccgccgccacccataagctacgaggaggagctttacgactgcctggactactactacctgcgcgac

SEQ ID NO: 38255 - DNA, 2300 bp, Homo sapien
catcttgccacgtccatagatgccgcaaggttcttgttcctttatttacaaaggtgctgatgagcccatgtgtaattgatcctgaaggagtaaattattcacaaagtacaataacagtgtcaatatccatgcccagggtttttaggggtttttatttatagtaaccctcactcaggaatcacaaatgaagcctgttggaatgtgctatatgaacaaggtcttattttcatgtagattaacaccttggtttttacggattagacataaaagcataaaagctggcgccattccagaatcaaagcaactgtccctgaggacatatggaatttagggacatcaattattaggaaggtacacgaaactagaagtgcttccggaagtttccattgtctagacagaaaaattcaacagatcagcccgagagagtaaaggtactgccgtgagtgccgggggtgatcagctttctattcacagcaaagatgttgaagcctaaggaatttcaaagactccccaagtggtccacaccttgaaagtcgctcccacaaagctggagcactatctgttcttgaatatcaggttgccatctgtgtctttgagacactgcccagtcaggcctcagttgagatgaggccaatgacgtgccaatgaaaatgcctaaaccgtctttatctttaggtagccatttggtggactttccaccaaatgggttggtgaaaaatggcgcaccagagacacacgcctgggaagtgaaattttctcctcggattttagcatctcctgcgtaaaccaataatgaccttctctgccgcctcaacatccgtgaaaaaggtgctggtgagggtgacattttcacgaagccacaggccatgtcaccccctgcgaagctttgaacttgtgcactggcgggccaggcggcggatttctccccatagtggctgcactgcgctctcgctggagagaaaagagggcagcggcacaatggacagcgcctggacctcaggccagttcccatagcagcttcccaaagcaggcggctccctgggctggaggaggcgcgatgcccagaaagaacccaggtgcaggtgggagagggaacccagcctagcagcgggaagtggggtgaggaccacactcgtccgagttggacaagggcgaggtgcacttcgcggcgtcatgccctcctcactgcccagcctggacctgcccctcctgtccccctcccgactcacttcccatggcaaggaggtgcctgcgatcagtagccagcatcgctgtggaagcggcgaggtccacactgccctgcccaaccctcctgggctgccctcctcctcgcatgtcgcctgctgggattccagtccagctgccttgccaccaacgggctgagaaccgttaagagctaccgtttccagcgtgcctggccaggcgcgcgccgcttcgctcctccccccgagaacttcaccaggctcccgagcctggggcatgctaggattgtagtcccgaagctcttgaaagggcgggagcggtgaagagactacatacagctcccagcatgcacagcaaggccggcacaaccggacttcgccttcaggactgcgcgccgcctcctgttcatgctggctgggattgtaatccattcgcccagtgatgaaaaaactggaagctaatcaaagacgacaactcccagtatgccaggcttagctcccgcccaccaatccacacctccctgtgtccagagcagttctgccatgccaaggagagcctggttgttcccaaacctctcctgcctgccaggcgacagcgggaccagggtggctgatcgtatcttgtaattatgtcactacctccccctaagatgctggcttcatgcttcgtcagtgccagaagtttgattcctcacggagcagcaggagacagggagctgctcacaaacctgtcaaggttcccatagtaacgctcctcctcctggagctggactcgccccgcctcttccctcggctctgccccttctcctcgccccgccccttccctcggcaccgtctctgcatcggaacggtacctcctcctcgccccacccctgacacgccccttcggacatgcgcagtgtagcccctgcgtaggaatgtggttaacggccagatgtctgacagttctccgacttctgggcattccacgtaggacgctttctcatgagtgtctgaaaccgtcagttcactgccagaaatggagatacatgtttcctgataaactggcacttgccttttcaaagccaccatttcctctatcctctgggctgtcacaaa

SEQ ID NO: 38256 - DNA, 2300 bp, Homo sapien
cttccctggcccaaggttctggctcccacagaaaaactcagctccttccagcaggaggcacaggcaggtccctgcagaacacaccaaccatgccctgcctgagaggtggtgtcccatggcagaggctgaggctcagggccaggattgtgggcagactgggccaagacttatcttgcaagagcccaggaaagccccaaattcttaggggaccccttcttccagaggccatattctgctgagatgagtccaaccctatgaggagctgaaggatcttgtctaatccagcctcatgtgtgtggggggagtctcactctatgcagaggggtccctggcactacagactgagctcccagtaggacactggcttccagccttgaagggccaggtcctttcgtgtctgctgtccccacagacccccttcgggcttatcctgaggctctgggacatctgtcttctggaggatgagcatatactcacagccaggacatacatggtattcaaggtgcacagaatcttgccccgtgtgcctgagggagctgtggggaacatgcgggacagatcccgactgtcctgagggtagcgctcacactggggttcagccttgcaagaaccagatgggctgggtggaaaagctgaccaagtctgcttgcctttcagccaaatctgtggcgttccccaggaaggccccttgcctggagcaagtgtccctggtgcccaggactctgcgggcatccatcagcacaaagaccctctccaagggggatgggctggccctctcaggaccaccagccggtgggtcatccccccctcacccagaacccagggcagaacctaggcacagaacccaggggagtaggctgctctctggtggccccagggtctcagggtctggccagtctgtccctggctcaggacacatgcctgggaatcagggttactcctctgctcttgcatctcctgggtaaaccaataatggcccccggcccacccccgccaccccgctcatgcctcaactttcacatccacggaaaaggtgctggtgagggtgacctttccaggaagccacagcccatgcccacccctgcaaagctccgaagtcgtgcgccggcgggccaggcagcagatactcccaagagcggctgaactgcgctccggttggagagggcagagggcagcagcacaatggacagcgtctggacctcaggccagttcccacagcagcttaagaaagcaggcggctccctgggctgaaggaggcgcgatgctctggaaagaccccgggtgcaggtgggagaggaaaccgagctgaggagcaggaggtggggtgaggatgagacctgcccgatttgggcaaaggcgaggtgcacttcgcagccacccttctcactgcccagcccagacctgcccctcaagtccctctgcggactcgctcccctcagccagggttggcgcagaatcagtgtccagcatggctttggaagcggagcggtgcacacggccctgcccctccctccggggctgcgcaccaccaggcacatgctaggattctagtccggtagccccgagaccaacagccagaagtggttaagaaactattacaccccgccgagcgcggtggctcacgcctgtaatcctaccactttgagaggtccttaggtcaagagttcgagactagcctggccaacatggtgaaaccccgtctgtactaaaaataaaaaacttagccgggcgtggtggcgggcagttgtaatcccagctactcaggaggctgaggtgagagaatcgcttgaagccggtaggcagaggttgcagtgagccgagatcgcgccattacactacagcctgggcgacaagagcaaaactccatctcaaaaaaaaagaaaaaaagaaaagaaaaaaaaaaaacaaaaagcaaaaacactgctactcccagtatgcctggtgaggagcgcaccgcactgcccctccctgaaggtaccaactccatccgcaatccccaatcccaatgcatgcttgggattgtagtccggcaacctgtgaccaacggccggaagtggctaggagactactcctcccagcatgcctggcgaggcgcgcaccgcgctggccctctctcctgggacacgcaccgcctccaatcctggtttatgctgggattgtagtcaggcagccctgtgagcaagtaagagactacagctgcgagcgaataagagactacagctctcagatacagatacatcgagcagaggtccctcctcctccgcgtccctccaggcgtcccgtgtcgtttggcggtgggt

SEQ ID NO: 38257 - DNA, 2300 bp, Homo sapien
cgagtccgtctctccaggtccagctcctcctgtctcccagtggcctctttcagcccagcccagctcatgcctcccagcggccttcccaggccccgcttttgactttccgcggcctctgcaggccccgaacttgacctccagtcggcctctgcaggcctggcctcctgcctcccgaaagcttgcacaggcccagcctctgcctcacagcggtctctccacgcccagctcgctctcgcctgcggcctccctagtccaaagctccggcctctccgccgcttcggcaggcccagctcccacctgccagtggcctcttcaggcccatggggctcattcctcacaacggcctttccaggcccagtttttcccttccggcggcctctccgggcccagaagctcctcaagtcggcctctccagaaccacttgcagcctcccggcgtcctctccgggcccagctcttcctcccggctgcgtctacaggcccgactcctgcctcccaacaacctctttggactcagtgcctgcccagctcctggtggccttggtcggcccacagcttcctgaagccaagctcaccgggcccacctcaggcctctcggcggcctctccaggctcagctcctgccctccgacggcgtctccaggtcccaaatggcctcgggtcggtgggcttctccaggcccagcttgggcctcccggcggcctctgcaggcccaagtggtcctgaagtcagcctctccaggcccagttccggcctcccagcaagcaagctcttttggctcagctcctgcccagctcccgccggcttttgtagaccctgaactttctccagcgaagctcctcagtcccacctcctgcctcccggtggcctgtacaggcccaggtctggctggagaacagcctctgcaggccccgctcttgcctcccaggggcgtctccaggcccagctctggcctcacggcggcctcccgggaccaagtccctgcctgcctcccagcagcctgtgtgcggcccagctcctccgtcacggtggcctgttgaggcccaactcatgcctctggcaccctttcgagaggcgtgagcccctgccttacattggcctctctcacgctgagggaggtcagcgtgagcccctgcctcacactggcctctctcacgctgagggaggtcagcgtgagcccctgcctcacactggcctctctaacgctgagggaggtcagcgtgaggccctgcctcactctggcctctctcacgctgagagaagtcctccctcacgctggcctgttgaggcccagttcatgcctctgttggcttctccaggcccagcccctgcctgttggcggcctctagaggcccagcctctacctcaacagtgggccctccacgcccacctcttgcctcgccgtggcctcctcggaccaggctcccaccttggggcggcccccgcaggcccagctcctgcctcacggccctccggaggccaagctcatgtgtcagggcggcctctcccggcctggcgtttgctcctttccatgggctccaggtcctgcacttcctgcagtcggcctctccaggcccagctcttcctcccggcagcctctgcgggaccagactgtcgtcaagtaggcctgtccagggacagctcctgcctcccggcagactctgcaggcccaagtcgtcctcaagtcagcctccccaggcccagctccggcctctcggcggcctctccaggtgcaaatgttcctcgagtccgtctctccaggtccagctcctcctgtctcccagtggcctctttcagcccagcccagctcatgcctcccggcggccttcccaggccccgcttttgactttccgcggcctctgcaggccccgaacttgacctccagtcggcctctgcaggcctggcctcctgcctcccgacagcttgcacaggcccagcctctgcctcacagcggactctccacgcccagctcgctctcgcctgcggcctcccgagtccaaagctccggcctctccgccgcttcggcaggcccagctcccgcctgccagtggccttttcaggcccatggggctcattcctcacaacggcctttccaggcccagtttttcccttccggcggcctctccgggcccagaagctcctcaagtcggcctctccagacccacttgcagcctcccggtatcctctccgggcccagctcttcctcccggctgcgtctgcaggcccgactcctgcctcccaacaacctctttggactcagtgcctgcccagctcctggtggccttggtcggcccacagcttc

SEQ ID NO: 38258 - DNA, 2300 bp, Homo sapien
tacctagaaccttagtaatttgatagtccttctgggctcaacacacagatatcttatgagttatacctgggccaagtaccaaggtactgtgactatattgcctggctacttccctgaaaggtattgtaatgtatctctttactgagcacctaggtgaagtaaatcttctcctgcctggaccctgcccacaggtgaagttacgacatatcactaagcctagtacttaatgatgtgactgtcctgtcttgtttgtgccctgccctgaagaagcactgtgacattactggtctaagtaaaaaggtaattcaagtcttctgcctgggacatgtgcacaggggggattgtaaatatctcttggcttatcaacatgatgatgtgattctcctctcttgtctggaacctttttctagttgggatcacaacatattgctgggcccagcactgggtgatgttattcttctcccagggcccagcccacaaatggcattgtggcgtctctctgggcctaggtgatgtgactctgcttttctgcctggacactttccacaaaaggaattgtgacacgtagctggacccagctccctggtgatgtaactgtcctgtcttggccctgtgcaaagggggcattgtgatatattgcttggccaagcagctaggtgatatgactctcctgaataggccctgcactgaaagaggattttcactcattgctgggccagtcatataggtgatgtgtctctcctctgttgcctggaccctgcccaagtaagaattgtggcatatcacttacccagcacccaggtgataggactctcatgtctgcttcctgatgacaggtgaaattgcgacatatacatggtcacagctcacaggtgagatgatgactctcatacctggatccagctaagagaacagattttgactctgatatctaggcttagggcaacagataaggtcctgggtctcctacttaaataaaggtcatagtgtattatgatatcaaggcatattgtataaagccctcaaatgatacagtgtcataacaggacccagaacgaaggtgagattgtgactctcatatgcacatccatctgatagaattgtcaccctcacacatagacagttctcactggtgaggtcctaaatctcacactcaaatgcaatccagacttggaattgtgactgtcatatatagatgcagctacaggtgagatagtgactcattttttaacccagctcacagaaacagcaatgaaactcatacctggacccggtcaatagcagaaattcacaatccgggacattttcctgctaaaggtataagagtcaacacctcttgtgggtttgagttcaactatgcaagtcagtcacaacagtggactaaatcaatgcacgagagcccaaatctcaccaacagactgtgttttgataggggaagcacagcccccaggtgttctaaatcctggacttggtgttatcatctcatctgtcgattggattgatgcatgagagtcacaattccaacttgattgcctcttggtgagcgattcagaacctcaacagtgggttctgttaatgtggaaggctgataatccttacttttatttgagtttgcatacaacagccacagttttaccacagttttagctgggctctattttggcactctttgtagcatttgagggcttcattcaacgtgcatgcaagttgtaatattccgtgaccatcctacaagttgaagacacaggaccttagtttttgccctaagactacaaaggtcaaaatatcttcaggtgtgagtcatcattccacctgtaagctgtgcccatgtgtagttcccaattccaactgtggagagagaccaggaacaaagtttggatctcctgggtgctggccaaagatatgtcacaattgccactttgggcagggtcaaaagtctcccctgagtgcaggggcaattcaggagagtcatatcacctaggtactgggctcagcaatatgtcacaatgccccttgtgggcagggccaaggcaggactgttacattacctggaagctggacccagtgatatgtcacaatgtctcttgggggcagggttcaggcaggaaagaagagtcacatcacgtaggtgatgggcctagagatatttcacaatgccttctgtaattagaacccagaaaaaagagttatatcatttgggttaaaggtcttgtgatatgtcacaatcccaactaagggcaggacccaggcagaaaaggagagtcacttcctttgatgattggtccagagatacattacaa

SEQ ID NO: 38259 - DNA, 2300 bp, Homo sapien
aaaatttgtcaaaaccccccaatttttatacccaacatgtcaacacacccctccaaaaaatacaaataaatccataccaaggccatattgtgatttagaagactagcagggcagagctttctattgacttgctgtgatttctaattttaactacttagaagaatgaaaaataggttctccttagagttttttttttttttttcttggagaaagtctgacttaggcacagatgactgacagttattaaaggccaatgactttccagccttctcttaaatttccagtgtcttacgttggaaattatttaaattcgtttcttccaaatcctgcagtaatactgatgctccagaaagatgtcccacggagattctgctcttgtgcgtccctcctgcacggagctgaggctgtgcctcctctagtttcattagcgtgtagtcgtggggtacttcgagttaatctggaaaactaaatgttaaaatggattcaggccgggcacagtggctcacgcctgcaatcccagcactttgagaggctgagacgggcggatcacttgagatcaggagttcgagaccagactggccaacatggcgaaaccccatctgtactaaaaatacaaaaattagcccggcaaggtggcgggtgtctgtaatttcaactactggggaggctggggcagaacaattgcttgaacccaggaggcggaggtttcagtgagcccagatcgagtcagtcactgcactccagcctgggctacagagtgagactccgtgtcaaaaaaagaaaaaagaaaaatggattcaaagaattatcactgttaagttccaccagcaaattattaaacgtggttccaaagggatatttaaaaagggaaattaagtgtttccatgaaggtcctattcacagcagaaacgcagacactgttcatgacctcaccacacaaacttcccttatgtgttgggagggaccaaggggctctctggccctgcacctgcgttaattacggccgggaggtccacactaggaccccaaggtctgggaaccagcctggatcgggggcagagaagcggtggatgtggctcccaaagtgtcttaggggctcccttccctgtggctgtttcctgactggatgcagcagggtcaggcctttcgctgtgacgttttcaactctttgtcagagtggcaggagcgtccctgtgagaggcctgacccaggtgtgggtcatgcagccagcccggggtccaaggggcactcctgggatgaacaggaggatttgcgacagcctagaggatagaggaaatggtggctttgaaaaggcaagtgctaggttatcagggaacgcatatatccatttctggcagcgaacggacggtttcagacactcacgagggagcttcccgcgtaggatgccaagaagtcggagaacagtcagacacctggcgattagccccagtcctacgcagggactacactgcgcatgttcaaagggggcgtgtcaggggtggggcgagacggaggggcggtgccgaggggagaggcagcgcagagggaaggagcggggcgaggagaaggggcggggcgagtactgctccaagatatggcaaccgtgacagctttgcgagtagctccaggtcccctgctgctccgtgagaaatcaaacttctggcaatgacgaagcatgaagccagcatctcagggagaggtagtgacataattacacgataagacaagccgcctggtctcgctgtcacttggcaggcaagagaggttcgggaacaaccaggctcccctttggcatggcagaactgctctggactcgggaaggtgtggattggagggcgggagctacgcctggcatactgggacttgtcatctttgattagcttccagttttttaattgcagggcgaccggattacaatcccagccagcatgaacatggggcggcgcgcagtcctgaagggggaagccgggctgtgccggcctggctctgccggcctggctctgcatgctgggagctgtagtctcttcaccgctcccgcccgttgtttcaagcgcttcgggactgcaatcccagcatgccccggtctcaggggcggggcgcagttcttgcgggaggagcggggcggtgcgctcctggccacgcaggctggaaactgtagctctcaacggttccccgcccgttggtggcaaggcggctggactagaatcctagcaggcgatatgcgagaaggcgggcagcccaagagggttgggcagggcagtgtggatctcgccgcttccacagcgatgctggctactgat

SEQ ID NO: 38260 - DNA, 2300 bp, Homo sapien
cactggaagaggacacacacagggccccaagaagctaagtgcatggccagtgtagagtgactggtgtagtgagggtggaatccccaaagaccctctgaaatgcagttacacaacaggctcccaggaaacactggaccaaaccaggcagctgagcagatactaccaggaatggggtgagcagaggagggtcagagccacaaatctcagcagaatacaccaaactgcaaggagctcctggctctgtgaacagcagctgtggctgcatcaggaccaatcttgtgaggcagctgctggggacagctgagatcacgtgtttttgcagccacccacccaacagcagtgcctcttgaacacagatcacaaaatcctctccattcatctttaaggtgacggatgatggatgaactcacattacaacatccccaccaacacttgcggacgagtgtatttagaaactcccacctaaagagggaacagtcaagagtagaatgagaatattgagggatgggggaagaatgcaggtacttgaccccacaaactctactgaaaacaagggaagagctgttatgctgtggtctccctatacttcacctcaccacatccatagatgccacatggttcttgttcctttattgacaaaggtgctgatgagcccgtgtgtaattgatcttgaaggagtaaattcttcacaaagtacaataacagtgtctaatatccatgaccagagtttttaggcttttttaaaatagtaatccgcattcaggaatcagaaatgaagcctgttggaatgtgtgatatgaacaaggtcttatttttatgtagattaacaccttggtttttacggattaaacacaaaagcataaaagctggagccattccagaatcaaaggaactttccctgaggacacctggaattaagggacatcaattattaggaagctacacgaaaccagaagtgctcccagaagtttccattgtctggacagaaaaattaaacagatcagcccgagagagtaaaggtacctccgtgagtgccgggggtgatgaacattccattcaaagcaaagttgtgaagcctgaggagtttcaaagactccccaagtgctctataccttgaaagtcgctcacacaaagctggagcaccacctgttcctgagaatcaggttgccattgtgtctttgagacactgcccagtcaggcctcggttgagatgaggccaatgatgtcacgtgtaaaatccctaaactatcttcatctttaggtagctatttggggaactttccaccaaatgggttggggaaaaatggcgcaccagagacacacgcctgggatgtgagattttctcttctgctgttagcatctcctgggtaaaccaataatgaccctctctgccacctcaacatccacatccgcgaaaaaggcgctggtgagggtgacattttcacgaagccacagagcatgttgccccacgcaaagctctgaacttgtgcactggcgggccgggcggcggatttctccccatagcggctgcactgcgctctggctggagagaaaagagggcagcggcacagtggacagtgcctggaccgcaggccagttcccacagcagcttaggaaagcaggtggctccctgggctggaggaggcgtgatgtccaggaaagaccccgggtgcaggtgggagagggaacccagcctagcagcgggaagtgaggtgaggaccacacccgtccgagttggacaagggcgaggtgcacttcgcggcgtcacaccctcctcactgcccaacccggacctgcccctcctgtccctctccggactcacatcccatggcaaggaggtgtccgaaatcagtagccagcatcgctgtggaagcggcgagatccacactgccctgcccaaccctcttgggctgcccgccttctcgcatatcgcctgctaggattctagtccagccgccttgccaccaacgggcggggaaccgttgagagctacagtttccagcctgcgtggccaggagcgcaccgccccgctcctcccgcaagaactgcgccccgcccctgagaccggggcatgctgggattgcagtcccgaagcgcttgaaacaacgggcgggagcggtgaagagactacagctcccagcatgcagagccaggccggcagagccaggccggcacagcccggcttcccccttcaggactgcgcgccgccccatgttcatgctggctgggattgtaatccggtcgccctgcaattaaaaaactggaagctaatcaaagatgacaagtcccagtatgccagg

SEQ ID NO: 38261 - DNA, 2300 bp, Homo sapien
gggcaattcccagaactgtgtttatcttctttttagaccgtgtaaggtaactctctgatgtgccatggcattcgttaactgtcatggcgctggtgggaacgtctttagtgtgctaatgcattgtaattagcatgtaatgatttgtgaggacaatcagaggtcacttttattcacatcttggttttggtggatttctgtggcttctttactgcaaactgttttatcagcaaggtctttgtgaactgtatgttgcaccaatctcctatttatcctgtgacttagaatgcctgacttcatggaaaagcagtcctgtaggtctcagccccattttacctaacacctattccagatgcatttgctctggttcaaacacctctgacatggccacagggtgctggaatgtggttggtctgaactgcaatgtgctggaaaggtaaaatacaaggttacattgaaagatttagcttcaaaaatgtatacgctttattaaccattacatactaatcacatattaaaatagtaatatttttgatatattgggctgattaaattgttacaatcaattctaccattattccatctgtttctttcttttttatttggagacagagtcactctgtcaccaggctggagtgcagtggtgcaatcttggcccactgcaacctctgcctcccaggttcaagcgattctcctgcatcagcctccagagtagctgagattacaagtgcctgtcaccatgcctggctaatttttgtacttttagtagagacaggatttcgccatgttagacaggctggtctcgaactcctgacctcaggttttctgctgcctcagcctctcaaaatgctggaattacatgtgtgagccactgtgcccggccccacctttttctttttactttttaatatttgcctaatagaaaattcaaaatttacttgtggttcacattttactgcagaggactgcctccttcgtgaaatctcaggctgccttcatggattaggtcattttcacactgctataaacaaatacctcagaccacgtaatgtttttaaaaagtggtttaattaagtcatagttctacatggctgaggaatcctcaggaaaattacaatcatgaccatgacggaaggtgaagggaaagcaaggcacatcttactgggtagaaaaagagagagaactggggatggggagggtagggggatgtgccacagttttaatccatcggatatcttgagagctcccttactatcacaagaatagcatgaggataatccctctctaagatccagtcacctcccacccggtgcctgccctgacatgtgggaattacaatttttttttttttttttttttgagacagaatctccctgctgtcgcccaggctggagtgcaatggcgcgatctcggctcactgcaacctccgcctcctgggttcaagtgatttttctgccttagcttcccgagtagctgaccctataggcgcccgccaccaccctggctaatttttgtatttttagtagagacggggtttcaccatgttggccaggctggtctcgaactcctgacttcaagtgatccctccccgccccccgccctcccctctcccgccttcgccttccccgctcggcctccctaagtgctgggattacagtcgtgagccaccgcgcccggccaggaattaaaatttgagatgagatttgggtggagctacagagccaaaccatatcactgcaaaggatccgcagcaaggaaggtcataaaatctgaaattgtaaaataattctttatattttttcaatttatgaataactatattatatatcatttataaatgcatatgacattatacacaaggttaaatgcaagtatcctctggggttggcctggctcagatcagggaagaagccttggctgtaaaggctgcagcctaacctgttacttttgctttattcagcccagtgtctgatcaaattttccgtcactcagggcatgaagggtggggcctcaaaccttatccaatcaggggccgtgaaatagaaactgtccaatcaggaatgcagcgggagagaacaggacgcttccgtaaggttacgggttctttttgcttctctgcgcccagagctccagtccttctcttcactgctctgcgtcctctgctcctggaggccaagcctctgtggccttgtgtcctgcaagtattcgcagatttatggctaaaagaccgggaccccctggaagccgagaaatggtgagtgctgggtctgtcaccgtgagagaggggtgggggctggttggaa

SEQ ID NO: 38262 - DNA, 2300 bp, Homo sapien
tgctggtgtcgatgatggtgagaatggcgggggtgagaatggcggaggtaagaatggtgatggcgatgatgatagtgttggtgattgtaaggatggtgatggcgatcatggtgatgatgatgatggtgctgactgggctatgaggtaatggaggcagaaaagtggaagtttctaggaagtatagagccagctgggaactgcaaggcaaccttagtgggggtggaagatgtcgggcccctgcctcatttctagacatctggggaaagctcacccctcacagtagttccaggaacccctccatccagcatttccttctcgcaatcagcatggagcttttggggtgcagagaagtgtcttctattcactgcactctgtgggaagggaaaatggggagtgctatttatgaacccagtataatacagtagggtcttatctaatatattctgggagaattttcagctgaagagagcaagcctcagagaagtcagataactttatcttcaatagcatccagttgtgatttattgagcagttactatgtgccaggcaacatgctgggtggttccttatatgttatctcatgaaatcctacagcaacacaaggagacaggcataactaccccattttaaaaattgtggtaaaattaactaaaatttactgtctaactatgtttaagtttacatttcggtggcattaaatacattcacaatgttgtgcaaccaatttccagaatgcttttcatcttgtaacactaccattctgtaactcatttaaaaacaactccccaatccccaccctccccaggacctggtagccaccattctcctgtctgtctctatggatttgactactctaggtgccttggaaaagtggaataatacagcatttgtctttttggtctggcttattttgctcagcctaatgtcctcaaggttcattcttgatgcagcaggtgtcagaatctccttccttttcaaggctgaacactattccactgtatgcagagacagcattttgttgatccgtccgtccatccatggacacttgggttgtttccaccttttggttattgtggatgatgctgctctgaacatggttgtgcaagtgtctcttccaggctagccccattatacagaagagcatagagagattctgggaaggggcatgacctgcctggggcctttggtgaggtcctggtggaggatctcccagacctcaaaggcagagctcctctcctcaccccactgcctttcttaggacctgcctcctgctccaccacacagtgcccactccctggtactagacttgctaaggtctcttgatccttgaaagttcagggacaggaactggtgggcacaactacagtcaatcactgctctgtcacctactgcagactctgtgccaaacaatacatgacaatgacctgctttccactgtttcaccagatgtggatgaggcatctgctgcatgccaggcatgtgtgggcactggatggagacccctgggaaatgagaagatgtgagctcctcaagaccaggggcatccctttcccttgctgctaccctgtgagggatggaggggaaccctgaagcattggagaagtgcatgagtgacctagctcagatgatgatatcatagtaaccctatttattatcacctaccatgtgccaggcattgtgcaaagtactttgcacacattacctgctgtaaagctcagagacaactgtaggagtgaatctgttatacctcccactttacaggggaggaaactgatgcccagagaggtgaatcagtcttccccaggccttgcagctagtctctgggatgtggatccaggcagtctgacttagagatcccctcatcctcgtggtttttgcccctgcagccctctgacctgtccccagggccctgtacccttggccacctccaagatgacctggacatgggcttcagcaaaggtagcaaccccaaaacacctccatttgatagggaggaagctcaggcccaccacaggagacctgggctgcaggtggtgtaggtgctggctgaaccaaaatgcacccatgttggaggatgcaccctaggatgggcagcagcgggaggtctccctgcccaacaactggtagtggtacctgagaacaaaggaggagaaggaggctttggacacaggtgtggagaagcccaaggaggaagaagaagactcagactatgggctgctggatggcctcaaggatcccctcccagaaaaggaactttgagacttatacccagggctgagatgaaagtgctccctattttc

SEQ ID NO: 38263 - DNA, 2300 bp, Homo sapien
tgagttttacaagaaagacgtgggcaattcccagaactgagtgtttctcttctttttagaccatgtaaggtaactttctgatgttgccatggcattcgttaactgtcacggcgctggtgggaatgtctttcacatgctaatgcattataattagcgtgtagtgattcctgaggacaaccagaggtccctttcattcccaccttggtttcggtggatttttgtggcttctttactgcaaactgttttatcagcaaggtctttgtaaaatggatcttgttccaatcttctatttatcctgtgacttagaaagccgggcctcatggaaatgcagtcctgtaggtctcagccccattttacccagcacctattccagatgcagtttctctgcttcagacgcctctgacatagctacagggtgctggaatgtggctagtgtgaacttcagtgtgctagaaaggtaaaatacaagattacattcagagatttagcttcaaaaatgtatgtgctttattaaccattacatagtaatcacatattaaaataataatattttggatatattgggctgattaagttgttgcaatcaattccacctgttattccacctgtttctttcttttttattttgagacagagtttctctgtcaccaggctggggtgctgtggtgtgatctcggctcactgcaacctctgcctcttgggttcaagcgattctcctgtctcagcctccctagtagctgggatcacaaatgcctgtcaccacgcccagctaattcttctacttttggtagagcaggggtttcatcatgtaagccaggctggtctcgaactcctgacttcaggtggttccccacctcggcctctcaaagtgctgggattacaggcgtgagccactgcgcccggccccacctttttttttttttttttttaacatttggctactagaaaattaaaaatttacatgtggctcatattttactgcagaggattgcctcccttctgaaatctcaggctgtccgcatgtattagtccattttcacactgctacagacaaatagctcaaaccgcgtaattttttttttaaagtaaattgaatcatagccctacatggctgcagaatccttgggaaacttaaattcatgaccatgacagaaggtgaagggaaagcaaggcacatcttacatggtggaaaaagagagagaaccggggaggacgtgccacatttttaaaccatcaggtgtcttgagagctcccttactactaccagaacagcatgaggataatccacaccaatgatccaatcacctcctgcccggtccctgccctgacaaatgggaattacaattttttttttctttcagaggaagtctctctgtgtcacccaggctgcagtgcaatggcgccatctcggctcactgcaacctccaccccctgggttcaagcaattctcctgcctcagtctcccgagtagccgggactaacaggcacgctgccacgcctggctaatttttgtatttttagtattgacggggtttcaccgtatttgccaggcctgtctcgaactcctgaactagtgacctgcccgcctcggcctcccaaagtgctgggattataggtgtgagccaccgcacatggacgggaattacaatttgagattagatttgggtggagccagaaagtcacaccatatcactgcaaaggatccgcagcaaggaagggcataaaatcctaaattttaaaataattgtcattatttcaatttatgaataaatattatatatcatttataaatgcatatgacattatacacaaggttaaatgcaaatatcctctgaagttggcctggctcagatcaaggaagaagccctgcctgtgaaggctgcagcctaggctgttatttttgcttcgctcagcccagtgtctgatcaaatattccctcactcagggcatgaagggtggggcctgaaaccttatccaatcaggagccgtggtctagaaactgtccaatcaggcatgcagctggaaagaacaggctacttccgtaattttgcgggtcctttgtgtttttctgcgtccagagctgcagttcttctcttcactgctctgtgtcctctgctcctagaggccaagcctatgtgtccttgtgtcctgcaggtatctgcagatttatggctaaaagaccgggaccccctggaagccgggaaatggtgagtgctgggtctgtcatcgtgagagaggggtgggggctggttggaaccggcagaaagtggctgtagcaggtcccagactttctcgcagtc

SEQ ID NO: 38264 - DNA, 2300 bp, Homo sapien
aaacagatttggacatcaaataattcaagaagcaggtgattttatatattattttattacacttttatttcatctaaatacttttgaaaactatgctgccaagaacttggtggtttctttaaagtccaccgtcatagtcccctgtgtccacaagtttcttatatttaattttgatcccttaagttttatataagacaacttttctatcttcttgaagtgtacacttaagatgctcctgttggtagataaaatttctctttgtgtgtgtgtgtgtgttttacttctgaaggttatttagtttacccttatttattaaatatatgctagctatgtattcagttactggttgaacaataatttttcagcactcttaatatttccttctcagttttctggctctgcctgggctgtggagatttcactctcacatgtgtagattctctctctctctctcatggctttgaagtttcttcattctctttggtgttatgcagtttgacttatggtgttggatatctttctttattgctttttctttttttaatttggtgacggaatcttgctctgtcacccaggctggagtcttggctcgctgcaacctccgcctctcgggttcaagggattctcctgcctcaacctccggagtagctgggatcacaggcagctgacaccatgcccggctaagttttttgtatttttttgtatttttagtagacacggggtttcacctggttggccaggttggtcttcaactcctgacctcaagtgacccgccctccttggcctcgcaaagtgctgtgattacagatgtgagccactacacccagcctctttattgcttgctttcaggcacagtgtctcttttaggcacatgtctggtttttacttttagaaatttgtaaataattatttattagtatgacttattatttgtatgaattcaagtgaaataattgtgctttattctttgtcattctattcttcacatatgtataattacattcatattactattattttgtttctctttcttttatttggttatattcgttctgctcaaaatttcagttcattaatccagttcactaattctctcatcaacgtagtctaattttataattaactcacatatcgtatattaaatttctttatgtttaaattattccatttctatttgactcttttccaaatttcctcattcagtttatagtttcctgctctttcaaaaattatttggatatcatcttttcctcaattgtttttacctaaacatttaaaatatttaaatttaatattttatattaatatgtacaaatataaatatatttataatacttttaaaatttaaaatattacaaatatatttccagtatgcaaagtttatgtgatatcaaatttcttccaaccgggccaggcacagtggctcatgcctgtattgggagggagaggcaatcccatcacttgaggccaggagttccagaccagcctggtgaacatggtgaaaccccatctctactaaaaacacaaaaattagctgggcatggtgaggcatgcctgtaaccccagctactcgggaggctgaggcaggagaatcacttgaacccggaaggcggaggttgcattgagcctagatcgggccactgcactccagcctgtataacagagcaagactctgtctcaaaaagaaaaatcttctaaccctttttcctcgtagcttattttcttctgtgcttcatactttttatttattttttattttttacaataggatccggtttattctgccttggcagggtgatcctgagagtggtgggtgtcaccctctcctgggcagagggaggggccgtgggccagtcaagccaatggtaggagaagcgctggtgaggggtggaatttggggttcaggggtgtaaccccaagaatgcagtgaaaccaggccgaggcccagaggcagctgtggtaggccagggcagggtggaaggcagtggactgggcccgggccgggatgacagggccaaggactcaggccacactggcaccccgggaggcggggcgcagtgtcgcatgacgtagaaaatgaatcacaggcccagggctcacaataagcacatggacaagtgggcacagactcacaggccagatggacctccagccacggccgggccagactcgtggacacaggcgcagtgtcacgtacagaccacggggagacatggcactaggggacaaatggacgtgacaccacaatgcacagggcaggccacagagctcgagggacgtgggcaggggccttttggcat

SEQ ID NO: 38265 - DNA, 2300 bp, Homo sapien
aatcacagaaaggcaaaaatgttttaactaaaaacttaataaaaagttataccccccctgaagccatgtaatttgggttttatttattttattgtctattcaggtccataaacctacaactgtaacaatatataccattcatgataagttaatatttattgaatagtaaaatgaatatacgttaagggtagatctggcttcaagtataactgcaatcagggctggtgtgatatgtccagtagtcaaggacaaatgtcagttgtaatatgacctcctccacttgaaacacacagcaatactttaaacgtctgaaaagaaagttacgtagggaaataaatgaaaagttattaatttgattaagaaggaattaaacctgattttaaaatagataaagacatacaaatataaaaaatactgaagaacaattagcataggtagaggagcactaaaagtatgatagaaaagaaatatatttaaaaatattagtttctgagttaagtttgtagatatagagacctgacaaagagttgctcctacacattaaacaaacaaacaaaaatgctggagaaacttcaaatgaatggatggtttctcctgagccctttaaagaactgaggtcacagggcagactacaaacccaacatcaggggatgcagaaagcctgcaggtcacacaggctccaggcttttatgtgtaccctgaagaccatgtaaactggtaaaattaagccagaacttttgaactagttcctggtggctgtgtgtgggtgggtgaggagaatgagaaaccctggagtctacagacgtagggtttataccgttgtgtataatttttctaggaaccctacaaggcctgtcagggaagatggggttagaatcctgaggatgcttaccccacagtgctgatggggagggaccactatcccatccactactgcaactctggagacacagccctcacatctctcctatataacatgaggcctaatctgcagagaaagagcatccaaacctgagccaaagggcactggggaaaagctcatggaactgagggtgaaggaacaaggccaacacccgcatttctgcacagatgcatctcccataaagaaaagaaaccattaatttacagggcactgttcaaggcccacttcaactgggagttaagagcatggagaaggagcacgtttcccctaccatggacaaggagggacaggaatgtgctcttgtcctggcattgcatgtacaggatgggcaggaaactcttcaacggtcagtaaccccacaccccagttcacagtgctaagtctgaggcttcctcagaacattagagatctcctcactccctcaccactgccaccaggctaagaagcatggagtcaaaacagtggaatatagctgggccaagtgcaagaaaccacgtgtgggaagaggcacaaagggaaggcacagcaaactcgggagatattagcaaagtatcatgagagggatttgaatttcctggtcctcagaaggttgttactgccataacgacttttaaccccagcctaccctctcatcaacatgaccacaaacccctatactaaggcagttatctgagagaaaactgctcgtcaataacctaaaacctatcccctttcaatgtcagtgggctgatgaaaaaataaaaataataaaaaaaagatttaccccaatgcactatcctatacaacatatgctattgcttttaacaaaaattagaagccaagacatccctttttatctttagtgagatcttcatttgtgttaaaaccaaattaaggtcccagtgcggagtttaggaggctgggacttcagatcacagcgggcgcccgcctcccgcccgccgtggccacgccgcgccgcgtccgggaaggcccagcggaggctccggggaaggcgacaccagcaggcggcctggccggcggcattgaaatgggcgtccgctccccacggagcgcgggaggtcgtagctgcagccggacgagcgctggcaccagccgggcaccgcgcatggatcccgcgtgcgcactgtcgcggtcatggcgtcccgggccggcaccgcggcctcggctccctgctctgcggctcttgtctccagggcggcgttgggttctgaatgttccagttccacagcagccagacgcgggatgcccagggacggcctgacggcagcgctggctgcggtgcggccagggcgctggcgtggccgaggccatggtggtcgtatgttccatggacaccatcaaggtgaagttcatccacggccagaccttcccagacctc

SEQ ID NO: 38266 - DNA, 2300 bp, Homo sapien
ataatagagaaacagatcaatcaaacaaaagataaagctcataaattgacccatgaaatatagtcagcttatctttgaggaaaaagcaaaggaaattcaattgagaaacaatactttttcaacaaacagtactggaacaactggacatccacatacaagagaaaagaagaaaaaaaaaaaccctaaacccagacctgacaactttcacagaaattactaagaatggatcatagacctatataggaggaaaactcacaaaactcctagaagataacaaagagcagaatctgaattacctcaggttttgctcctctgataaaacaccagaaacgctgggggcggtggctcatacctgtaatcccagcactttgggaggccgaggtgggtggatcatgaggtcagtagattgagaccatcctggccaacatggtgaaaccccatctctactagaaatacaaaaattagctgagtgtggcagcgtgtgcctgtagtcccagctacttgggaggctgaggcaggagaatcacttgaacctgggaggaggagggcgcagtgagctgagatcagccactgcactccagcctgggtgacacggcgagactccattacagagaaatgaaaattataaaaagaatgggatacagagataatgaaatgaaaaattaaaaagacctttgagtttataaacagagtagaaacagaagacagcaatagaaatcatcatcatccaatctgaagagtgaaacaagtttgaagaaaatgaaaagctccttagagacctgtggaatgactgagtccgagaaggagagggagagacagaaaaattaaatatgatacaagagcaaataaacaactcatagctgaaaacttgcaaaatttggtcaaaacctcaaatttgtatattcaaaagatgagcacacttcaaaagaaaatacacataaaaccataccaaggccctattagaaaactggcagggcagggttttcaagggacttgctatgatttctcattttcactatttataataatggacaatatgctctccttagagttttcttcctgcagaaagtctgatatgtcaggtgcagatgactctttagtctatttttcaaggtttaatttcttaccttggaaatcaattaaatttgttttttcaaaattttgcagtaaaattgatgctccgaaaagatgcccagggagattctgtcctgctgcgtccgccctgcacagaactaacgctatgccaacgccagtttcaaaagcgtgtagttgtggagtacttaagagttaatctaaaaaagcgaatagaaaaatggattcaataaatgatcactgttaagttccatcggcaaagtcttaaaagtggttccaaagggagtatttaataagaggtaaagatttttccagggcaccctattcagagcaaaaacaaagacactgtccaaacctcaccacacaaacttcctcatgtgttgggaggaaccaaggcgctctctggtcctgcacctgtgttagttatggccgggaggtctacactaggaccccaaggcctgggaaccagcctgggtgggggacaaagaagtggtggatgtggctcgcaaagtagtttaggtggtcccttccccgtggcagtttcctgactggatgcagcagggtcaggcctttcccctgggacattttctcatcgttattatagtggcaggagcgcccctgtgcgaggcctgacccaggtgtgggccatgcagccagcccggggtccaacaggtgcatctggggagtacagggggattcgtggcagcccagagagagagaaaaaggtggttttcaaaagggaagtgccaggttaccagagactgggtaccttcacatgaggcagtgagtgagctaatagtttcggacactcacgagggagcttcccgcgctggaccaaggggagcactacgcatgtctgaaggggtgtggccaggggagggacaataagaggacgtggctaaaacgagtggcccttcagagggaaagggcggtgtcgagccggctgctggggggggcgggggcgcaagcgttaccatagcaaccctgctgcagagtctgtgagaggctcttggcctctacctggtctgtggaaaatcaaactctgggcacaagtcatgaagccagcacgttggggagacaccgtgtcacaatgacaaggtgagatcagccgccctggccaagctgtctcctcgcgggcaggagaggtttgtgaacagccaagcttccctccgcacggcggaactgcactggaagcctggaggagctcg

SEQ ID NO: 38267 - DNA, 2300 bp, Homo sapien; identical to SEQ ID NO: 38266

SEQ ID NO: 38268 - DNA, 2300 bp, Homo sapien
aaacagatttggacatcaaataattcaagaagcaggtgattttatatattattttattacacttttatttcatctaaatacttttgaaaactatgctgccaagaacttggtggtttctttaaagtccaccgtcatagtcccctgtgtccacaagtttcttatatttaattttgatcccttaagttttatataagacaacttttctatcttcttgaagtgtacacttaagatgctcctgttggtagataaaatttctctttgtgtgtgtgtgtgtgttttacttctgaaggttatttagtttacccttatttattaaatatatgctagctatgtattcagttactggttgaacaataatttttcagcactcttaatatttccttctcagttttctggctctgcctgggctgtggagatttcactctcacatgtgtagattctctctctctctctcatggctttgaagtttcttcattctctttggtgttatgcagtttgacttatggtgttggatatctttctttattgctttttctttttttaatttggtgacggaatcttgctctgtcacccaggctggagtcttggctcgctgcaacctccgcctctcgggttcaagggattctcctgcctcaacctccggagtagctgggatcacaggcagctgacaccatgcccggctaagttttttgtatttttttgtatttttagtagacacggggtttcacctggttggccaggttggtcttcaactcctgacctcaagtgacccgccctccttggcctcgcaaagtgctgtgattacagatgtgagccactacacccagcctctttattgcttgctttcaggcacagtgtctcttttaggcacatgtctggtttttacttttagaaatttgtaaataattatttattagtatgacttattatttgtatgaattcaagtgaaataattgtgctttattctttgtcattctattcttcacatatgtataattacattcatattactattattttgtttctctttcttttatttggttatattcgttctgctcaaaatttcagttcattaatccagttcactaattctctcatcaacgtagtctaattttataattaactcacatatcgtatattaaatttctttatgtttaaattattccatttctatttgactcttttccaaatttcctcattcagtttatagtttcctgctctttcaaaaattatttggatatcatcttttcctcaattgtttttacctaaacatttaaaatatttaaatttaatattttatattaatatgtacaaatataaatatatttataatacttttaaaatttaaaatattacaaatatatttccagtatgcaaagtttatgtgatatcaaatttcttccaaccgggccaggcacagtggctcatgcctgtattgggagggagaggcaatcccatcacttgaggccaggagttccagaccagcctggtgaacatggtgaaaccccatctctactaaaaacacaaaaattagctgggcatggtgaggcatgcctgtaaccccagctactcgggaggctgaggcaggagaatcacttgaacccggaaggcggaggttgcattgagcctagatccggccactgcactccagcctgtataacagagcaagactctgtctcaaaaagaaaaatcttctaaccctttttcctcgtagcttattttcttctgtgcttcatactttttatttattttttattttttacaataggatccggtttattctgccttggcagggtgatcctgagagtggtgggtgtcaccctctcctgggcagagggaggggccgtgggccagtcaagccaatggtaggagaagcgctggtgaggggtggaatttggggttcaggggtgtaaccccaagaatgcagtgaaaccaggccgaggcccagaggcagctgtggtaggccagggcagggtggaaggcagtggactgggcccgggccgggatgacagggccaaggactcaggccacactggcaccccgggaggcggggcgcagtgtcgcatgacgtagaaaatgaatcacaggcccagggctcacaataagcacatggacaagtgggcacagactcacaggccagatggacctccagccacggccgggccagactcgtggacacaggcgcagtgtcacgtacacaccacggggagacatggcactaggggacaaatggacgtgacaccacaatgcacagggcaggccacagagctcgagggacgtgggcaggggccttttggcat

SEQ ID NO: 38269 - DNA, 2300 bp, Homo sapien
gagttttacaagaaagacgtgggcaattcccagaactgagtgtttctcttctttttagaccatgtaaggtaactttctgatgttgccatggcattcgttaactgtcacggcgctggtgggaatgtctttcacatgctaatgcattataattagcgtgtagtgattcctgaggacaaccagaggtccctttcattcccaccttggtttcggtagatttttgtggcttctttactgcaaactgttttatcagcaaggtctttgtaaaatggatcttgttccaatcttctatttatcctgtgacttagaaagccgggcctcatggaaatgcagtcctgtaggtctcagccccattttacccagcacctattccagatgcagtttctctgcttcagacgcctctgacatagctacagggtgctggaatgtggctagtgtgaacttcagtgtgctagaaaggtaaaatacaagattacattcagagatttagcttcaaaaatgtatgtgctttattaaccattacatagtaatcacatattaaaataataatattttggatatattgggctgattaagttgttgcaatcaattccacctgttattccacctgtttctttcttttttattttgagacagagtttctctgtcgccaggctggggtgctgtggtgtgatctcggctcactgcaacctctgcctcttgggttcaagcgattctcctgtctcagcctccctagtagctgggatcacaaatgcctgtcaccacgcccagctaatttttctacttttggtagagcaggggtttcatcatgtaagccaggctggtctcgaactcctgacttcaggtggttccccacctcggcctctcaaagtgctgggattacaggcgtgagccactgcgcccggccccaccttttttttttttttatttttaacatttggctactagaaaattaaaaatttacatgtggctcatattttactgcagaggattgcctcccttctgaaatctcaggctgtccgcatgtattagtccattttcacactgctacagacaaatagctcaaaccgcgtaattttttttttaaagtaaattgaatcatagccctacatggctgcagaatccttgggaaacttaaattcatgaccatgacagaaggtgaagggaaagcaaggcacatcttacatggtggaaaaagagagagaaccggggaggacgtgccacatttttaaaccgtcaggtgtcttgagagctcccttactactaccagaacagcatgaggataatccacaccaatgatccaatcacctcctgcccggtccctgccctgacaaatgggaattacaattttttttttctttcagaggaagtctctctgtgtcacccaggctgcagtgcaatggcgccatctcggctcactgcaacctccaccccctgggttcaagcaattctcctgcctcagtctcccgagtagccgggactaacaggcacgctgccacgcctggctaatttttgtatttttagtattgacggggtttcaccgtatttgccaggcctgtctcgaactcctgaactagtgacctgcccgcctcggcctcccaaagtgctgggattataggtgtgagccaccgcacatggacgggaattacaatttgagattagatttgggtggagccagaaagtcacaccatatcactgcaaaggatccgcagcaaggaagggcataaaatcctaaattttaaaataattgtcattatttcaatttatgaataaatattatatatcatttataaatgcatatcacattatacacaaggttaaatgcaaatatcctctgaagttggcctggctcagatcaaggaagaagccctgcctgtgaaggctgcagcctaggctgttatttttgcttcgctcagcccagtgtctgatcaaatattccctcactcagggcatgaaggctggggcctgaaaccttatccaatcaggagccgtggtctagaaactgtccaatcaggcatgcagctggaaagaacaggctacttccgtaattttgcgggtcctttgtgtttttctgcgtccagagctgcagttcttctcttcactgctctgtgtcctctgctcctagaggccaagcctatgtgtccttgtgtcctgcaggtatctgcagatttatggctaaaagaccgggaccccctggaagccgggaaatggtgagtgctgggtctgtcatcgtgagagaggggtgggggctggttggaaccggcagaaagtggctgtagcaggtcccagactttctcgcagtc

SEQ ID NO: 38270 - DNA, 2300 bp, Homo sapien
tggtgggcaccttaatcccagctactcgagaggctgaggcaggagaatcacttgaacctgggaggcggaggttgcagtgagccgagatcacaccactgcactccagcctgagtaataagagcaaaactccacctcagaaataaaaaaaaaaaaaaaaatctcgatttttaaaaactatgagtcaaatattattttcctcctcccattttacagggtgcaacctaaataacagagaatttaagtaattttcctaagtggcagagcacagatttaaatcctatcactttggcctcagaatttgtgctttatattattttactattttaaaattcatcttttttaaaaccaagagacttatgcaaaattgtgctaggattcaaaaaacgcctcttgcttttcctgatcatggttacaggcagggctcatgctgcattttctttacttatttatgtcctgcttggatggagacatgatgacaggagctccctccatcaccgtgcaccagaaagaaaagtgaagagaagcacagggaagccagtcttaccatgtttgagcaactgaaccaatgtcagcctgagcctaccagcacaattactcttatgtgagaaaaacaggcatctccctatttggaaaatcacagctgactgcagtagtaaacaatccacaagttattcctggtaacactattcctacagccctaatctgtctcaaaaaaaaaaaaaaatcctaatgcagttatttccttttgcattcatgaggagatggaagaaatacccatatttgatggttggctgggaactgtctttggcactgtatgaagtattttaatattgtaaacatgaaaagatgagaatcctggagaccccgtgggcatggagaaaaggaagtacattagagggtgttgtaggaaatattttcattccaggcactgctgtttaaactacccctaaactttctttccttaaaagaacagaaaaaacaaagaggacaaaagatcaagaaacattccacgtgcccctctccattcttatttgttgtaataaaggaaaagcattgtggagattttcctgaatgcagtttatgatgtgatcaaagttatttattttctgctaatgattttcaaaatttgaattaaaaactttcagaaatttagctttatcaaaggcagctgttcacatgtaaaactagtttggttaacttcatctgcataaacacatagctagtgaattagcataactattaaactgaagaatcaacagaaacatgccaatgactggcccttaccttccacagtgacctcaatttcaggaagattttcattactctcaggccttcatggtctttttggggactgaaagttgtaaaataagcacagaattactttagtatgttgtaggaaaaaaatacaaaaggagatgttttataagagtagagtattaaaattcatacagtttgactctttgcgaagaaacctgcagaattaaacttgtagtgtagtcctctacaggcggctcaaaaaagccatggaaacatgcataaagtaggattgcaaatgtgacatttccagtgaaatttaaaaaaaaaaaaaagaaaaaagaaaaagaggtccattaaataacataacttaaaaagctaagaaaccaactgcaagtcccacaaagatattggccaatgactctctatgattttaagaaatgctgataaagaatgtcttaatgcagtgaaatataacaggaagtacatgtaatctcttacctttagtgtggcaagtaggaaataattagttcaagtcaagaaagaataccaagaaatgttatagtagccagtacaatggtggtctaacagctagtaaaacagtcctgatatgatgagagttttttcaaaaggagttcgcagagtcaccctgtaatgtaacaataattcctatcattgtgtacaaaaaccctgacatttccttcccatgactggcaagtaattatatgaagaataaattacttctttcatgaaaaagaaaatcaacactagtgtattttcttcagccactaaaattctgcaggaacacagatatagtaagaaactcaatcatcacatcaggccgggtatggtggctcatgcctgtcattccagcacattgaaaggccaaggcgggtgggtcacctgagttcaggagttcaagaccagcctgaccaacttggtgaaaccccatctctgctaaaaacacaaaaattagccaggtatggtggcgcatttctgtaatcccagctactcaggaggctgaggcaggagactcacctgaaccc

SEQ ID NO: 38271 - DNA, 2300 bp, Homo sapien
cacgctgagggaggtcagcgtgggcccctgcctcaaactggcctctctcacgctgagggaggtcagcgtgaggccctgcctcacactggcctctctcacgctgagggaggtcagcgtgaggccctgcctcacactggcctctctcacgctgagagaagtcctccctcacgctggcctgttgaggcccagttcatgcctctgttggcttctccaggcccagcccctgcctgttggcggcctctacctcaacagtgggccctccacgcccacctcttgcctcgccgtggcctcctcgggccaggctcccgccttggggcagctcccgcaggcccagctcctgcctcacggccctccggaggccaagctcatgtgtcagggcggcctctcccggcctggcgtttgctcctttgcatgggctccaaatcctgcacttcctccagtcgttctctccaggcccagctcttcctcccagcagcctctgcaggaccagactgtcgtcaagtaggcctgtccagggacagctcctgcctcccggcagactctgcaggcccaagtcgtcctcaagtcagcctccccaggcccagctccggcctctcggcggcctctccaggtgcaaaagttcctcgagtccgtctctccaggtccagctcctcctgtctcccagtggcctctttcagcccagcccagctcatgcctcccggcggccttcccaggccccgcttctgactttccgcggcctctgcaggccccgaacttgacctccagtcggcctctgcaggcctggcctcctgcctcccgaaagcttgcacaggcccagcctctgcctcacagcggactctccacgcccagctcgctctcgcctgcggcctcccgagtccaaagctccggcctcttcgccgcttcggcaggcccagctcccacctgccagtggcctcctcaggcccatggggctcattcctcacaacggcctttcccagcccagtttttcccgtccggcggcctctccgggcccagaagctcctcaagtcggcctctccagacccacttgcagcctcccggcgtcctctccgggcccagctcttcctcccggctccgtctgcaggcccggctcctgcctcccaacaacctctttggactcagtgcctgcccagctcgtggtggccttggtcggcccacagcttcctcaagccaagctccccaggcccagctcaggcctcacggtggcctctccaggctcagctcctgccctccgacggcgtctccaggccccaaacggcctccggtcggtgggcttctccaggcccagcttgggcctcccggcggcctctgcaggcccaagtggtcctgaagtcagcctctccaggcccagctccggcctcccagcaagcaagctcttttggctcagctcctgcccagctcccgccggcttttgtagaccctgaactttctccagcgaagctcctcagtcccacctcctgcctcccggtggcctgtacaggcccaggtctggctggagaacagcctctgcaggccccgctcttgcctcccaggggcgtctccaggcccagctctcgcctcacggcggcctcccgggaccaagtccctgcctgcctcccagcagcctgtgtgcggcccagctcctccgtcacggtggcctgttgaggcccaactcatgcttctggcaccctttccagaggcgtgagcccctgcctcacattggcctctctcacgctgagggaggtcagcgtgagcccctgcctcacactggcctctctcacgctgagggaggtcagcgtgggcccctgcctcacactggcctctctcacgctgagggaggtcagcgtgggcccctgcctcaaactggcctctctcacgctgagggaggtcagcgtgaggccctgcctcacactggcctctctcatgctgagggaggtcagcgtgaggccctgcctcacactggcctctctcacgctgagagaagtcctccctcacgctggcctgttgaggcccagttcatgcctctgttggcttctccaggcccagcccctgcctgttggcggcctctacctcaacagtgggccctccacgcccacctcttgcctcgccgtggcctcctcgggccaggctcccgccttggggcggcccccgcaggcccagctcctgcctcacggccctccggaggccaagctcatgcgtcagggcggcctctcccggcctggcgtttgctcctttgcatgggctccaaatcctgcacttcctccagtcgttctctccaggcccagctcttcctcccagcagcc

SEQ ID NO: 38272 - DNA, 2300 bp, Homo sapien
gtcaacaaacccctccaaaaaatacaaataaaaccctaccaaggccatattgtgatttaggagactggcagaggagagcttcctgttgacttgctgtgatttctaattttaactacttagaagaataaaaaatagggtctccttagagtttctttttttttttttcttggagaaagtctgacttaggcacagatgactgacagtttttaaaggtagatgagtttccagacttctcttaaatttccagtgtgttaacgttgaaaattatttgaacttgttgcttccaaatcctgcagtaatactgatgctccagaaaggcgtcccatggagattctgctcttgtgcatccatcctgcacggagctgaggctgtgcctcctctagtttcattagcgtgtagttgtggggtacttcgagttaatctgaaaaactcagtgttaaaatggattcaggccgggcgcagtggctcacgcctgcaatcccagcattttgggtggccaaggcgggcagatcacttgagttcaggagttcgagaccagcctggcccacatggtgaaacccaatctctactaaaaaatgcaaaaattagccgggcgtggtggcggttgtctgtaatttcatctactcgggaggctgaggcaggagaatcgcttgaacccgggaagtggaggttgcagtgagcccagatcgagtcacagcattccagcctgggctacaaagcaagactgcgtgtcagaaaaagaaaagaaaaatggattcaaagatttatcactgttaagttccaccagcaaattattaaatgtggttccaaagggatatttaaaaagggaaattaaaattgtttccaagaaagccctattcacagcagaaacgtagacactgtacctgacctcaccacacaaagttccctcatgtgttgggagggaccaaggggctctctggtcctgcacctgcgttaattatggccgggaggtccgcagtaggaccctaagggctaggaaccagcctgggtcaggggcagagaagtggtggatgtggctcccaaagtggcttaggggttcccttccctgtggctgtttcctgactggatgcagcagggtcaggcctttcagtgtgacgttttctactctttattagagtggcaggagcgtccctgtgcgaggcctgacccaggtgtgggccttgcagccagctcggggtccaaggggcactcctgcggtgctgcaaaggaggatttgtgacaacccagaggatggaggaaacggcggctttgaaaaggcaagtgccaagttatcagggatcgcttatatccatttctggcagtgaactgacaatttcagacactcaggagggagcttcccgcgtgggatcacaaaaagtccgagaagtgtcagacatctggccattaaccccattcctacgcagggactacactgccgcttgtccgaaggggcgtgtcaggggcggagcgaggatgaggggcggtgccaataaaagaggcgggggagaaggggcggtgctgaggggagaggccgggccaagggaagaagcgtgcgagaaagggtggggcgagtccagctacaggaagagtagcgttactatggcaaccctgacaggtttgtgagcagcccccggtcccctgccgctccgtgagaaatcaaacttcaggcactgacgaagcatgaagccagcatcttaggaagaggtagtgacataattacaaggtaggaccaaccgccctggtcccactgtcgcctggcaggcaggagaggtttgggaacagccaggctccccttgacatggcagtactgctctggacgcggggaggtgtggattagtgggtgggagctacacctggcatactgggagttgtcgtctttgattagcttccagttttttaattgcagggcgaccggattacaatcacagccagcatgaacatggggcggcgcacagtcctgaagaggaaagccgggctgtgttgacctcgctgtgcatgctgggagttgtagtctcttcactgctcccgcccgttgtttcaggcacttcgggactacaatcccagcatgacccgggctcggggacggggcgcagttctcgtgggaggagcggggcggtgagagcctggctaggcaggctggaaacagtagctcttaacggtcccccgcccgttggtggcaaggcggctggactggaatcccagcaggcgacatgcgaggaggcgggcagcccaggagggttggacacggcaatgtggacctcgccgcttccacaacgatgctggctactgatcgcgtgcac

SEQ ID NO: 38273 - DNA, 2300 bp, Homo sapien
actcacattttggtttttctatgtaagagtttattgtttctgaacctctttactggttaaataaactgaaaacctaggctgtgccacttactagatttctgacaaaatattccccttgggccagaagcaataacaccactggcaaacttgttagaaattctgaaactcaagtttcaccctaaatccagagtcaaagtctacattttaacaagatctcttgttcatcattgtacacaattaagattcgagcagtacgtttctaactcaccatgaaatttccgtttattagctatggacaacttatcttgtatcatgtaaatatagcattcaaaaatatacatgtctgtgtttgtgccctttattgtatattttattatcaagaaaagtaatgcatctacactggttttgtagatcttatgccatcttcttttctcagagttaaagaatacagtagagaatatttttctgctggaaagcatcttattggataactccagtcactcacataagtcagaaccagttctctttgctctctgtttacctaatgtaaaattgagaattcttcctatgaccatttgctaaatatgttttgtttttcagggagtgttgccattcagggatgtggccatagaattctccccagaagagtgggagtgcctggactctgctcagcagcatttgcacagggatgcgatgttagagaactatggaaacctggtgtctctgggtgaggatatcttcaatatacaattcacattccacactaaatattttattttcttccattttctgggagtttctgctttgcacaaatgagtttcagaattcatcttcaaaaaagcaaaaacaaaaaaagttgggtatctgttgaggtagaaaaaaatgttcaagatgtttcatgttaacattaatctttcccttttttgagctgatctgtatacttcagtctaaattactggtaatacaagaaatttagtggcataaaatattgttacccacactttaaaatccaatttttaccaccaatttttcatttagtattactgagtagtagagctaagaacccacatactaaaaaaaatttgttttgttttgttttgtttgttttgagacgaagtctcactctgtcacccaggctggagtgcaatggcatgatctcagctcattgcaacctctgcctcctgggttcaagcaattctcctgtctcagcctcccgagtagctgggattagaggcttgtgccaccaggcccagttaatacacacacacatacacacacacacacacacacacacacacacatatatatatacacacatatatattttgtatttttagtagagatgggctctcaccatgttcaccaggctggtcttgaactcctggcctcaagtgattcactcacctcggcctcccaaagtgctgggattacaggcatgagccaccgtgcctggccaaaattttttcttaatattctaaagttcctgttaggaaatagtatattggtattaattttctagaatctctataatgttttctcttctctaatgagcacattactagattggtaattggagtatcctagcaagaatcatgttattcttttctaataaaacaggtcttgttatttccaagccagacttgattacccttctggagcaaagagccctggaatgtgaagagacagaagacagtagtcaaatacccaggtaggtgggagtgaatgaaggaaatgacacaaatgagagttcccaatgtcaaggaggaagccagacttttacacacggtttgaatagctctcctccagtgaaagcagtttctagaaccctgcattttttctcttgttttgacatagaggcatcttttgtccaattctcataaattttttaagtgctgtacttccccttcagtaaggtttattttttcctttgagtttacagtgataataaaagttttaatgataacttaagaatgtgtgatctgatgggcttccattgctttgggagaaacagtaatatctgtatttttgagaaactgtatgttaaaccattcttaaggttctttttttggataatgtctaaattacatgagagttttggtgatattgggatttggttcagaaatcccaggaacaccacaaaaagatatatgttttctgctttatatttttttattctacagtggtttcaaacggaattttataggaatttatactcagtaattttatcaaaacactaaccatctccctaaatataagaaactctaaaattacattaattcaaaatattattctttttatgt

SEQ ID NO: 38274 - DNA, 2300 bp, Homo sapien
tgatgaaaataaaacttttttcctcctactaaatggtaaaaacacttttttttttttcaagacagagtcttgctcgtgttgcccaggctggagtgcagtggcacgactgcagctcactgcgaccactgcctcccaggttcgagtgattcttctgcctcagcctccagagtagctgggactacaggcactcgccaccatgcctggctaattttctgtatttttagtagagacagggtttcaccatattatccaggctggtcttgaactcctgacctcaggcgatccatcttcctcagctctgagctaccacacccagccgaggtgggtgaagttctgggttttcttataaaatgtcacaggagattatgacacaaatattttataaagcctttgggtggtatgagctgtgtcataacacagtccaacaagcaggtgagtttgtgactctcataggcacatccagccaacaatggtattatcattcttaaacctagacacaacccactggtgaggttataaacctcacatatggatgcagaccacagttggaattgttactgtcatatgtggatttggccacaggtcgaaggggaagtcatttcttgactaactcacaggcacagtgttgtctcttatacttggaccaagctagtagaagagatgttgactctcattgttaggattaggaaatggggatgattctgggtttttctacacacacaaatgtcacaaaaaatcacaacactcatgcatacagcataatgccctatggtggtacagagagtgtcaacacagcccaatacaaagttgagacttattctcatatgcacagccagctgacagtaagaattgtcacccacacacatggacagatcccattagtgaggtcctgactttgccttgtggacagggttcacagttgaaattgtgactgtcatatgcagatctgaccacaggtaagattgtgactcatttctggacccagctcacaaacatggtgatgactctcatacctggacccaggcaagagaaaatgtgttgacttctgcctgggcttagggtaacaggtaagatcttagagccatacaaacaaagttcacagagcagaattccactctcaagcatattatgtgaaaatctcagatggtacagagagtgtcataacacagccagaaacacagaggaaattgtgaatctcctatgcatacccagccaacaataaggatggtcactctcccatatagacacagctcactgttgaggttctgaatctcacgcccagaggcaatgaaaagttgaaagtttgactcacgtacatgcatctggtcaacaggtaggatagtgactctgagaccaagattcagcaccctggtgaggctgtgcctatcttatgggaacactgtttgcagtggagatagagctctcatggacggatcctgtccaatgttaagactgtgtctcgtgtatttggatgcaactcacaagaggtgttgactgtcagacctaaagctgggaaatatgtagaactgtgaaatttattcctggtccttcccgcaggtgtgattgtggcgtatactttcacacagcacctaatttattttactaatttgcttgggcccagccaacagttgggactgtgacatatacctggatcaagtacctaggtgatgtaactctccagcctgggccttaccacagggtgcattgtaacatatctttggacttttcacctatgtgatgtgactctactttcttgcctcatcttggcctccattgggaattgtgacatattgctgggcccaatacctaagttatgtgactcttcttcgctgcttgtgcacttagaagggattgtgacatattgctgggccaagaacctaggtggtgtgactctcctgtcttcaggggaaattgtgacatgactctgggaaattttccctgccttcaggggaaattgtgatatgtctctgggtttattacctaagtgatgtgactctcatcgcctgtgtgggcaagcccaaaggggtcattgtgacctatctctgggcacatcacagaagtggtatggcttttctctcatttctggaccctggtctcagtagggactgtgacatatcactgggcctataacctaggtaatgtgactctccttttcttcctgtgttctgtcccagtgaagattatgacaaatttctgggccagtcaggtatgtggtatgactctgtgctctttcctgggccccgctagcagggagcattgtgacatattgccaggctcagcacctaggtaatgtgactctt

SEQ ID NO: 38275 - DNA, 2300 bp, Homo sapien
tttttttttttttttttttggtgttattcacatttccctggaagtcagacagccagtgttcattagaaaggccccttagacccttagactaggtcccctccccactcccttcatactgcattactgccagggccaccagggtcagggcatgtgcacaaagcaggagttgggtctgcagcaggttctggggttcaaagaacagaacaatgggagctgaggctcagggacctcccgccccaactctctctgatgacagaaaaactggaggctcccattaaaaaagtgctcaggcttatatgagctgcctgcccttagagaggtctaagtttactctccttccattggaaccacctgagggagagtctgagtccagctcaggccaaacctcactgagctttgcaagcaggcagctctgcagcttcaccactctgggaacagggactgacggctgatgtggaatcttcaacattcatagggaagaggggcctgatgcctcagctcacagaggcagccgtgaggctctcatgagaggaggtttgccaagtgctgagatctaagggtgtagtcctggattctcttttcccaagcctcaggatcctggttccagccctgcccatcccaggctcactcccatccatataatcctttctggcagggtctcccatcaccagataactggaaaatgtgcccaggatggaggcaacaccctgtgccatcgggtggtgatggggatgagtatccaattttgggtgtccattcaaggcctgtcccctgaagtctcataatcccctgtctcctggaccctcctatctacatcttccacttgaaaaagccaaagacactcagctgcctctccccaactctctcccctcctcctagctggcctccaaaaacatgaacccccatgttcccatgttaactctgtggtgagatttttacaagtcacaatgttatgtggtccctgcccccactatttcccaaatccagctcttccaggcttttactcagatttgtcttatagaggcatttcagggactgttgccacaggagggaagggctacgggagaaaggccccttgctcttttgatgtggaggcctccggctgtgagggaggagctcttccctctgactccctggagctcctccccatcacagggacactgcctttttgctgctttagcctcatctggcctctctgtggtttcgtctccagggtggccaacgtggatgtcttcatctgccagagtcaaagaaaaggtcagtgatactatgctcccttcacccagttatgcccagttacactgacctggtatcctggataactggtgtgagtaagctggtccaatgctcctgtcatctccagtaagttctgattctagattgactccctgctccaacactccctgtatgtggaaccttgggcatgcagccaggcctccctgagactgttttctcaacttgaaagtgtgatgggaaccacctacctcactgggccttgtgaggactcagttatatgtagctgtcaccattgttctcatcatctcaggaagagccaggcacaagcactctcaaagttcttttctcctttgaagctcatcattagcccctctcagtctcatcatccctacattttttggataagaaaacagaggcccaaagagggcagtgacttgcccagggccctagagaagaggccggctccttcccacacctggaggcactgacccagctgactttaccccacagcccagcactatccctgactagggtcccatcttcgttctccatgcttgtttaggtcctcaggcaggctcagctttggtgggaaagaaacagggtgttttgggaggtctgggtgagtggcactaaccaatctgctaggccctcacctctcagtctcactgagacactccattaattggaagcagacccaaaattgcttcacagactgaaggtgataattgtctgcagccagctggtgcagctgcatctcctggaggactttgatctcctgcaactaaagggaaagacaggatgctgagacagggcctgcagcatacacataactataattcagaaattgatatacacacacgtaaatataatcagaaagtgatataatcttatatacaacgttaaatacaaatgtccctcaggcagggccaggcccccaacacaaggagaaatcgctgcctgaacatgctgcaggcaaaaacctgtcactctttcctcattcagcccagtgtctcattacatctcctgtcgatcagggtctaaatgtgtggggcggagaaccccag

SEQ ID NO: 38276 - DNA, 2300 bp, Homo sapien
atttttgtatttttgtagagacggggttcccaaaatcctagaattacaggtgtaagccaccgtgcccggcctgttctcattttttttttatccatctcatttttttttcctcaccaaagatatgttgctttgtcttggggtttttttacatgtgaattcctgaacctcatccagcccctcgtcccctccccagccagctcacactcgtttgtcacagctcctgggactcccattgacatacaggtaacagccacccacagtggactgtgctgttctgtttgcacccttaaatttatcatgattacagaatgccacttctgcaaactagtcaagtagggggaagtggctcatcgatatgcatgcttgctcatcctctttgaaaaggtaaccagctctgaattcttttttctttgagacggagtttggcacgatcttggctcactgctacctctgcctcccaggttcaagctgttctcctgcctcagcctcccaagtagctgggattacaggcatgcgccaccatgcccatctaattttgtatttttggtagacatgagatttccccaccatgttggtcaggttggtcttgaactcctgacctcaagtgatccgcctgccttggcctcccaaagtgctgggattacagacatgagccaccatgccctgcctgagctctgaattcttaagaaactcttgagagggtctaggtcagtgctgatagaacctctgcagtgctgggcgtgatggcttacacctggaatgctagtactttgggatgccaaggtcagaggatctcttgagcccaggagttttgagaccagtctgtacaacatacaccccatctctacaaaaaatttaaaatgagttgggcatggttgtgcttgcctgtagtcccagctacttgggaggctgaggtgggaggattgtttgagcccagtaggtcaagactccagtcagccatgattgcattgctgtactcccacctgggtgacagagtgagaccttgttttttttaaaaaaaacacccttgcagtgatggaaatgttctgtatttgcactgtctgaaatggtagctattagctacacgtggctattgaggtcttgatatatgactaggataaccgaattgatttagtttaattaaaaaagattttttttgagacagactcactctgttgtccaggctggagtgcagtggcataaccacagctcactgctcgacttcctgggctcaaccactcctttctcctcagccccctaagtagctggaaccacaactgtgcacccccatgcctggctaatattttgcctttttgtaggactgggtctcactgtgttgcctaggctgctcttgaactcctggtctcaagtgatcctcctgcctcgacgtcccaaagtgctgggataccagacctgagctaccatgcccagcctggtttagtttaatttcattttacatgtatgtatgtatgacagggtctcgctctgtcactcaggctggagtgcagtggtgtaaacacagctcactgcagctttgacctctggggctcaagcagtcctcccacctctgcctcccaagtagctgggaccacaggtatgtgccaccatgcttggctgatttttgtgttttttgtacagatggggtcttgctgtgttacccaggctggtcttgaacacctgggctcaagcaatcctcccaccttggcctcccaaagtgctgggataacaggcatgagccactgcacctggcccaaagacgtatttttacctgtagtgtagttcagcctttagactgtaccagcagatagaggtggaaaagtaatgtaaagcgaatatcaaattacatttataaataaagcagttgctcattaaggttgtttttttttttaaacctccttttttattctgggttacatcattccctggctgtctttaccccagcatcagtgagtcctgcagtcactatagccccctgcgaggacagatattttggtcaccatcaagtggatctttatttttatctaacatttacaattctgccatttctgactcttagaatctctttgccttgaataccagggtccacctctgatgttcactgaagagtaccagaagagtctgccagagcagtaccatctgggtctggatcaaaaacgcagaaaatacgtggttggagagcttatcgggaattctgccgatttcacgactatgcagtgtaagtggcagtttggctcatgggataacgtacctgtcctcattttttcaggttgccttgccaattctggccattttgattataa

SEQ ID NO: 38277 - DNA, 2300 bp, Homo sapien
cccttgtaggcagaaccctggcagaagagtcacatcacttggctgctgggcccagtgatatatcaaaatcccccctgtaggcagagcttaggcaggaaaggggaatcacttcacctaagtaattagcctagacaggtttcacagtggcccccatgggcacagccaaggcaggagagtgacatcaccttgctgccaggctcagcaatgggtcacaatctctccagtgggcaggaactaggcaagaggagaatcacatcacctaggtgctgggctaagtgatatgttccaatgcttcctgtaggaagaactcagtcaggagagtcacattacgtgggtgcagtacccagctaaatgtcacagtgcactctaagtgcagagccaaggcagtagaagtcacatcacctgtgtaatgaacccagaaataagtcacaatgctttttgtaggcagggagcaggcaggggagtcacaggacctgggttgatgctggttgctatgaaatgtaaaaatgcccttggcaggcagggcccaggaaggagtttcacattacttaggtgggtggtccatgtatatgtcacaattttatctgtgggctgggcctaggaaacagtcagatcactcaggttctgggcaaaggtatatttcccaatcacacacttgggaatgtacagaaatgagtttcacagtttcacacgagtcctggcttcatgtatgagaggcaacccctcttgtgagtggggttcaagtaaaggagatacagtctcaacaatgcacaaaatgcatgcacaacagccccaatctcacctgcagattgtgttccaatagggaactcacagcctcacaggtctgccgaatcatggttcgagagtcaccaaaccacctggaaaccagatccacatatgagagtaataaatccaacttgcaactgtttttatgtgtgagattaagtgcctcattcgtaggctctgtttatctgtaagaatgaggaagagtctgtcggctgggtctgcatacaagagtcacaatctcagctgttagctaggccttgttatcacctctatcactctagggcttcctatgatagtcctgagtgttgtaatgttctgtgaactttatacaagtaggagacccaggacattacctatggcctaagcctggctacaaaagtcaaaatatctcccactgtctgtgtccaggtaagagagtcatcattgtggttgtgagctgggcccaggtatatgccacaatttcacctgccggcaagaacaaaacaggagaatcacatcacctgggtgctagatccagtgatatgtcacaatgcccactgtaggcagggcacaggcaggagagtcacatcatctgagttcttggctcagcagtatgtcacaatcccttctgtaagtagggcccagagagcaagaaaaatcacattacctagctgctgagcctggcaatgtcacaatgctccctgttaacagggcccaggaaagagcacagagtcatatcacacagctgattggcccagaaatttgtcaaaatcttcactggtggcagggcacaggaagaaaagcagagtcacattacctaggtgatggacccagccaaatgtcatgaacttgcctgtaagcagggtccaggcaggacaggagagtcacattacctaggttatgggcccagagagatttcacaatttctactgagaccagggtcctggaatgagagaaaagttataccacttctgtgaggtgtccagaggtatgtcacagtgacccctttggccttgcccacacaggaaatggaagtcatatcacctaggtaataaacccagagtcatgtcacaatttttcctgaaggcagggccaaggcaggagagtcacatcacctaggttcttggcccagcaatatgtcacaatcccttctaaatgcacaagcaggaaagaagagtcacataacttaggtactgggcacagaaatatgccacaatccccaatggaggccaagacaaggcaagtcagtagagtcacatcacataggtgataagtccaaagatatgtcacaatgtaccctgtggtaaggcctgggctggagagttatatcacctaggtacttgatccaggtatatgtcacattcccaactgttggctgggcccaagcaaattagtaaaataaattaggtgctgtgtgaaagtatacgccacaatcacacctgcgggaaggaccaggaataaatttcacaattctacgtatttcccagctttaggtctgagagtctacacttctggtgagttgcatccaaatacac

SEQ ID NO: 38278 - DNA, 2300 bp, Homo sapien
cagcctcccaaagtactgggattacaggtgtgagccaccgtgcctggcctggctgagcacttttttaaatgggagccctcagtttttatgtctgtcatcaaagagagttggggtgggaggtccctgagcctcagctcccattgtcccctttgaaccccagaacctgctgcagacccaagtcctgctttgtgcacatcccctgcccctggtggccctggcagtaatgcagtatgaagagtgtggggaggggacctagtcagggtccaaggggcctttctgatgaccattggctgacttctagggaaatgtaacacccagaaagaaaaggaaggtgagcagctggggcaacattgggagagagtggggaggtgaaagtcagcaacaccctgtgctatcaggtggtgatggggatgagtatccacttttgggtgtccattcaaggcctgtccctgaaatctcataagcccccatctcctggactctcctatccacatcttttacttgaaaaagccaaagacacgcagctgcctctctccaactctctcccctcttcctagctggcctccaaaaacatgaagcactcccttattaactctgtggtgagattttaacaagtcacaatgttatgtggtccctagctccaccgtttcccaaatccactcagcccagctcttccaggcctttactctgatttctcttatagaggcatttcagggactgttgccacaggagggaagggctgagggagaaaggccccttgctcttttgatgtggaggcctccagctgggagggaggagctcttccctctgaatccctggagctcttccccatcacaggtacctgcctttttgctgctttagcctcatctgggctttctgtggtttcttctctagggtggccaacttgggtgtcttcctctgccagggtcaaggacaaggtcagtgatattatgctcccttcacccagttatgcccagttacattgacctggtaccctggataactggtgtgagtcaagctggtccagtgctcctgccacctccagtaaactctgattctagattcactccctgctgcaacactcactgtgtgtggaaccttgggcatgcagccaggcctccctgagactgtttctcaacttgaaagtgtgatgggaaccacacctacctcactgggcctcgtgaggactcagttatatgtagccgtcaccattgttctcatcatcatctctctcaggaagagccaggcacaagcactctcaaatttttctcctttgaagctcctcattaccctgtgaggctcatcatccctacattttttagataagaaaacagaggcccaaagagggcagtgacttgcccagggctctacagaagaggccggctcctccccacacctggaggccctgacctagctgactttaccccacagcccagcactatccctgactagggtcccatcttggttctccatgcttgtttaggtcctcaggcaggctcagctttggtgggaaagagacagggtgttttgggaggcctgggcgagtggcacctctaaccaatctgctaggccctcacctctcagtctcactgagacactccattaattggaagcagacccaaaattgcttcacagactgaaggtgataattgtctacagccagctgaagcagctgcatctcctggaggactttgatctcctgcagctaaagggaaagacaggatgctgagacagggcctgcagcatacacataactataattcagaatgtaatatatacacacacacgaaaatataatcagaaagtgatataatcttatatgcaaggttaaatacaaatgtctctcaggcagggccaggcccccagcacagggaggactcgcctgaaaacgctgcaggcaaaaacctgtcacccttgcctcattcagcccagtgtctgattacatcttctgtcacttaggattgaaacgggtggggcctggagccctagccaatcagtggcgccagcgtgaaactgtccaatcaagtgcgcagctacagaggaagaggcggcctcttcaatatggcggggcctttgtctcctagcttccgggctctgatcctagttcgcgtctccactgttccatctcctccgttcctggagttcctcggtgactctactatagcttctgttatcctgtgacctgcaggtactgggagatccatagggaggacggcggaacatctggaggctgggaaatggtgagtgcgtggagtgggtgtcccgagaatggggaagaggctgtttgaatccggccggaa

SEQ ID NO: 38279 - DNA, 2300 bp, Homo sapien
aatatttcaaaagatagagaaagagggaattttctaagtcattctatgaagcccatatcaccccaataccaaaaccagaaaagaacataaccaaataagcaaactacagaccaatattcttgatgaatgtagacacaaaaattcttaacaaaatattagctaacttaattcaacagcatatcaaaaagataatccaccataatcatgaaggttttatatcagaaacgcaggtattatttaacatatgcaagtcaataaatgtgatacaccacatcaacagaattaaaaacaaaaatcacataattaatagatgcagaaaaatcatttgacaaaatttagcatcactttataattaaaaccttcagcaaaactggcatacatgggacatacctcaatgtaataaaagccatttatgacaaccacacactcaacataatactgaatgagaaaaagttgaaaacattctttgagaactggaacaagacaaggatgtctactctcaccatttctctttaacatagtactggaagtcctagccagagcagacaggaagaagaaataaaaggtatccaaagcagcaaagagaaagttaaactgttgctgtttgctgatgatatggtcagatacctagagaaccctaaagactcttccaaaaagtttctagaagtgataaatgaattcaatgaagtttcaggatacaaaattaatgtacacaaattagtagctctgctatataccaacagcgaccaaactgagaatcaaatcaagaatgcgacactttttataatagctgcaaaaaaacaaacaaaaaaaacttagaaatatacctaaacaaaaacatgaaataccttacaagaaaaattacaaaaccctgctgagagaaatcacagatgacacaaacaaatgacaacacatcccattctcatggatgggtagaatcaatattgtgaaaatgactatactgccaaaagcaatataaaaattcaatgcagttcccatgaaaatatcaacatcattcttcacagaactagaacaatcataaaattcatacagaaccaaaaaggagctcacatagtgaaagcaagactgaacaaaaagaacaatctggaggcatcatattgcctgacagcaaactatactataaacccatagtcaccaaaacagcactgtactgttataaaaataggcacacagaccaatagaacagaataaagaacccagaaataaacccaaatacttacagtaaactgatttttgacaaggcaaacaaaaacataaagtgcggaaaggacaccctattcaagaaataatgctgggataattggcaagccacatgtagaagaataaaactgaaaactcatctctcaccttatacaaaaatcaactcaagagggacaaaagacataaatctaagacgtgaaactataaaaattctagaagataacattgaaaaatttttctagacattggcttactcaaagactttatgaccaagaatctaaaagaaaatgcaacaaaaacaaagataaatagatggggcttaattaaactgaacaccttctgaaaagcaaaataaataatcagccgagttaacagataacccacagagtgagagaaaatcttcacaatctatacatctgacaaaagactaatatctatacatctgacaaaagactaatatccagaatctacagaaaactcatacgaatccgcaaaaaaaaaaaaaaaaaaaaaaaatccatgaaaaagtgggctaagaacataaacagacaattctcaaaagaagatatacaaatggccaacaggcatatggaaacatgctcaatatacctaattatcagagaagtgcaaatcaaaaccacaatgtgataccacctcactcctgcaataatgatcataatcaaaaaataaaaaaataggacatgttgccagggatgtggtgaaaaaggaatgattttacacttttggtgtgaatgtaaactagcccaactactatgaaaaacagtgtgaaaattttttaaagaacttaaagtagatcttctgtttgatccagcaatcccactactaggtatctatccagaggaaaagaagtcattatatgaaaaaaaatacttacacacacgtttattgtctatgtgcctatttgtatatccgcaccatgctgttttggtgacaatagccttatagtcaatatagacaatagccttatagtttgaagtaaggtaatgtgatgcctccagatttgttctttttgcttagtcttgctttggctatgtgggctctaagagaatacaattttg

SEQ ID NO: 38280 - DNA, 2300 bp, Homo sapien
actgcgaattacctgatgattacttctacttgatttctaattttttttacatttactgaatttgaagaatattatttaatgtgaacactctggtgttttctaaggtatacttcttagaacaaatggtttttctctatttattatattattcatagggtctgtctaaaatacaaatttcctaaagttgaagaaagtgtcaacaactgattgagggtttctctccagtataaattctcctgtgtacaataagatataagtgaagatattaaactcaacttttcaaaatcaggaaatgtaacattaaaaaatgaggtgaatcttaataacataaataaagtatacaatcacaaaaaacagatactgtccgaatccacttacatgagatagctagaaacagaaaccaaaatgatattttgaaaaagataaataataggaaattgggcagttgtttcaggggtattgagttttgtttagaagataaaaatgttttccgagcgtggtggctcatgcctgtaatcccagcactttgggaggccaaggtgggcagatcacctgaggttgggagtttgagacaaccctgaccaacatggagaaaccccatctctactaaaaatacaaaattagccaggtttggtggcacatgcctgtaatcccagctattcgggaggctgaggcactagaatcacttgaacccgggaggtagaggttgcagtgagttgagatcacgccattgcactccagcctgggtgacaagagcaaaactctgtctcaaaaaagaaaaaaagaaaaagaaagaccagggagggatctgtagacatagagcattcttcttctgtggccccatcgtcctttgttcactgtctgatctctggaagaaaggtgggcaacaggtggtcttcctgttgttattttattcctgctgtcctctgctctttctatggccactatctgttctacccttggaactgaagagagatgttggtagggaaagactttccccttatttatggcaggaaaaggatgttcaagcccagtgtggtggctcatggctgtaatcccagcactttgggaggatgagacagaaggattacttaaggtcaggggtttgagtccagcctggctgacatggcaaaattccatttctactaaaaatacaaaaataagccaggcatggtggcacatgcctgtaatcacagctactctggggaaaataaggcaggagaattgcttgaatccggaatgtggagattgcagtgagccgagattgcaccactgcactccagcctggacataagagcaagactctgtttgaaaagaaaagaagagaagagaaaggaaaagaaagaaaagaagagaagagaaaggaaataaaaagaaaggaagaaaagaaaagaaaaaagaaaagggatgttcaggatttcatcttctgccatcagagctgcacttcaatgtggcagctattggccacctgtggctactgggtgcatggaatgtggctggtctgaactgcgatgtggtagaaaggtaaaatacatagttttaattttttttccaaaatatatatactttgttaataattacatactggtcacatattaaaatgataatattttggatatattgggttaattaaatttctacaatgaattcctcctgtttttttttctttttaaaattttccttctagaaaatttagaattcacgtggctcacattcaatttcagaggactgcctttttaaaaaaaaatgtcaggctacccgctcaaaggacaagaagccaggagctcataaaattggaaaattttaaataattgttattgcattattttcatgtgtgaatagccacataatatattatttataaaggcatacgaccttatacgcagggttatatgcaaatactctctggtgtgagcctggtccgttcagggaggaagcccttccctgagaaccctgcagcttggatttcactctttctacgttcagcccagccgctgagcacatattctgtcactcagggcattagggggtggcgccctaaacattatccaatcagggacgcggggctgggacccgtccaatcaggcacgcagctggagcggacaggacggcttccgggatttggcggggcctttgtctctagctgctgcgggagctccaggtctagtctttactgctctgtgtattctgctcctagaggcccagcctctgtgactccgttatctgcaggtattgggagatgcacagctaagatgccaggaccacctggaagcctagaaatggtgagagtgcggtccgac

SEQ ID NO: 38281 - DNA, 2300 bp, Homo sapien
agagttctataagccacatatatccaaaaacaaagcaaaacaaaacaaaaagctgaaaaacagaatgattctgattgcacaaatggtagcaattttttgttctccctgttccatgctcattgccaggtgcttttacaggtgttcccatggagatccagaatctgttttccaaaccccagatctggctggccttatttgttcggggtggtagacacctgtgaacatgacagtgtgctagtttgaggcctaggctcaagtggttttaaatgcttctaattgttttttagaatgctgccatctccatgaaaaaagcccatgttcgccagctggaggataagatacaacagggaggagaagcaaggtgccccttgttgacaatcccagaagcagaagctcatgcccagaagcacagctgcctagttgacaggctcagctgagaccagaagaatggccccaccaagcccagcctaaatggctgaccatcacaattatgagctaagaagttttggatggtttgttatgctgtaagagctaactaatacgtgcacccagtgcagataggatgccaaaaattaatggcaagttgattactaattacgttctaacagtgggcaccctaaaagtgctgacttttttcccctgatttaaagttagatgttttgtaatactgagaaatgaataaatacatgtagacatgtgtgcatgtgattggtgcttatactcacacatttccataaaccacaggagaaaacagataaccacagcctgaccattagggccaaggccaaatggcaaaataagtttacctttaatctgttttctctatatttatacactggaggtcaagactgtggacatatctgaagacatagagttttcttctcctgtggacccatcatcctttgtttactgtctgatctctggaacaaaaatggaaaacacgttggcagcagtggtctacctggggttattttatttctgctggcctctgttctttcttttttttctttcttttttttggagacagagtcttgctctgttacctgggctggagtgtagtggcatgatctcgctcactagaacctccacctccagggctcaagcaattctcctgcctcagcctcccaagtaattgggattacaggcacctgccaccatgcccatctaatttttgtacttttagtagagatggggtttcgccgtgatagccaggctggtctcgaactcctgacctcaagtgattcacccgcctcagcctcccaaagtgctgggattataggcatgagctgccgtgtccggctgccctctgctctttctatggtcactatcttttgcacccttggaacgaaagagagatgttggtaggaagaggctcttcctttacctctggcagaaaagggattttcaggccgtttgcccaccctgacatcacagctgcacttcaatgtgacagttattgggtatatgttgcttctgggtgcttggaatgtggctggtctgaactgcgatatgctagaaagttagagtaaaaattatatatatttcattaataattacatattgctcacatattaaaatgatagtatgttggatatattgggttaattaaatggttaccgtttattccacctgttgcttctttcttcttaaaatttgactactagaaaatttagtattcacatgtggcccacattttatttcagaggattgccttctttttaaaatctcaggctgcctgctcaaaggaccagaagccgggaaggtaataaaatctggaatttaaaaataattgttattacattatcttcacttgtgaatagccatataatatattatttataaatgcacatatgatcttttacacatggttaaatgcaaatgccctctgaggcaggcctggctcagctcagggaggaagccctgcctgaaaaagctgcaactctattttcattcagccctgcacctgagcacgtcttctgtcactcagggcctaaaggggtatggtgttaaacgttatccaatcagggactctgggctgggatccatccaatcaggcacgcagctggagtggacaggacggctttcgagatttggcgcggcctttgtctctggctgcagtcgtagctccaggtcttttcttctctgttctgtgtcttctgctcctagaggcccagcttctgtgtccctgtgacctgtaggtattgggagatccacagctaagatgccaggaccccctgggaagcctagaaaaatggtgagtctgctgggtcagacaccccgagagagggggaggggctggt

SEQ ID NO: 38282 - DNA, 2300 bp, Homo sapien
agtgcaatggagcgatcttggctcactgcaacctctgcctcccaggttcaagccattctccattctccagcctcagcctcctgagtagctcagattacaggcgctcaccaccatgcccagttaatttttgtatttttagtagagacagggtttcatcatgttggccaggatggtctccatctcttgacctggtgatctgcccgcctccccctgcctgtttatcactcttttgcatgctgcattgacactctatagcatccaaaagtttggggtgtaaaaaaaagacacttttaaagcaaaatttgatgttgggaagcctgtcaaatatgtcatagggttaaaacacttcactaaaataggaccacagatcaccataaaataatagtcatttatttatccaaagtgataattaaaagattttaaaaacaaaatcatttactgtttgatacaggagattcagttttccagtcaaaaaacctgagaaagactgcatgagaaaaattctcttttttactttctttattttaaaatttattcaaaaggtggacaaaaatattgtactatgtcatattgatatgtaaaatttttgttcaaaagaaaatcaacttttacttttgtattactgtattattaatactaaagctaactttaataaaaccttataaataaatccatcaaatgtgtcatttttggctactgtagattttcataaatattttatagtctattataataaatttttcaactttttatattatatttttggttttttcttttttcaatttgaaacaatcattaagtaatttcaaactagataaaatgtttctaactttcttccttaaaagcatattttacttttgtttatacattctctatgcagaattgtttttcatacatctagtagttttaattatatacatattaattacattaattcttaacaaccttaggttattttattcctgctgtcctctgctctttttatggccacggtctgttccacctcagaactgaagagagatgttggtagggagaggctcttccctcacctctggcagaaaaggaatgttcaggcccttcaaacccctgttgtcaaagctgcactttaatgtgacagctattggccatgtatggctactgggtgtccggaatgtggctggtcagaactgcgatgtgctagaaaggtaaaatacagagttaaagatttagttccaaaaatatacacactttattaataattacatattgctcagatattaatataatatttttgatatagtgggttaattaaatggttagaatgaattccacctgtttcttcttccttcctttttttttttttttttttttgagacggagtctcactccgtcgtccaggctggagtgcagtggcactatctcggttcactgcaagctctgcctcctgggttcacaccattctcctgcctcagcctcccgagtagctgggactacaggcccccgccaccgcgccgggctaattttttgtatttttagtagagacggggtttcaccgtgttagccaggatggtctcgatctcctgacctcgtgatccgcccaccacggcctcccaaagtgctgggattacaggcgtgagccaccgcgcctggccttcttcttccttcttgaagtttgactgctagaaaatttagaatacacatgtggctcacgttttatttcagaggattgcctcctttttaaactctcaatcggcctgctcaaaggaccagaattcagaaagggcataaaatctggaattttaaaataattgttatattattttcatgtgtgaatagccacataatatattatttataaatgcatatgactttatatacaggttaaatgcaaatgccttctggggtggacctggctcaactcagggaggagccctgcctgaaaaggctgcagcttaggtttcactttatcttcttccagcccagcatctgagcacagcttctgtcactcagggcctgagggagcagggcagcaaacgttatccaatcaggactgctgggctgggaaccgtccaatcaggcacgcagctggagcggacaggacggcttccgggatttggcggggcctttgtctctggctgcagccggagctcctgctctcctcctcactgctcagtgtcctctgctcctagaggcccagcctctgtgtccctgtgacctgcagatattgggagatccacagctaagacgccgggactccctggaaacctagaaatggtgagagtgctgggtccgacatcccgagagagggggaggggctggtt

SEQ ID NO: 38283 - DNA, 2300 bp, Homo sapien
gatgaaagaggaaccttactttgtgttatggtgtagtctggattgaagagacgacccaagcaggctttgtgtgagcagtgaggctatttattcacttgggtgcgagctcacacgaagcctgcttgggttttctcttcaatccagactgtgccataacacacatttgatgctgaaatccgggataggggaactcctttgggagtcgtgtcccttaaccccttcccccgacttcttgaagagacccacccgcgacctcggtacctcggaccagctctgtaaaagccccgcctctgccttcggataggtaagagacctccatcctttctcaaactttccttttcttagagaggagaggacactcactgtctgtgtttcctaaatctaacattggtcatggattatctctgggaagacaggcttccctaggtgactggtcaaccacagggacatgtgccttggccactcatccactgcacaacccagatggggacacctgctgaaggtccttgtggttgctctcctcctcgtttctctctccctgtctctctgtttcttcagtcctccgctgttcattatgggcacccttccaccctccattcctcctccttgtcctttggactgtgtccttaggaatctaaaaccgctccgtctttcacctgatttggaacctaaacatctcattttcttctgtaatatggcctggccccaatataaattagacagtggctctcagtggccagaaaatggcactttcaatttctctattttgtgggacttagacaacttttgtcacaaaatgggcaaatggtttgaggttccatacatccaggcatgttttacacttcggtccctccccagcccttgttcccaatgcaatttgtctcaaattctccttctgtcccgcccatctgctcccctaccaccctctggcgacagcgagtccttcttgtccacagacccttccgatatttctcctccctgcccgtccgactccggtcccaacccttctccagaccccagtcccccttctacccataccatgcctccctatatcccttctgtccctactctgccccatacccgaactggctgacaatttggtcccacttctaatccccctcctcccaccccactatttcccctttgagaggtggctggagctgaagggatagtccgagttcatgtttctttctccctgtctgacctgtctcaggtcagccagtgtttaggttcttttccataagactccactaaatatatccaggaatttcaatatttaactcagtcttataacctcacctggagtgacttaaatgtcatcctcacttctacactcactcctgaagaatgggagggtgtttgggccctagctcagtcctatgcaggtgaccactggcgccttgagccaggtctccagggaggtcccccgtgaggacccccagtggaactatcaaacaggatctcctggtatggccgggcgagattatatgatcacttgcttagtagagggactccaaaaagctgcgtataaggctgtcaattatgataagttaaaagaaatcactcagggcaaggacgaaaatccagcccagtttgtggcccatctggccataaatccagctttagaccctgaagggccaggggccagaaggccgactcatgcattttattacccagtcagctcccgacattagaaaaaaacttcaaaaattagagtctggccctcaaaccccacaacaggatttaattaaccttgcctttaaggtgttcagtaacagggaagaggctacctggtggcagcgtgtttctgaattacagatgcttgcctccgccgtaagacgaaccccagccacaccaatggcctgtagggatttcaaggcatccagaccgcagcgcccagcagcccctccagggccatgcttcaagtgccataaaaatagtcactgggccaaggaatgcctgcagcctggggttcctcctaagccatgccctgtttgtgcaggccctcactggaagtcagactgtccaactcaagctgccatccctagagctcctggagcttaaccccacagccccctggctgactccttctctgatctcctcggcttggcggctgaggaatgacactgcccgaacacctcggaggccccatggaccatcatggacctcgggtaactcttaaggtggagggtaagtccatcccctttttgatcgatatgggggccactcactccaccctgccctcctttcagggacctgtctccctagcctccatgactgttgtgggaattgacggcaaa

SEQ ID NO: 38284 - DNA, 2300 bp, Homo sapien
ctttgattttctcaactcatccctcatctatctttttccacatatgctatgtccttttgaaatgctcctgcaacttttttcttttctgtttcttttcttttctttttttttttttggagaaaggatcacactctcaccacccaggctgaagtgcagtgtcgtaaccaatcatggctcactgcagcctcgaccttccaggctcaagtaatcctcttgcctctgccacctgagtagctgggactacaggattgcctcatgctggctaatttttatttttatttatttttattttttattttttttgagacggagtctcgctctgtcacccaggctggagtgcagtggtgggatcttggctcactgcaagccccatctcgtgggttcatgccattctcctgcctcagcctcccgagcagctgggactgtatttttagtagagacggggtttcaccgtgttagccaggatggtctcgatctcctgacctcgtgatctgccctcctcggcctcccaaagtgctgggattacaggcatgagccaccgcgcccggccatgactggctaattaaaaaaaaaaaaattttcatgcacataggatcttaactatgttattcaggctgcacttgaactcctgagcgcaagtgattctcccatctcagcttgccaaagtgctaggattatagatgtgagctaccgtgtgcttcttcaatttcttaagattatttctagcaataataataaacagtgctatatgggcacaaatctaaaagaaatctggcttctattttagaagtgtcactctccaggatttcaagggtcaaatggagttaattctgagtcccagcccagccacttaatagctgtgggtctttgcacaaatttttttttttttgatgtggaagagttatataaaccacatatgcaaaaaaaggcagaatgatactgattgcaaaaatgttagcaatttttcatccctccgctatccatgcccattgccaggtgcatttacagctgtttccattgagatccagttctgttttccaaaccctagatctggctggccttatttgctcagggcagtaaaaacctgtgaacagtgcagtgtgctagtttgaggcgtaggctcaaatggttttgcatgcttctgtttttctttcagaaggctactatctccgcgaaaaaagcccatgttagccagatggaagataaaatagtatggggaggagaagcaagttgcctctgttgacagcctcagaagcagaagctcacccccagaagcacagctgcctagtcaacaagcagctgatgatacatgtctgaaggaactcagctgaggtcacaagaatggtctcactgagcccagcctaaatgactaaccatctcaattagagtgaattccacctgtttattcttaaagtttgactactagaaaatttggaattcacatgtgctctgtaatcccagcactttgggaggccgaggcaggtggatcacctgaggtcaggagttcgagatcagcctgaccaacatggcaaaattctgtctctattaaatatacaaaaagtagccgggcgtggaggcgggtgcctgtaatcccaattactcaggaggctaaggcaggagaatcacttgagcccgagatgcggagtttggggtgagccgaaatcgtgccactgtgcttgagcctgggtgagagtgagactctgtctcaaaaaaaaaaaagaaaaaaatctcaggctgcctgctcaaaggaccagaagccagtacggttataaaatctggaatttaaaaataattgttatattcagatgtgaatagctatatgttatttataaatgcatacgaccttatacacaaggttaaatgcaaatgccctctggggtgggcctgactcagctcagggaggaagcccttctggaaaaggctgctgcttaggtttaactctgtcttccttcagcccagcacctgagcacatctgtcactcagggcctgagggggcgggttgttaaacgttatccaatcagggacgccgggctgggaacggtccaatcaggcacccagctggagcggacatgacgtcttccgggaggcggcggggtctttgtctcgctgcagcgggtgctgcaggtctggccttcacttttctgcgtcctcttactcctagaggcccagcctctgtggcgctgtgatctggttattgggagattcacagctaagacgccaggatcccccggaagcctagaaatggtgagagtgctgggtccgacatcccgagagagggggagggagctggttggaaccgg

SEQ ID NO: 38285 - DNA, 2300 bp, Homo sapien
caaagccaaaaatgttgggtcaaaaataaaaagtagcattggatgagagggtgttgggcataatggttaagattgaaacgccgtatcaggtggttccttgtttcattccagttttgccatttatggactatatgacatgaatacagtttcttgatctctctgtgcttgactcttcagctctttactgcctaaatcatagggttttggtaaaattaaagcagttaatacaaataaatgtgcccaataagtccccagcacatagcaagtgtacaggaaatttattcactcttatttattgattcttttagatcatgattaatgttaaacctaaaaacaaggtggccacatcagtggtttgtaacccatgtttcttctagtcagtctgggggtataatagtagttgaatgttttaaatactatccttttaaaaatatatatattaatagcatttttcattcaccagagttctgtacattatggggtacaatgagatatttgaatatatgtatatagtatgaaatgattttgtcgagttaaataacaacttgcttacctatcatttttttgtggtgagacacttgaaatttactcttagttattctgaaatatacaatacattattgtttactatagtcaccctgctgtgcaatagaactcaaaacctatttatcctgtctatttgaaactttgtattttttgatcaacccctctctgtttccttcccaccacacccagcctctggtaaagattattccactttgtacttttttgagttaaactttattcttttttttatacaacagcaatttaaaaaattaagtatttatttgaataacaagtttaagtttgggctgcaatgttggcaatgcaggtttttaacacagatcacaaaaagcgtgcacaaaaatgtacgagcgcaaaggacaaaataatgctaagaattacgctaaatagctgctgattttaagaaaacaaaaggcctgaaatcactatacaaaatataaaatgtattaaacactaccatccacagaacagtctttattattgattatatttaaaaattatttgcgtaattatatattgaattgtaaatgagtattatacatgaacctccatttggaaggcaattccttgtagcactataaaatacctaattacattgcaaaaagtatcctttttttgctatcgataaagaaaacagttaatggtattactgtaaatgtcaggaagcctccaaaaaaagaaataagatttcttttttgtcttcaaagtgttttccaagcagtgaagcacttgccgtgttgaactgaatgcactactggagaatgttctgggtccaagatgctcttgagagaagactaggcttttcaaatcaaacactcaaaggaatcatgcaaccctcttatgactgggatgccgtcatgtgccactgaccaatgctatctctccagaaaaccattcaagactcttaaaaaatcagacttataataaatatacataaaatgaagacaccaactgctctttgacatgactacgataatgtctgtgctatgtggaagcacatttaaaaagagcctattcggcaaaaggtaagtgtctaaagattcaaaatgtatcaacagtattggataacaatataattctcaactcagaagctgcctcaagattaggtgcatcttcagttaatgtgacaggaaaaaaaggcatggattttattttattaattgtatccacttacaaactgacctaaggtcacctgatatgtagatacagtgagatttttgttgcttatagtctttaattgaagcgatgataaaggaaatagatctatttaaaaacaaaaccaaacagctatttctgcttagattaagaggtggccccgggtgtgggattcacattttgagtggccacttgtggtgcaatctcgatgatcaggggtttgtctatgattctggctgtgtggttgcccttctctacaatcccaataatccatgcttggtggtcttcaccatatttgggggactttatctctgcacagaaccgagctgtttgctcacatggtaaacagatcagaagcccgcctgtcctgttgagcctcgccatgttcatcatcacctcctcgtaggccagctctacatcttcttgggtgaccactagtttaatattattccatttcttaggaatatccagccactgatgcacagccactgccccctgtgtccccaggggttttgtcaacaccagcacatcccctggtactgcattgtctggcatgataaattcactgggctgacagacag

SEQ ID NO: 38286 - DNA, 2300 bp, Homo sapien
actctagtctgtcttctctgtgggatccacgggatagtcccatgaccctaggagagggcagcggcgaaccagcctgaagaaacctcaagcggagccccagggatacaccgcaaaatccctaaggatggggtcccgcaccttcacctgcaaaaaaaggtgcagactgatgacacagaaggtgcttccaactccatccttacattcgcttcattacacaatctgtccacaccatggcccggtgcccaggtgggaggactccaaagtgcggggaacagttggaaacagtcggagtgcaaactgcagcctttccggccagctcctgatttggggtttcattcccagagccccttgaatccacctccaattcagttcccagccgagtaggtgcttcacgtcgtgaggcgggcactcttccatcttctggggatttcattctgggacggagagtgtgagcagcagtaaggtcagatgggggtgaggatacagtctggtgaaatgtggtttgggtcccgcatcttcacctgcaaaaatggtgcagagagatgacacaagaggtgcttccaactccacccccgcattcccttcattgcacaagctgtccacgccatgacccggcgcccaggtgggaggactccaacgtgcggggaacagttggagctcaaaccccggccattctggccaactcacgatttgggctttcattcccggggccacatgaaagtgggatagattgatgctgggtgagatgtggcctccacactgacatcctcttatcctgacttccatgttcctcatgggcctagggtttcctgggtctggctcaaagtcgtccacagtaaacgtttcccagttcacggaggacgaccctcatggggatccattgcatgagtgtttccttctaaacactgtcatgttttaatgactgggcagctgtgatattttggagccataaattcccgttatatccaccaacaaggaaactgttgttctcccacttctattggagggctgcatgactcctgtaggatgagaagtaggcagccatgtctggcttttgactggtaatctaggccctgtttcatttcatctgcacgtcctttctaattgtgaagaaggtctctcattgggctgttgctgggtgggacagcctctgtatacggtatttggctgccacggatttcaggaagcaacagggacttggagtaggctggctgcactctaggttgtgaatagtggcctccttgtgggcgctgggattgtttgcactttgaggaggctctcgggttttctggcaggaatccttgaacgggaggcttgggctccagcacaagccctcttgtcctcccaggctagccttgattttccttagctttcatgggggggggtccacaatgcccctcaacagcactcctggacacccttttcaggattgcaatcgccccatatggcctctgagacactctctcaacctcatctgcccccatgggatgccagttacaggtgtgagacctctgctccactttggacttgcctttgtcgtggttcctgccttttccagatagcagtgctgagaagcagaagccccttggaggcccaggatgaagggagtcagtgagctcaagggcctggcattcttctgctgacaccctcctctgggatctcaggtatgattccatcacccggatacccctcaacatctcaccagactgtatacccatccttctgggacctgattcctgcacacagcctctttggggaaaggagtcagaagaacagtttccagcgcccaacttacagtctcgaaacgcctcctcctccagcgggatgaaccacggagacgccccaaagaggctgtactgtcgagacttctagggtcccacagtgggttgtcgcaggcagcctttttctttagatcagaccggctatgcccgtactattttcccctgcttaggcaggctgacatccctgacagctgggcgcccgagccggcctcgcgaatgcacatacgccagttgcggggcaccaggcacgagtggtgagctgcggctgtcgtcacagtgaacgccaccgttgcctggccacgggtccctgcggcttggcaaaccagtagacttctgtggacgtgcatcgccgctggactctcacccgtcttctctgagagatccacgggatagtcccctgatcctagaattgggcagggccgacccagggtgaagaaacctcaagcggactcccagggctgcagatcgaaatccctaaggatcccaggggacccgcaggatgtgtcaggcatgcctagg

SEQ ID NO: 38287 - DNA, 2300 bp, Homo sapien
ctccccaggaggggcttcctggcgaagcagaaccgcgctgcctcagaaactgccgggctgggtgtttctgcgggagtgttgggagtgttggctgcccgcgtgtgatggcggctgtgtgtgtgtgtgtctgtgtgcctgtatgtggcgtcaactgaaaggaatatggctgaagcactgcagccctttttttttcgagtcgccccaccttctggaagcctctctgtgcgaaagggcttgggctgcggggctccgtgtcctttactttttctgtggttactgaatccgctataaattggcgggctagctgagatgcgacgggccccaaattatatccccatgcaaagcagcaactcttctagaaagcagaggagcacactacacccaagaacagaaacccccgagtgcctccttttcctgtggccaacccagggccagaccccagcagtcctgtgcccaggactccttgaatccgcctcgattttggttctcaatcgagcaggcacttcacgtcgtgaggcgggcactcctccatcgtctcgggatttcattccggggacggagagtgtgagctgcagttaggtcagatggggtgaggatgcaatctggtgaggtgtggatggggtcccgcaccttcatctgctaaacaggtgcggacagatgatacagaaggtgcttccaaatccacccccgcattcccttcgtccacaggccgtccaaaccatagcccagtgcccagctgggaggattccaacctgccagggaacagttggagtgcaaacccaggccattctggccagctcccgatttccgcagtcattccgggagccacaggggagtgggatggactgaggctgggtgggatgtggccggcacaccagcctcctcttttcctgacttccatgtttctcgtgggcctagggtttcctgggtctggctcaaaggcttccacaggaaacgattccctgtccacggaggacgaccctcatggggacaattgaatgagtgtttccttctaaacactgtcacggtttaagcactaggctgctgtgatacttttggaagggtaaattcccgttacatccgccaacaaggaagctctggttttcccacttctatcagagggctgcatgattcctgtaggatgagaagcaggcaacagtgtctggcttttgccgggtaatctaggctctgtttcatttcatctgcacatccactgtccttgtgggggggctgttgctgggtgggacttcctctcaccccagatcttggctgccagggacttcagggggcacaagggacttggagtaggctgacttcactccaggtcatgggtcgtggtctctttgtgggggctggggttgtttgaactctgcgggaggctcttgggtcctctggcaaggatccgtgagcttgacttggactccagcccaaaccctctagttctgccaggcgagtcttgattttcttgtgctttcacgggggatccacagtgcccctcagcagcactcgtggacacccatttcagtcttgcaatcgctgtagacggactctgagacactctctgatcctcacgtgcccccgtgggatgccagttccaggggtgagacctcttctccaccgtgtcctttcctttgtcgtggttcctgcttctcccagattgcccgtgggtgctgagaagggggagcccctaaacggcccgggatgaagggaggccgtgagctcaagggccccgcaatcttccgctgacaccctcctctggggtcgcaggtatgaatccatcacccggagacccctcaacaactcaccagactgcattcccaaccccctgggacccgattcctgcacacagcctttttcgggaagggagtcccaagagcagctttcagcgcccacctcacggtctccaatcgcctcctcctccagggggagccgaccacggagacgccccaggaggccctgtggtcgagacttttatagtcccgcaatggtagtcgcaggcagcccttttcctgaccaggccgtctctgcctgcaccattgtccttgcttaggcgggctgacagccccgacagcctggcgcccgaggcagcctcacgaatgcgcatgtgccagtggcggggcacaaggcgccagcggcgagcactggcttgcttcacagtgaacgccttcgttgcctggcgactagtccctgcggcttagcggagagggggcgtcggcgttgggctctcgcctgtcttctctggggggatcctcgggatactcccacgatctaggacagggcaggggcgagccagcctgagg

SEQ ID NO: 38288 - DNA, 2300 bp, Homo sapien
tttgtctatgaaagaggatactctgatttctcccaaatgataagtttaaattttgttgcaatatccagtgatttcttttcactggaaggaaaggaggcatgcagttttatttctgtcagcctgctcagggccacagaggtgtggacacctaggagccagggtcattttctgaggacaatgagagtcattgaaaggcacaagtaggtgagggatggattgggctgctggtttgaaagtgcaacatggagcttcctaaggcacaggcagcttggaggcagagaggccagtgagaggcaggagcagcagcccaggctgtcaccaaggaggggacaatgtggtaaaaatggagaaatgcacatgggtctgaaaggtttagataaatgtggatttcagcacctcctctcccacaccccacttatcagctgtgaacctggggcaaggcactcttttctgtgtctttatgacttagctgaggtgaccactaagtaggaaaagtgcctggctggtgatacataataagtagctgcaagtggtagctttcttccctacccacttgaagcagaaattggtgaccagtttttctctctgagtcatccagctggcaccagagaaattctgatgctgcttgttcagacagggccacaacgatgtctgggtgacatggcaaatctgatccttggaccagtttggaaaagatggggaaggagacagagccagaaaaactgggccagatgcctggattccaatcatacccaggcctaggcccctctggttctggctgtgctgtgcctgtctgggtcctgagccaagtgatacttggttcttacccacaggaaggtcaccatagaccaaggaaaactcacaaatacaaatacaccatcttctcatgctgaggctttattaagccccagtggctactctgggagagaggtgccattgtctccattttaaagataaggaaaccacagcttacagagagatatggccagagttgtccagcctcggagtgactgaggcagaaccaaagtcataacttgtccagctgcaaggcttgagttttcagcctagcccagaagacatcatcctgcccaggcctggctgcaacctcacccacctgtgactcatttctgggaccactggcagaaagaggaggctctattttgagcaatggggagcccaggccaagcacagccatctgcccctgcagaaatgagtggggctgaaagcttcatggtttccaggttttcatatctaccctgagccaacaaaggcttgtggctgttggcacacaggcaaattgtccaacctccagatggagcagagcaacggtgaaggaagcctgctggttcttgtctcacctcagccacttctgagctctgtagccttgcaccagcctttgccccatcactgagcctgttttctgccttacaatggggacactgatacaaaccacacacacaatgaggatgaaaacagataacaggtaaaatgacctcacctgccagggagtccatgctcagaggactctcatgctcttggatggaatatttcctcagagaaatagagcttgggggtcagggacatgggacctgccactgacctgctctgtgactctgagacagtggcttccactctctgagctcagatccccactgggcaggctgctctgatcttctatgtccctgtgttgggaagggagttcgtcctccccagcttgtcagggaacccttggccatggctgagggcaatctggccccagtgccctggcttattggaacagcaggaaaaggcaaacacaaaacccagaccgcagctgatcacggaacctgctctccttgacccacaaggatttgttgtgatccagccagcctgtgactctgtccacatgctgctcctctgcagggatgctgctgttcactcctactctactgagacacgcagatgtcctggcatgggagaattccctctctctctctctcacacacacacacacacacacacacacacacacccctaacctgcttcctccaggctcctaaatcacctgtccacaaaacctgtcttcagcggccccttagcctgtgagctgccctcattccccctcacagccctgagtgagggtgtgcagcctccttgggcaagaggatgcgggctctgggaggctgcgtcgcacatctccagtccccactgcagggcctctcaccggctggggcagtgacccctggtcggaagcacctcagtgctgctcatgattgcagaggtggcctcaccagatagagggtcctggagggcgtgggggc

SEQ ID NO: 38289 - DNA, 2300 bp, Homo sapien
ccatcacacctggctaatttttgtatttttagtagagatgaggttttaccatgttggccaggctggtctcgaactcctgacctcaggtgatctacctgcctcagcctcccaaagtgctgggattacaggcatgagctaccgtgcccggcgctggtatgctttttcacaataacttcaattctagaagggtacccactggtctttatggggtttctgtaacggatactgtaaccctatgccaccggaatggtgcagacatgctgattttattagaatgagttcagccttcttggtagactattggtatcccagaggctgaccattcactgcagcttattaaatgtagctccatgatgccaatgagtcctttcagccaggttgcctttttcttctcattgatgtagtcaggtcgtgatctcttttgcttgtcttatgctattccagatgataggtgattatttcttccgtaagtgagaccctcttttcttttctctgccatgggatcctcctatgatgtgtctctttctcttaaaagcacttgtaatcccagcactttgggaggccgaggcgggcggatcacatgaggttgggagttcgagaccagcctgaccaacatggagaaaggccgtctctactaaaaatacaaaattagccgggcacgatggcacatgccggtaatctcagctactcgggaggctgaggtgggagaatcgcttgaacccggaggtggaggttgcggtgagcccacattgtgcgagtgaaactccttctcaaaaagcaccgctgcttcgggcgcggtggctcacgcctgtaatcctagcactactttgggaggccaaggcgggcagatcacttgaggtcatgtataatattatacataatattatatattattatacatattttatattattatatacaataatatatattacatgaaaaattacatactgctcacatattaaaataatattttgaatattagaatatttgaattctagaactagaatatataacgatgaaattgttacaataaattccacctgtttcttccttttttttttaagtttggctactagaatatttaaaattcacatgtggcttacattttatttcagagaattaactccgttttaaaatctcaggctgcctgcttaaaggaccagaagctaggaaggtcgtaaaatcggatattaaataatgttattatattttttccatttgttaatagccatataattgtgaacctcaaatatctgagacagatctcagttaatttagaaagtttattctgaggccaggcgcggtggctcacgcctgtaatcccagcactttgggaagccgaggcgggtggatcacctgaggtcaggagttcaagaccagcctggacaaagtggtgaaaccccgtctttactaaaaatagaaaaattagccagctactctggaggctgaggcaggagaatcgcttgaaccccggagggaggtggaagttgcagtagcagagatcggatcgtgccactgcactccagcctggaagacagagcgagactccgaaagagacagagagagagaaagaaaaagaaagaaagaaaactggaagtggggaggcggcttccaggtcctaggtagataaaagacaaatggttgcattcttttgagttcctgattagcctgggaaaaggaggcaatcagatatgcaatcatctcagtgagcagaggggtgactttgaatagaatggaaggcaggtttgccctaagcagttcccagcttgacttttccctatagcttagtgattttggggccgcaaaatttattttcctttcacacactatactatttattaatataaatgcatatgaccttatacacaaggttaaatgcaaataccccgtgggtgggccgggctcagttcagggaggaagccctgactgaaaagcctgcagtttaggtttcattctatcttctttcagcccagcaactgagcacaccttctgtcattcagggcctgagggggcgggtccttaaacatcctccaatcagggacgctgggctgggacccgtccaatcaggcacgcagctggagcggacaggacggcttccgggatttggcggggcctttgtctctcgctgcagtcgcagctccaggtctcgtcttcactgctctatgtcctctgctcctagaggtccaccttctgtggccccgttacctgcaggtattgggagatccacagctaagacgccaggactccctggaagcctagaaatggtgagagtgccgggtcccagatcccgagagagg

SEQ ID NO: 38290 - DNA, 2300 bp, Homo sapien
aaatatattccattatagatctctcatttaatggctaggagaagagagagcagcagagatggaagagaatccttataaaattctgctgagaatatgacccctttcttcataatgctcacgtttctcatgctgagagtagctgtgcaatttgggtgtttagaaaaattgattagcagaatattttctggctgacttgatcaaacttatatctagcttgtgtttttaaaagatgcttttaactgtttttctctcaatacaatttttctcagagtgagagctgtttttctcttgaatgcttttggtttctgttttagaggccccattactatcccatggtgtctgtgaatgaggtgggctgtcacagagctcttagagctatctctgtctatctctgtgggtgtggtggtagcaggtaaacaggtggtgctgacacttttaaaagcatattctcagcatgcaggtgtaatttgtccatagaatctcatcttaaaaggaatcccagagaaacaggagaaagaggaagacatgacctttttttaagcttaatatgtctcagatagagagctgtgtccactctgcctcctggaatgccatgcatttagttcttgcaaacctttacttctctaattgtgttgtttctccctaatgagtttgtttcaactactttttaaaattcttatgatagtcaagggtctctgaaaaatattttttcctacataccagaggcttctctacatctctacatcacggctctttatatgccacgtagaaatctcattatgaatttataatctgcaacatgaaaaatgttccctctgtggctgttgaacatgggaaggtgtgactactcaagattcctattggggaaaagctagggtctttagtaaagaaggagaacatgtaacgttgaggtaccatctctgttctccattagctctatgcagaacacgattaataaaatgctttttcaaacagaatggcatttattacccagaaagttctgaaacaaattattaggagatagatacctgctctttagggtgctgaagaaaaactacttaaaatcactattaaaaattacagaacatatgaattatctgtatcttgaagtttccataaaactgattttttatggttaaattcaaactctaatttacttttgagatcaatatcgcagcagtgaagctgcatttttctgtgtgcatcagcacattacaaaaatttgtcctagtgcagttgatgttaatgattcaattggttaaagagctcttggacagatttctttactataattatttttctcttcattattaagtatctttatgctgctgatgtgcatgtaaaccatcacatttaatctggcagctgcctttctttcttaggttttctgtgcgtatatctgccttaggaaaatgaaagctgtcatccctttttacaggccagaaaaactgggaaaaacacaggctcacccacctactagatgtttgacaaaatactcttcttgggccaaaaacattgacattattggtgagctttttagaaatttagaatatcagactgttccagatcttctgaaaaaataatctgcattaacgagatctgaagtttatcatacacattaaaacttgcgaggtaccttttaactcaacatgtctttttcatctcaaaaatacacacaactcattctgtatgatgcagatatagcatttaaaaatagacatgttggcgtttatgccctaatttatactttattatccagaaaagtaccatatatacacagatgttgtggatcttcttataccactttcttttctcagggttagataatacattagaaaatatttctgtgttaaaaattcttttatggatagtttcattcactcctataagtcagaaccagttttctttactgttttattttaccttgaaatttaaaattatgcccatggccacttggtaaatgtatgtgattttgtgtatgtgtgtgtttttgtgtttttcagggaccattgacatttatggatgtggccatagaattctctttggaggagtggcaatgcctggacactgcacagcagaatttatataggcatgtgatgtgagagaactacagaaacctggttttcttgggtgaaggtaacttcaatacacattttctaatataccctaaaggttttaattctcttttttgtagaatgtttttggtgatttatgctttgcataaattgagtttcagatccctgttttcaaaaaaatcttttagatttgtcattgtagaaaatagtttattcaagatgttt

SEQ ID NO: 38291 - DNA, 2300 bp, Homo sapien
agttattcccattcccccaacagataaacctcccaatggattcaatgcatacacttttattaaatctcactctgtcacccaggctggagtgcagtggcatgatcttggctcactgcaagctccgctttacaggttcaagcgattctcttcagcctcctgagtagctgggactacaggcatgcaccaccagacctggctaatttttttgtatttttagcagaaatggggtttcaccatgttggtcaggctgatcatgaactcctgacctcaaataacccacctgcctcggcctcccaaagtgctgggatcacctgccccagcctcccaaagtgctgggatcacctgcccactcccttggtgaggagccccctagggcacctccacctcctagagcacaaatgttgttgagatgagcagcttgagacatggtatggacctatgcggaggtgtccctagacaatgatggcatcagagtgagaggctggatgaggatgtgtctgggggagcttcgaggtgctgtgatatgtaagagatcattaattacaggatgccaccccaaggagaatatgcatggaccaaagatgaggggtccccaggagggtaaaccaatagtaatgcccccagattccattcctagccaggctccctgctaagtgacaattagaaaaattcctctttacagaaaacagagcatcaattaggtccccaactacagagccagtcctctaccctccagtgaaacttccagtgggcaagaaaagcttgggaaagccagaaggaataggaaccacagctcaggccgggccgaggcttcataaatcaaaaggacattttttttttaagagataaggtctcactccatcacccaggctggtgtgcagtgacccaatcatgcctcactgtagccttgaactcgtgagctcaagttatcctcccagctcagcctcctgagtagctgggaccacaggtgcacaccaacacgccttgctaacttttatttttatttttgagacacagtctcgctctgtcacccaggctggagtgcaatggtgcgttcttggctcactgcaacctccacctcctgggttcaagtgaccctcctgcctcagcctcccaagtagctggaattacaggtgcacgccaccaggcccagctaatttttgtatttttatagagacagggtttcaccatgttggccaggctggtcttgaactcctgacctcaggtgatccgcccacctcagcctcccaaagtgctgagattacaggcgtgagccaccgtacccagcccatggctaatttttaaacttttttgtagagatggagtctcactatgttgcccaggctggtctcaagctcctggcttcaagcagtcctcccacctcagcctcccaaagtgctgggattacaggcatgagccaccatgcccagccgcagaagggcaattattacacagtgacagtggaaggaacagagacacagtcggtggatggtgggaagataagaacattcactctgagggcttctagtaacgttggagaagtgagcatcagcttagcagaagggagggagggaaggaagcacaggaggtttgaggagagagagagaggaagtatgaaatcagagctgcacttcaatgtggtggctattggccatgtgtggctacaggatagctggaatatggctggtctgaactgcgatgtgctagaaaggtaaaatacagggttagatttaaagatttagttccaagaatatatacactacattaataattacatattgctcctatactaaaataatattttggatatattgggttattaaatggttagaatgaatttcacctgtttcttctttcttcttaactactagaaaatttagaattcacacatggctcacattttatttcagacggttgccttacaaggcaaatgccgtctggggagggcctgggtcagctcagggaggaagctctgcctgaaaaggcttagggttcactctacattcagcccagcatctgagcacgtcttctgtcaatcaaggcctgagagggtggggccctaaacattatccaatcagggacgctgggctgggacccgtccaatcaggcactcagctggagcagacaggacggcttccgggtttggtggggcctttgtctctggcggcagccggagcttctggtgtagtcttcactgctctgtgtcttctgctcctagaggcccagcttctgtggcctcgttacctgcaggtattgggagatccacagctaagacgccaggacccactggaagcctagaa

SEQ ID NO: 38292 - DNA, 2300 bp, Homo sapien
cttttttttcttctttttttgagatggagtttctccttgtaagccaggctggagtgcaatggtgtgagctcggctcactgcaacctccacctcccaggttcaagtgagtctcatgcctcagcttcccaagtagctgagtttacaggcatgtgccaccacatccagctaattgtggtatttttagtagagacggggtttcaccatgctggtcagctggtctcgaactcctgacctcaggtgctctacccacctcggcctcccaaaattctgggattacaggtgtgagccaccatgactggctggacctagagactattttctaagtagcaatagactacgtaaaagtgatgggatgtcacttctgggattaggtttcaaaaaaggactgtgatctcactctcattttctttttctgtctcttcctctttctcctccctctccccggggtaagcctgctgcttcttaccaagaggtggaagtggacaggaaatgatgtctccagccaacagccagagaggacctcaggcctgccagcagcagtggaagtgagtttgaaagaggattctgaagccttgagagagctgcagccctggctgacagcttgattgtatcctcatgagagcctgagccagaggacacagctaacctcacccagattcctagcccatggaaactgtgagggaaaaaaaagtttattgtttattaactgctaaatttggggtgatttttacccaagaatagataacgaatacaaggatattgcttattactcaaaatcactatataaagcccctgaaaaattgaaagctgcaaccagggaaacactgaaaatctccaagaacactgtgtttcttcttaaagacagtgagaaaaagcacatacatctgttttccttttagtgttggccaccaggaagctcagagccaaatttatgatgcaattttaataactatgtaagcccctatggcctgcttatctgtgttcttattcctggcctttcattttattctgacttttctttttcttcatcctgattgtattagctcatctttatttttctatattatatgagttatggtaagcaacttcaaattcagcttacggagaagcaaggcattcgtaaatcttttttttttttttttttttttttttctgagactcttactctatcgcccaggctggagtgcagtggcacgatcttggctcactgcaacctccacctcccgggttccagcaattctcatgcctcagtctcccgagtagctgggattagaggcgcccaccacgacaccgggctaattgtttttggtttgttttttgtatttttagtagagacgaggttacaccatgtaggccaggctggtcttgaactcctgacctcaagtgatccacctgcctcggcatcccaaagtgttgggatttggcgtgagccactgtacccggtccatgaatcattttttaaaaatagtttttaaatttaaaacatagttttgcacattaaaaaaaaaagttttgcacaggtcgaacagagtgtccccggaggtggtggtgggaagatcaggtcataggtgtgtgtctctggagctccaagcactggccagggttgatttggattgggtcagaaaaatacaacgaaaaaaggaaaaaggatggcaattgattgccatccccagagggaggggccgagggttcgcccagtcacccacagtggcatccttgcaaggtgctagttgcaccgctcctctaagtccctcccgcactggcgcgctcggccccgcccctaccctgccccgcccctgccccacccctttctcccccgggctccacccctcgcgcgcgtcgcctcaatctccgcccgcagatccggcctccccggcggttgcgcactccgcccccaccctccgcgcccgcccgctctttccccgccccgtccagctcactcctttcggggcggttgggccgcgcgcctgtgggggcggggcccggagcaggcgaccgagccaatggggcgcggcggcggccgcggcagctgggtcgggtcccgacgggcggcggcggctgaggtggaggcggagggaggcggtggaggcggagggaggcggtggcggcggcggcaggatggcgacggccgtcctgctgagcgtgtcggtgccgcggtgggagcgggtggcccggtatgcagtgtgcgctgccggaatcctgctctccatctacgcctaccatgtggagaggcagaaggagcgggaccccgagcaccgggccctctgcgacctggggccctgggtgaagtgctccgtcgc

SEQ ID NO: 38293 - DNA, 2300 bp, Homo sapien
ccaacatggagaaaccctgtctctactaaaaatacaaaattagccaggcatggtggcgcatgcctgtaatcccagctactcgggaggctgaggcaggagaatcgcttgaacccgggaggtggaggttgcagtaagccgagatggcgacattgcactctagcctgggcaacaagagcgaactccgtttcaaaaacaaaaacaaaaagatattagccagatgtggtggcgcctgtaatcccagttattcaggaagctgaggcaggagaatcgcttgaacccaggaggcggtagttatggtgagcagagatcatgccactgcactccagcccaggtaacagaacaagaccctgtctcaaaaaaaatagggctacattatttatgaaacagatactgttgactcagtcaccagaaagtgaaggtcgccaacatcagacaaattcactggaggacctatgtatgtgctttgaaagacaacactgctttggtaaagaatactgtatttcagaaaaacataatcatattaacaactaataacactgtaaaatgctgatgtgttgaatgctactttagaaaaacatgttcaagtctaggaaaaagatttccgatagaaaactacgtatcaattacctagctagctagctatctagagacaaggtttcattctattgctcaggatggagagcagtgggatgaccatagctcactgcagccttcagctcctggcctcaacttatcctcctgcctcagcctcttaagtagcagggccacaggtggacacaggtacacctggctttttttgtttgttttgtataaacagggtttcactacatggcccaggctggtctcaagctctggagtcttgctctgtcgccctgactagggtgcagtgatgcttctcggctcactgcaacctccgccacctgggttcaagagattctcctgtcttaacctcctgagtagctgggactacaggcatgcaccaccatgcccggctaattttgtatttttagtagagatgggatttctccatgttggtcaggctggtcttgaactcccaacctcaggtgatcagcccgcctcagcttcccaaagtgctgagattacaggtgtgagccaccgcgctcggcctaatttttgtatttttttgtagagactgggtttcaccatattggcaaggatggtctcaaactcctgacctcaggtgatccacccgcctcggcctcccaaagtgttgggattacaggcgtgagccaccgcactttcttatgttattaaatagcctagcccaggagggtgcggtggctcacgcctgtaatcccaacaactctaaaggccaaggtgagaagatcgcttgaacccaggagttcgagaccggcccgggcaacatagcaagacccccccatctctacgaaagatacaaaaattaggccaagcgtgcaccgcgcctggctaatctttgtatcttccgtagagacggggttgcgtcatgttgcccaggcgcatctcgaactcctgaacacaagccatcctcctgcctcggcctcccaaagtgccgggatagcacggcccaggcagcctcatgtgttctttaagcagtccctcccggttgtacacttgcatagttttcttttttatttttttatacagggtttacctcagtctcgcaggcaggagtgctgtggtgagatcacagatcattggagccttgaatcttggggttcaagtagctgggaggctgaggttggactacagaggtggggttgcgccatattgctaggctgctcttggcctgaagggatcctccttcctggccacgcccggacacatagttttccatttttgaccgacataaatactgtgctgggtgggagtttgtcaactacccctttccagccagcaacacacaggaactggcggggaggtcgcggttaccaggctccactctgagaagactgcccagctccaggcactgtacagcccttgtgacgtgacagaaggcccgcccctgtgacgtcaccgaaggcgccccccaagatgtcgcaaaggcccgcccctcacgcagagccaatcggaactccaggtgctgggtcttccaggagagcgcctgcgcgggagggtgaccacaggcggccgggcgggatgtcctgtccgccgtcttcagcccagccgccaccacccataagctatgaggaggagtttacgaccacctggactactaccacctgcgtgacttcccggcctgaggggtccgcgcagcaaaggcctgacgctgctggagcaggcgctgcgcacctaccggc

SEQ ID NO: 38294 - DNA, 2300 bp, Homo sapien
attgcagacattcagatactaggacacaaagataattaagacatggtttctagtcttaagaaattgttctaggagaggagacagtaaatgccatgtaagaaatggcttggtagctgttgcaaaaggaccacagagaagggcagctcagcattgaggagaccatggaaaactgtgcttggggaaggtaaagtttgagtagggtattcaaggataagccaaccagatatacagggagtgtgagagaaaagcactcttttcaggataaacgtcacattaaagacaagaagagattgtgttgggtctatgaatactactgaattcaacacagctggaaaacaggttttccatgagataatggcctgtgtggcaacagacaaaggcattttttgtaccagagcacaaaaataagagcctagttattttcaaggtaatgtgaaatcattaaagggtaatctggggttggtgagattggagatagggagacccattaaaaacttaatacattaattcaggtgagaggtgatggtgtctgacctaaggcaataaccacagaggtagaatggaaagaacagtttttgataaatagttggtgctttgttgtgtatgacataatcagacgatagttcttttgatccttttattaatattgtctcaatgaaatgaactgaattgctgaataattgattttgtagatggctcacatatggctcacatgatacatttagccatgatggggaacatataattgtttgctatttatacctatggtgacttcttaaattggattgctattggacaagattttcagtatttatcccattgatttaaggagacaccaacacagaggatggtctcagaggttttcacagtcgcttctgtgggtatcccaaactctttgatattatataggtgaggaagtatgtattgcttactactttttaagttcttcctagtattctggccctttgacagtttattctgtttgtttgtttttccttctttgattacttacagttgtaataccttttaaagacattttatatctcttccttgacttattccaaatttaaattaatacatagaatatgtatatttacaaaatatgttaactaaatgaattatttttgaattattttgagactttctaaaatagtttaaagtatcttgagtcgtcatgaaactaactttgaaaggtgctgatttaaagtgacaatatttgtggccatgcaagaaaagaggcactggacattttaataagcagtttaatagaatttaaatatatgacatccaattaccgacagaatacaaagcatcataaagtatgatttgcagacatattttataaattggaacaccttaaggattcatggcatttgtgtaaaatgtgtggtcgttaacacattttaatacattgattctattgtggaaggtcgtgtgacatggaatgttaaacaattaaaatggtcaaatgtacttccatgtttatgtgatttgcattcacaggaagaaaatgggtaatgccgaaggaacattggcctagagaagcttactgaagcaagggaatttggagtgagactttctcccgctgcggctttctgcccccacaccgcggcttttgcagctttttgcctccgctgccgcggcgttttggtccccgccgccgcggctttttgtggtttttttgccccagctcccactgctttttgtcccccccgccgcggctttttgcccccgccccggcggctttcttccgccgcggctttttgccccgccgccgcgcatttttgccgccgcggctttttgcccccgccgcctaagctttttgcctgcgccgccgcggctttttgccccccgtcgccgcggctttttgccgccgcggctttctgctcccgccgccacggctctgagggcgggagcggcagactccgctgccagctctactggcgtcctggcaagggcagcgccgaggggcgctcccggtccagctctcccggctcgggggttccttgcctaggcgccagagccccgggctccctgcctcggccgctgtggcctgcatagagcggcactgcgcgcggaggcgatgggagagaagaaggagggcggtggcgggggtgatgcagcggccgctgagggtggcgcaggggccccggccagcccggggctgcagcagtgcagacagctccagaagctcatcggcatctccattggcagcctgcgcgggctgggcaccaagtgcgctgtgtccaacgacctcaccgagcaggagatacggaccctggaggtaaggggtttgggga

SEQ ID NO: 38295 - DNA, 2300 bp, Homo sapien
acagctccagaagcgcacatccagaagcacagctgcctagttaacaagcagctgataacacatgtctgaaggagctcagctgagatcagaagaattgctccactgagcccagcttaaatgactgaccatctcaattgtgagctaagaagccttagctgggttgggcgcagtggctcacgcctgtaatcccagcactttgggaggccggggtgggcggattacctgaggtcagcagtttgagaccagcctgaccaacaaggagaaaccccatctctactaaaaatacaaaattagccaggcgtggtggcgcatacctgtaatctcagctactcaggaggctgaggcaggagaatcacttgaacccaggaggcggaggttgcggtgagctgagatcgtgccattgcactctagtttgggcaacaagagcgaaactctgtatttaaaaaaaaaaaaaagccttggttggtttgttatgctgcaatacctaactaatacgtgcacacagtgcagataggatgccaggatttaatgacaggttgattactggttgttatagttaccttccaacagttggcaccctaaaagtgctgatttttttttctgctctaaagttggatgttttgtaagataatattgagtaatgcagaaaaatatgtaggcatgtttgcatgggattggtacttgtactcacacaatccccacgccacaggagaaaacagataaacacactctggccactagggccaggccaaatagcaaaataagtttacctttaatctgttttctctatacttaaacactggaagtgatgactgtggagagatctgaagacatagcgtttaatctcctgtggccccatcatcttttggttactgtctgatctctggaagaaaggtgggcaacaggtggccagcagtggtgtacctgtggttattttattcttgctgccctctgctctttctatggtgactatcttgttccaccctcaaaactgtagaaagatgttggtaaagagaggctgtcccctcacttctggcagaaaaggggtgttcagacccttcaccctcctgatgtcagggctgcatttcaatgtggcagctattggccatgtgtagctactggctgcctggaatgtggctggtctgaattgcaatgtgctagaaaggtaaaatagagttaatttcaaagattcagttccaaataaatatatatactttattaataattacatatcactcacatattagaataaggttttagatatattgggttaaattgttacaatcaatttcacctgtttcttgtttctttttaaagtttggctgctaaaaaatgtacaattcacgtgtcgcccacattttattttagaggattgccttctttttaaaatttcaggctgcctgcttaaaaaaacagaagttggccgggctctgtggctcacacctgtaatcccagcactttgggagaccgaggcgggcggatcacaagatcaagagatcaagaccatcctggccaacatggtgaaaccccgtctctactaaaaatacaaaaattagctgggtgtggtggcgtgcgcctgtagtcccagttcctcgggaggctgagacaggagaatcgcttgaacctgggaggcggaggttgcagcgagttgagctcgtgccactgcactccagcctggcgacagagctagactctgtctcaaaaaacaaaaaccaaaaacaaaacaaaacaacaaaaccagaagccaggaaggtcataaaatctgaaaattttgaataattggtattatattctttgcatttgtgaatagacatataatatactatttataaatgcatatggccttattcacaaggttaaatgcaaatactgtctggggtgggcctgactcagctcagggaggaagccccgtctgaaaaggctgcagcttaggctgtcactcttccttcagtccagcatctgatcacatctcccgtcactcagggcccgaaggggcggggccttaaacgttatccaatcaggaacgctgggctgggaaccatccaatcaggcacgcaactggagcggacagcacagcttccgggatttggcggggcctttgtctctcgctgcagccggcgctccacgtctagtcttcactgctctgcgtcctgtgctgataaaggctcgccgctgtgaccctgttacctgcaagaacttggaggttcacagctaagacgccaggaccccctggaagcctagaaatggtgagcctgctgggtcccacatcccgagagagggggagggtctggctggaaccg

SEQ ID NO: 38296 - DNA, 2300 bp, Homo sapien
ggttggtagggtatggtgtggtttggacctgctctctctttcctttgactgcaggccccaaccagactgcctctcaagaacacagttctcacttggcgcggtggctcacccctgtaactccaacactttgggaggccgaggtgggtggatcataaggtcagaagttcaagaccagcctgaccaacatggtgaaaccccgtctttactaaaaatacaaaaatttgctgagcatggtggtgcatgcctgtaatcccagctattcaggaagctgagggaggagaattgcttgaacccaagaggtggaggtgacagtgagctgagatcgcaccactgcacttcagcctgggtgacagagtgagactccgtctcaaaaaaaaaaaaaaaaagcagttcctgagggataatctttatagtaactacagaattacaggtggtgctggcaatggcattttcttatgagatgctacttttgaaattccacaagacttaggagtgtctgtaagagtttgggaaggggaagggagaagttatcaaaaatatgagttgttatctgtgatggtggctgttgatttcccatcatatgttgcttgaaattcagggagctctggtgataggaaaggaccttaatggaagcaaacacttggggtgtcaactgttaaatgctagttggcttactggggacccagggtccagagcataaagacccagaaaaaaacttagtgaaataaagattctatacatcatacatcaaaatagatatattacgttacctgaaccactgtgttttttgttccaaaatcattcaaagcaaaacaaagtatgtgtgaattgccatgtggcacataaagccatgtctcaggcatcaccggcatttggatttaaagctaccatgctctcaatcaccaaactacaaatcccttacatttttatagaaaattagatatcctatgcaagagacacaaaatgttagatttacatacagtgtatctgcccacccaaaaagaaaaatcaatggactgggttttgaagaaatatgttagaaatctaggtcaatatcccttatacaaacaaacacagaatagaataattttttatttgtggtaaccaatatgatgctacaaataaaattttcaatagttttttcaagccttggactctgacttacaagaagctcagtatatttggtggatttactgaggtcaaagcatagtccctggtctgaggagaggctacccatctacaactcacaatgcaagcatctcagctggctctattaattttccatacacacggagccaaattcttcctgggattattatgcaattttcaaaatggctctaagtctttcaacttacaaagttactatttatattgcactagcctgctggctgggatgaataaatgaacactttttcccaaaggaccataattcattctctggtcatagcttatatatttgggagcactgggatcagtgtgcctggtgcctcccctcccgtctgccccacaaaggagtcatacactgtaagagaaggggagagaaagtggccgtgtgccatagagtgcagaggtgtggccagggaggtgttgactgtgagcagcaccagtctcacatataagcaactgtctacatgatgtgatttcaggtgcaccaaacaaggcttcattgcccctccatttaaacactcccttcccactggtggatgcctggaatgccacagtttttagagctctgttcctttggttaaaagttttgatcttgttaaaatactcatacccctgggtaggcagccccattataacctatcaaccatatacactgtaagcagatgagttttaaagtgtcttctgaaagtaggttttgagagtgtggttcagggcagaagatactgtgtacctaagggagatagggagaggagaacatcacctggggggcaaaggaaactgggcccaagtcaaacaatatgtgtgtgtgtgtgtgtgtgtgtgtgtgtgtggctgtgtgcatggctgcgtatgagctcctcccatggcagcagctgttgaacaccctttcttaaccctcttccagaaaacttgatttttgctgcttttggagtcatagaaccagactctcctcccagccacagcaagataatagctgctggctacagatgtgaattctcgaattctttcaaactgcagactaggagtgaaaggtgaaaaaagttcttctgggcctgctgcgctagttagccttcctctgggatccaaagagaaagatggggcccaatggtgctacctaaatgcttccaaatggg

SEQ ID NO: 38297 - DNA, 2300 bp, Homo sapien
gcgtcgctgggatggttttctcacactacatgaataatatctccagacttcgtgaatatgagccacctgcatagagttaaagtaggcatctctttgctgggaaatttatcaaatgggagtatgaagtgtttttaaaagatacgtgtttgtttgtagccggtaggcctacagtggctcatggcaatggttgaggttgctaaaatttggtggaaggaggcaaaaaaatgaaatggccacttatatggtttatggatctcttgtttctgttgagttacagattcagctggctgtttctccaaatgttagttatttggagaaaaaaatgatggtaattttggggtaacaaatacaatatttgatgaaagcaaatttattgagggttagacaaactacaagatactttaggctgcaaagtcaacacgagacttctggcccaaattgtgcagactttgggtccagctgcaaagttcaaaggaggaggccatataagacgattctcacttttagacaccaactgccggttcaggggtttccccagaacaccctcagtttcaagaatttactagagatactcacagaactcattgaatgccattgtactcatggtttataatagagaaagggtacaaattaggaccaatcaaaggaagagacatatcacataaggtggaatctaggaggattttgaatgttaagtttccattgtcttcaggacatattacctgtcgttgttgtacagcaataaacatggagtactgccaacctggggacctcacctgatgctaaaaagacactatttcgaaaatgaaaagacaaaggaaaggatgagataagatgaccttccacattaaggcactggaaaaaataccaaaataaacctaaagcaagcagaaggaagaaaataaaaatcagacaaattaataattaataattttaatcatatttgttagtattcactaattgatattaattcttgactaactttttaaaaacgagaaatattcacctcccaatttattctgtggggccagtgttaccttgatacaaaagttagtccaaatagcatagaaaaataaaactactataatcataaatgcaaaattccttaaaaaaaactaacaaatctagcaacatataaaataattatacactatgacaaagtgaaatttatactagtaatcccaggttggtttaacagcccaaaatccattaaggtaatacatcttatccatagaataagaaacgagaattgcattatcatctcgatagattcagaaaagacatttaacaaaatccaaatgctttaatgattacaaataaaaataaaaactcaatgaaccaggaatagagaactttctacaccagatacatggcacctgtgaaaagccaacagcaaacattcaacttagtggtgaaagaaaggataatttcccactatggtcagagataagaataagatatatactttgacctcctctgtggaatggaatggaatgggatggaatgcaatgcaatggaatgcaatggaataaaatgaaatggaatggaatggaataatgaaatgttagctgagattgtgccactgcgctccagtatgggtgacagagtgaaatactctcgaaagaaaggaatggaatggaatgcaatggaatggaatggagtgaactggagtggagtggagtgaaatggagaggaatggaatgggatggaatggaatggaatgaagtggagtggagtggggtggagtagagtgcagtggaatggagcggaatagaaagtgatggaatgggccgggcgcggtggctcacgcctgtaatcccagcactttgggaggccgaggcgggcggatcacgaggtcaggagatcgagaccatcccggctaaaacggtgaaaccctgtctctactaaaaatacaaaaaattagccgggcgtagtggcgggcacctgtagtcccagctacttgggaggctgaggcaggagaatggcatgaacccgggaggcggagcttgcagtgagccgagattgcgccactgcactccagcctgggcgacagagcgagactccgtctcaaaaaaaaaaaaaaaaaaaaaaaagaaagtgatggaatggaaaggagtcaagtggagtgtagtggagtggagaggagtggaagggagtggaatggaattggatgtaatggaatgtagtggagtggagtggaatgcagtggaatggaatggaattgaatggagtggaatggaatggaatggagtggaatggaatggaatggaatgcaatggaatagaatgcaatgcaatgga

SEQ ID NO: 38298 - DNA, 2300 bp, Homo sapien
ttgcatttagcactcagctaggccataaaaacacaagtaatatgaagaaaacgtgtaaatacgtttgttgaaaaaaatcattagtcatctgtttttttcaacactgttcgttcacaccattcttatttatttatttatttatttatttatttatttatttatttgagacagagtcttgctctgtcacccaggctggagtgcagtggcgcagtcttggctcattgcagcctccgcctcctgggttcaagtgattcttctgcctcagcctcccaagtagttgggactacaggtgcctgccaccacacctggctaatttttgtatttttagtagagacggggtttcatcatgttggccaggctggtctctaactcctgacctcaagtgatctgcctgccttggcctcccaaagtgctgggattacaggcatgagccaccaccgcgtctgacctcattattattttttgagacagggtctcactctgtcacccagactggcacagctcactgcacccttgaactcctgggctaaagctatcatcctacttcagactcctgagtagctaggactacaggcatgtgccaccatgcctggataatttttaatattttttttagagatggggtcttgctgtgttgctcaggctggtctcaaactcctggcttcaagagatcctcctgcctctgcctcctgaagtattgggattacaggtgtgaaccactgcaccaggcccacactgttcttatacttgcatatttctctgtaatctacaaacaattgttttgtaattctataggtaaattttattttgtagaatacatatattttttcagagttttatatggaatgaatctgttaaagcacatgcagtagttgaatggaaagcttgatgaagaaataggagtcaagggagtgaccagacttctggtatgctggcagaataatactgggagaagacataggatcttaaagcactgatgaagtctgtttcatttcttccgctcattgtctctgccctcatgaagttcaccaaacctgaggtttttgtgactctgtacttgtcattggggtgatgatagcttcttacagggctgagttgcaacgctaccttcaccagcaggtaatgctgtctagcaaactgtaccatctagcttagctttttaagatcctagttttgaggctgggcgcggtggctcacgcctgtaatcccagcactttgggaggctgaggcgggtggatcatgaggtcaggagttcgagaccagcctggccaacataatgaaaccctgtctctactaaaaaatacaaaaaattagtagggcgtggtggtgggcagctgtaatcccagccactcgggaggctgaggcaggagaattgcttgaacacaggaggcggaggttccagtgagccgagatcacgccattgcacaccagcccgggcaatagcgcgagactccttctcaaaaagaaaataaaaaataaattctagttttgaatctgaaataagttcatgccttacttttggctttagattctttaaagtagagagtctgtttttgcacagttgggttgaaaagatttttgggaagatgatagctctgaatccccaaagttcttcatctgatgttcttaattcatcctttgagttcctgcacagatatcacctcctcagtgagatattttttgactatccactggcacgaggcccaaaattggatcagtctgagacaggagtaacgtacttaacttttctgagcctcagtgaggcatcatcccctctgagtctcagtgtttctgccacttgaatgtaagctccattgaagcaatcgttttgttctcttttgttcactgtgtttccagaacctaaaatagtgcttggtgcttcgtaggtcttaaaaatgtatttgttaaaataattaatgaatctataatatgaaaataaaaattctaatgatgcataggattgctgggagttaaataagatcatgtaaaacacttaagagtatgcctggcacataatggttatcaataaacagaggcctttctgatgatcatgtgactgaggcatgattgtataggtaccagtctatcttggtcgtaaattgcaagctcttctcacttcatcattcttcctacttcagggtttggtaggtgtctggggcccagcctgtggtgaatgtgtgcacagttgaatgagtcagttgcttctgtttgttcctccaggtatttcatcgctgatttgccccacttgcaggacagctttgtggacaaactccttgaccttatgccccgactcatgacat

SEQ ID NO: 38299 - DNA, 2300 bp, Homo sapien
gctagagtgcagtggcatgatcttggctcactgcaacctctccttcccaagttcatgcaattctcatgcctcagcctccgagtagcttggatcacagatgcacaccaccatgccaggctaatttttgtatttttacagagacagtgtttcaccttgttggtcttgctaatgtttgtatttttacagagacagggtttcaccatgttggccaggatgatcttgacctcctgacctcaagtgatccgccggccttggcctccccaagtgctgggattacaagtgtgggccaccacgactggtctcctcataacatttttaacagcagttataataaatctgcatgcacaccatgtaatgcctatggaactaataactagtcttctattgtgcagtgcttctagtcacatatatagatgtttttgtgattctcaaatacacaaatcctcctaaaagcatcatataccgatattcactgcagcctgaatagcagattgggaacaacttaaacatcagtcagtaggtgactggttagttgtatcattctttttgagacaggctgcagtgcagtggcaatatcatagctgacatagctgactgcaacctccgcctcctagattctggcgatcctcccacctcagcctctcgagtagctgggaccatgggcatgcaccaccacgcccggctaatttttgtactttctgtatagatggggtctcactacattgcccaggctggtcttgaactcctaggcacaagtgatccacctgcctcggcctcccaaagtgtcgggattacagtcgtgagccaccgtgccccggctcctagttgtgtaattcttacgaagaacatcacgcagctgttaatgaggacttcccattagtcttgatatggcacactctccaagacatttaaagtataacacaccctacagtgtgtattaggaattgccatttgtgtggggaaatgattatatttacatataagtttataaattcagaaagcattccgaaaattcatcgagtatccggggtaactgtgcttgtctctagtgttgaactagtggcgggaggaagatttaatttccaccacatgccctttggtgccttttgaattcagaacaatttccgttatctattaaaaataaaatactggccgggcacggtggctcatgcctgtaatcccagcactttgggaggccgagacgggaggatcacttgagctcagcagtatcacttgagctcaggaatttgagaccaccctgggcaacatggtgaggccgtgtgtctataaaaagaaaaaatgaagtaaaatatcacgtgtaactgaatccctggaatttggcgggcaccggatactgtaaacaattgtggagctctttggaaatttaccttaaaagggagtcctctcaaaggctggacaccatcactctacaagggtgagttttcaaatctaccatagaagcctagggcctcagcagcatcctgagtcctaatgacggacaggttatgactcaactcccatcgcaccagtcctgcagctttctaaaggcatccagcactttctaccttgcattctatcttcatcttcgttagtccttacagcaccgcatgattccggcggagggtgcttatcagactagcctgtgtgtccccacggcacctacagcaccgtcaagcacagggtccagaaagctccaatgaaagtcgtgaaagcagcaagggaaggagactgaggagcaaaccgcgcgagtaggggcaggaggaggcccaccctacgccctgtccggcgcggggcataagccctgcctgcatcctgagatcccgggtccgcaaacttgggccccactgagcagcaacgccagaacccagaagcacttactgccaggaacagggtactccagtgcgccatagcgtcgcggccgctgggcgaggggtgggactgcaggcaccgtgcagccgcggaccaatgagcgggggccggacagcccgtggcccaatagcggcggcgcgggcacgctaggggcgggctgggcgcgccgacttttccggaagatccggatagtgcatcccggccacggcgcgcctgctctgggctctccgcgtgccgcgtcgctttcttttcttcctctggagcagttatggcggcggcgaagaccctgaaccccaaggccaaggtggccggagcgcaggcggcgctggcgttcaacattagcggggcgcggggtctgcaggacgtgctgaggaccaacctggggcccaaagggaccataaagatgtaaggtggggctggcgggagggctg

SEQ ID NO: 38300 - DNA, 2300 bp, Homo sapien
tattctccatccctaagactttaaaaatgttaaagcaaagagatttctctcccctccagttggagatggagatgagacataacagagaaattgctgttttaaaaagagaaaaaccggccagatgctgtggctcacgcctggtaatcccagcactttgggaggctgactcaggcggatcacctgaagtcatgagttcaagaccggcctggccaacatggtgaaataccatctctacaaaaaatacaaaaattagctgggcatggtggagcaagcctgtaatcccagctacttgggaggctgagacaggagaatcacttgaacccaggaggcggaggttgcagtgaaccactggactccaggctgggcgacagagtgagattctgtcttaaaaaaaaaaaaaaaaaaaacccataaagagaaaaaccatcctcatgcattttgcccatgtgattgtgtcaaccacccttaatttttcaaattttattataattaatgtacaattacagtcctttagcccagactgtgaatggcaaaaaagcagggattcaaagacagggctgtcagactccaggcacagtcagtactattactgtcactgttacatgtcacttctgaatgttctcctaccttgagaatggacattgcaaatctttctacaaagcaaaagttctacggaaaatcaagacatttctgacctagcagagcacctctcaccatttcgtgaagcagcgcactgtgcaggaccgtgcccggctaatttttgtatttttagtagagactgagtttcaccatgttggccagggctgatcgtcaactcctgtgtctttagtaagcttgatgtctccagcgccagaaacaagactgtttaagggacagaaatcaatcaaattgtgacaaaaacgaaattaaaacgaaaactaaattaaaaagtcccattagaaaatgggcttttccagccgggtgcggtggctcacgcctgtaatcccagcactttgggaggccgaggcgggtggatctcgaggtcaggatatcgagaccatcctggctaacacggtgaaaccccatctctactaaaaatacaaaataaataaataaataaataaataaagcaagctgggcgtggtgacgggcgcctgtagtcccagctactcgtgagactgaggcaggagaaagacatgaacccgggaggcggagcttgcagtgagccgagatcgcgccactgcactctagcctgggtgacagagcgagactctgtctcaaaaaaaaaaacaacaaaaaaccaaaacaaacaacaaaaaaggacttttcccagatctcagggagccagggatatggagctagttatcaacgaaaactaaattaaaaagtcccattagaaaacgggcttttccccgatcttagggagccgagaatatggagctagttatctcccgcaggctggaggacaagtgtagtgcccaccccgtccccgcagagattgtgcagagtcctcagggtgtctggaagcccaagaaggcggggaacgccgcacactagagccgcttttttctccatggagacggcatcgacgcaggaagaaatggacgcaacggtggggcttagcagggaacaggaccggcccgggaggacgcgaggaagggtggctgcggagccccgaggcagcgggctcccatctgcggtcttgggcccgccaggtgcgcagcggcgcgcggtgcccacccagccctcccgccagccccaccttacatctttatggtccctttgggccccaggttggtcctcagcacgtcctgcagaccccgcgccccgctaatgttgaacgccagcgccgcctgcgctccggccaccttggccttggggttcagggtcttcgccgccgccataactgctccagaggaagaaaagaaagcgacgcggcacgcggagagcccagagcaggcgcgccgtggccgggatgcactatccggatcttccggaaaagtcggcgcgcccagcccgcccctagcgtgcccgcgccgccgctattgggccacgggctgtccggcccccgctcattggtccgcggctgcacggtgcctgcagtcccacccctcgcccagcggccgcgacgctatggcgcactggagtaccctgttcctggcagtaagtgcttctgggttctggcgttgctgctcagtggggcccaagtttgcggacccgggatctcaggatgcaggcagggcttatgccccgcgccggacagggcgtagggtgggcctcctcctgcccctactcgcgcggtttgctcctcagtctccttc

SEQ ID NO: 38301 - DNA, 2300 bp, Homo sapien
acaaagggagaagttcacctttattgagaagtgtaacaaccctcgttctgtcacattattgatcaaaggaccaaataagcccacacttagatcaaagatgcagtaagggatggcttgagggctgtcaaaaatgctattgatgatggtaagatcctcaccatatttcaattctattaaattgttttgctggtctgaaaagcatggctgaatactgtgttcttttatcagtagtttacacagccagacaccatgcaaaagcagtcttccctttagaatgactgatggtatgctaaggtttttcatagcatatcattattaaaggtgaatacaaataaatgaactaatactgatctgttgaaagagctgccagtggccagtgaagccattctggttggaccattctcctatttgatatgttagtcgcttgtattgtggctttcacatgcagtacttaaattgatgtggtcatagtgaatttgtaagaaattaatggctttcatatgtatattttgttattcataattagttctacagttttcttagcatttttctttttcccccatccaacaggctgtgtggttccggtgctggtgccgtggaagtggcaatggcagaagccctgaataaatataagctcagtgtaaagggcaaggcacagcttggagtccaagcatttgctgatgtgttgctcgttattcccaaggtgtgtatgccttaaacagtcaatcttccaaaagattcagctgatcaaaactttttgataatgtaggctttattcataatacggattttggataaacgggtttgatcagttttcttcctgactataaaacatccaaacgtatttggtttctctgggaggcctgaatagctgacgtttcagatggcaagagagaacctgtagcttaatatttgcagtattaggggttatacttgagtaccaacttgctttttgttttggttttagctaaactgatatcattgttttttattatatactaattttgaagtatagtttatgactgatgtattgctgctgggtttggggtagatgagagagttgatcagtaacttgtgtctggttattctctgaagggaacataaatgttctgtcttcatgcaatgagattcttgttttgttttgttttgtttttaagaattttgagagttttgctcttgttgtccaggctggagtgcaatggtgtgatctcggcccactgcaacctcagcctccccagtagctgggattacaggcacctgccaccacactcagctaggtttcttttgtatttgtagtagaggtggggtttcaccatgttggccagactggtctcatactcctggcctcaggcgatccacctggcttggcctcccaaagtgctgggattacaggcatgagccactgcatctggccgagactttgttttgctttttttttttttttttttttttgagatgcagtctcttgtcgcccaggctggagtgcagtggcgtgatctcagctcacgacaacctccacctcccaggttcaagcgattctcctgcctcagtctcctgagtggctgggactacaggcacgtgccacaatgcccagctaattttttgtatctgtagtagagacagggtttcaccatgttggccaggatagtctcaatttcttgaccttgtgatccgcctcagcctttcagagtgctgggattacaggtgtgagccactatgcccggcccctttttttttttttttaaatatcaattcttcctgttttctcaggaattaaatttgtttactttaggttcttgcgcagaattctggttttgaccttcaggaaacattagttaaaatttaagcagaacattcagaatcaggtcagctcgtgggtgtggacctgaacacaggtaagagaatgcaactgtttgtagaggaaaaactagatgtagtacatgtgagttgaagccaggaaagattcaaaatggggaccaaaaaaaaaatcttttgctttgcaatttgacaccagtactattagggaagtctgggttctaaaatgggataaaataggatattaataaaaaatggaatgactaggtataataattaagggagtagagtagactgagtaattttggtatagttttgttggagatgttgagtggtggtagatggttcagattaatgttgaaggattttcatattgcatttgccttaaactcagttctttgtttctttttgtttctttttttttttttttttttgagacggagtcttgctctgttgcccaggctggagtgcagtggcaagatctt

SEQ ID NO: 38302 - DNA, 2300 bp, Homo sapien
ctgaggtagggagttcaagaccagcctgaccaacatggagaaaccctgtctctactaaaaatacaaagttagccaggcgtggtggcacatgcctgtaatcccagctactagggaggctgaggcaggagaatcgcttgaacccgggaggtggaggttgcagtaagccgagatggcgacattgcactctagcctgggcaacaagagcgaactccgtctcaaaaacaaaaacaaaaagatattagccagatatggtggcgcctgtaatcccagttattcaggaagctgaggcaggagaatcgcttgaacccaggaggcggtagttatggtgagcagagatcatgccactgcactccagcccaggtaacagagcaagaccctgtctcaaaaaaaatagggctacattatttatgaaacagatactgttgactcagtcaccagaaagcgaaggtcgccaacatcagacaaattcactggaggacctatgtatgtgctttgaaagacaacactgttttggtaaagaatactgtatttcagaaaaacataatcatattaacaactaataacactgtaaaatgctgatgtgttgaatgctactttagaaaaacatgttcaagtctaggaaaaagatttccgatagaaaactacgtatcaattacctagctagctagctatctagagacaaggtttcattctattgctcaggatggagagcagtgggatgaccatagctcactgcagccttcagctcctggcctcaagttatcctcctgcctcagactcttaagtagtggggccacaggtggacacaggtacacctggctttttttgtttgttttttataaacagggtttcactacatggcccaggctggtctcaagctctggagtcttgctctgtcgcccagactggggtgcagtgatgcttctcggctcactgcaacctccgcctcctgggttcaagagactctcctgtcttagcctcctgagtagctgggactacaggcatgcaccaccacgcccggctaattttgtatttttagtagagatggggtttctccatgttggtcaggctggtcttgaactcccaacctcaggtgatcggcccgcctcagcttcccaaagtgctgagattacaggtgtgagccaccgcgcccagcctaatttttgtatttttttgtagagactgggtttcaccatattggcaaggatggtctcaaactcctgacctcaggtgatccacccgcctcggcctcccaaagtgttgggattacaggcgtgagccaccgcactttcttatgttattaaatagcctagcccaggagggtacggtggctcacgcctgtaatcccaacaactctaaaggccaaggtgagaagatcgcttgaacccaggagttcgagaccggcccgggcaacatagcaagaccccccccatctctacggaagatacaaaaattaggccaagcgtgcaccgcgcctggctaatctttgtatctttcgtagagacggggttgcgtcatgttgtccaggcgcatctcgaactcctgaacccaagccatcctcctgcctcggcctcccaaagtgccgggatagcacggcccagggagcctcatgtgttctttaagcagtccctcccggttgtacacttggatagttttcttttttatttttttatacagggtttacctcagtctcgcaggcaggagtgctgtggtgagatcacagctcattggagccttgaatcttggggttcaagtagctgggaggctgaggttggactacagaggtggggttgcgccatattgctaggctgctcttggcctgaaggaatcctccttcctgggccgtgcccggacacatagttttccatttttgaccgacataaatactgtgctgggtgggagtttgtcaactacccctttccagccagcaacacacaggaactggcggggaggtcgcggttaccaggctccactctgagaagactgcccagctccaggaactgtacagcccttgtgacgtggcagaaggcccgcccctgtgacgtcaccgaaggcgcccccaagatgtcgcaaaggcccgcccctcacgcagagccaatcggaactccaggtgctgggtcttccaggagcgcgcctgcgcgggagggtgaccacaggcggccgggcgggatgtcctgtccgcagtcttcagcccagccgccgccacccataagctatgaggaggagtttacgaccacctggactactaccacctgcgtgacttcccggcctgcggggtccgcgcagcaaaggcttgacgc

SEQ ID NO: 38303 - DNA, 2300 bp, Homo sapien
tttttttttttttgagacaaagtccagctctgtcatcggggctggagtgcagtagcacaatcttggctaactgcaacctctgccccctcagttcaagtgattcccctgcctcagcctcctgagtagctgggactacaggcgtgcaccaccacgccccgctaatttttgtatttttagtagaggtggggtttctccatgttggccaggctggtcttgaacttctgacctcaggtgatcagccccccttggcctcccaaagtgctgggattacaggcataagccaccacacctggcctatttaagctatttttaaatatacaataaattattgtttactatagtcatgctgttgtactgccaaatactacatcttattcattctaactgtatttttgtacccattaatcattcctgtgcaccccctccagcccactacccttcccagcctctggtaaccatcattctgttctctatcttcataagttcaattattttaattcttagcacccacaaatgactgagaacatgcaaaatttgtctttctgtgtctggcttattttagttaacataatgatctccagttctactcatgttgttgcaaataacaggattatattctttctcatggctgaataatattccattgtgtatatataccacattttttctatccattcacctgttgatggacacttaaattgcttccaaatcttggctattgtgaatagtgttgtaataaatatagaaatgcagatatttcttcaatatactgattttcttccttttgggtatatatccagcagtaagattattgcatcataaagtaactctatttttcattttttgaggaccctccaaaccgttctccatagtggttgtactaatttacgttcccatcaacagtgtatcagggttcccttttctccacatcctcaatagcatttggtatcgcctgtcttttggatataagccattttaactggggtaggatgatagctcattatagttttgatttgcatttctctgatgatcgatgatgttgagcacctttttatatacctgtttgcaatttgtatgtcttcttttgagaaatatttattctgatcttttgcccattttaaaatcagattattatattttttcccatttattttttttccacctgagctctttatgtactctagttattaatcccttgtcagatggattcagaattgggttttgacttttacactcaattctaaatcattaaatgctgtcaagtggagaactgacataatattcgtattggaagaccactttgtgtatcagctatctattgctgtgtaacaaaccactccaagcgtaatggtataaagttacaatgatgcttattagtcttctcacaatactgaaggctgactagactcacctaggcagttctggcttaggatgtcttatgtggttgccttcaaacagtatgcagttagaatagtctcaatggtttccttgctcaaatatctcctggttaatgtgggctgttagctagggcctcagctggggctatctggtggaacacccacacatcacctccatatgtggcctgggctttctcacaaaatggtgaatgggttctaagtgcacccatcccaggaaggacagccaagtggaaacatcttttatgacctaactttggcagatcacgagcaacacttccattgtattctacttatagaagcaggggactaagttcatattcaagggaagattaactagattttttattttttttgagacagagtcttgctctgtcacccaggctggagtgcagtggcccgatctcagctcactgcaacctccaccactcaggttcaagtgattctgctgcctcagcctcctgagtagctgggactacaggcacaagccaccacggccagctaatttttgtatgtttagtagagatggggtttcaccatgttggcgaggatggtctcaatctcctgacttcgtgatccacccacctcggcctcccaaagtgctgggattacaggcgtaagccgccacacccagcctgaaaccagattctatctcttgatgacaagtgtaaaaaaatttgtagacggccgggcgcggtggctcacgcctgtaatcccagcactttgggaggccgaggcgggcggatcacaaggtcaggagatcgagaccatcccggctaaaacggtgaaaccccgtctctactaaaactacaaaaaatagccgggcgtagtggcgggcgcctgtagtcctagctacttgggaggctgaggcaggagaatggcgtg

SEQ ID NO: 38304 - DNA, 2300 bp, Homo sapien
gactattttctttttctttctttctttcttttttttcttctttttttgagatggagtttttccttgtaagccaggctggagtgcaatggtgtgagcttggctcactgcaacctccacctcccaggttcaagtgattctcatgcctcagcttcccaagtagctgggtttacaggcatgtgccaccgcatccggctaatttttgtatttttagtagagacggggtttcaccatgttggtcagctggtctcgaactcctgacctcaggtgctctacccacctcggcctcccaaaattctgggattacaggtgtgagccaccatgactggctggacctagagactattttctaagtagcaatagacttcgtaaaagtgatgggatgtcacttctgggattaggtttcaaaaaaggactgtgatctcactctcattttctttttctgtctcttcctctttctcctccctctccctggggtaagcctgccgcttcttaccaagaggtgcaagtggacaggaaatgatgtctccagccaacagccagagaggacctcaggcctgccagcagcagtggaagtgagtttgaaagaggattctgaagccttgagagagctgcagccctggctgacagcttgattgtatcctcatgagagcctgagccagaggacacagctaacctcacccagattcctagcccgtggaaactgtgagggaaaaaaaagtttattgtttattaactgctaaatttggggtgatttttacccaacaatagataacgaatacaaggatattgcttattattcaaaatcactatataaagcccctgaaaaattgaaagctgcaaccagggaaacactgaaaatctccaagaaccctgtgtttcttcttaaagacagtgagaaaaagcacatacatctgttttccttttagttttggccaccaggaagctcagagccaaatttatgatgcaattttaataactatgtaagcccctatggcctgcttatctgtgttcttattcctggcctttcattttattctgacttttctttttcttcgtcctgattgtattagctcatctttatttttctatattatatgagttatggtaagcaacttcaaattcagcttacggaaaagcaaggcattcgtaaatctctctttttttttttgagactcttactctatcgcccaggctggagtgcagtggcacgatcttggctcactgcaacctccacctcccgggttccggcaattctcatgcctcagtctcccgagtagctgggattacaggcgcccaccacgacaccgggctaatttgtttttgtttgttttttgtatttttagtagagacgcggttacgccatgtaggccaggctggtctcgaactcctgacctcaagtgatccacctgcctcggcctcccaaagtgttgggattacgggtgtaagccactgtacccggtccataaatcattttttaaaaatagtttttaaatttaaaacatagttttgcacattaaaaaaaaagttttgcacaggtctaaccgaaggtggtggtgggaagatcaggtcataggtgtgggtctctggagctccaagcattggccagggttgatttggattgggtcagaaatatacaacgaaaaagggaaaaaggatggcaattgattgccatccccagagggaggggccgagggttcgcccagtcacccacagtggcatccttgcaatgtgctagttagaccgctcctttaagtccctcccgcactggcccgctcggccccgcccctctctggctccgcccctccccacccctgccccgcccatccccacccctgccccacccctttctcccccgggctccacccctcgcgcgcgaccggccgcgcggcgcagcgccacgccgcctcagtctccgcccgccgatccggcctcttcggccgttgcgcactccaccccctccctccgcgcccgcgcgcgccttccccgccccgtccgcctcactccttttggggcggttgggccgcgcgcctgtgggggcggggcccggagcaggccaccgagccaatggggcgcggcggcggcggcggcggtggtggcggcggcggcggaggcggcggtggcggcggtggcggctgggtcgggccccgacgggcggcggcggctgaggtggaggcggagggaggcggcggcggcggcggcgggaagatggcggctcccgtcctgctaagagtgtcggtgccgcggtgggagcgggtggcccggtatgcagtgtgcgctgccggaatcctgctctccatcta

SEQ ID NO: 38305 - DNA, 2300 bp, Homo sapien
tcgaacatctgagctcaagtgatccatccaccttggcctcccagagtgctgagattacagggtgagccactacacctggcctgttctttttgtcattttttaaggtggtagcttggagtaataattttaaactttcctttctaatataagcattttaatgctataaatttctctctcagcactactttagctgcataacaccaattttaatttgttatatttttattcagttcaaaatttgttatttccttgagacttcctctttgatccatgaatctattgttcagttttcaaagagttgaacattttgaagatatctttctgtatgagttctagtttaattctattatggtcagaggacatactttgtacaatttcagttattttaaacttgaagtttgtttatgatatgtttatgttttgtttacgatgtggtctatcttgatgaaacttccatgtgtatttgtaaggaatgtgtgtgcagctgggcgcagtggctcatgcctgtaatcccagcactttgggaggccaaggcgggtggatcacgaggtcaggagttcaagaccagcctggccaagatgatgaaaccccatgtctactaaaaatacaaaaattagccaggcacaatggcaggtgcctgtaatcccagctactcgggaggctgaggcaggagaattgcttgaacccaagggatggaggttgcagtgagccgagatcgcgccactgcactccagcctgggcaacagaataagacttcgtctcaaaaaaaaaaaaaaaaaaaaaaagtgtgtcggctgttgttgggcagaatattttgtaaatgtcagatcaggttgcttgatggttctcttcagacctgtatcctttctgatcttctgcccacctgttctgtccattactgagagagagagagattgaagtctttaagtataattgtggatttattctttctttcagttttgttagtttttgtttcatttatttgggagttctcttattagatttctgtatatttaggattgttttatccttttggttaattgatccttttaccgttatatgtctctttcttctctggtaagttcccttgtcctggagactacattttctggtattaatacaagcacggtaccttttgttttttttcttgtgcaaagtttatacaacataaagtttacattttaaccattttctggatttcttttgattagtgtttgtatgatgtaacttgtttcatctttttactcttaacctatgttattatatttaaagtgagttttttgtaaatagcatatacttgggtcttttttgcttttcagttcagtttgacaatgtatgtcttttattggtatattcagaccatttacttttaatgtaattgttagtatgtttagatttaggtcaacctctctgttttggtttgtcctttcccctatttcatgccttttagatattggtattttttggtattttatctattgactttttatttttatctctgtgaattcttatgtggtagctctagagattacagtatgcacacatagcctttcgtattctagttagattttatatttagcaactttaaggagaatatagaaatcttacaactattaatataaagattccttaatcctcccccgccttatgttataattgtcatttgtgttatatctacatatattgaaaaccccactccacaatgttacatttgcttccaacaatcttaagtttttaaactgaaaaaaaatcttttgatgcatctttagtcagttttctaaaaattttaatgtaaattagctgcgtgtggtggctcatgcctgtaatcccagcactttgggaggctgaggtgagaggatcacttgaggccagaagttcaagaccagcctgggcaacatagtgagacccccatctctttaaaaaaaaatcattttattgtaaattgacagtcaataattgtatatatttatggagtacaacatgatgttataatttaccaatataatatagaataattaaatcaagctacttaacatatccatcacctcaaatacttattttttgtggttgagaacattcgaaatttattctcttggcagttttgaaatgcagaacacactattatttactatgttcactatgctgtgcaatagatctcaaaataaaacttattcctcctgtctgagatttttgtatcctttgaccaccatctcttcattcctcccactcccccagcctctataaccaccattctactctctgcttatatgagttcaattgtcttagtttccacatgtaag

SEQ ID NO: 38306 - DNA, 2300 bp, Homo sapien
tgttaacatctggagaataatgattttgctttgttttaacaggcaatccagtttcacaagctctgcctctccttctgtgggtgatgggttcaatgccagttttattttaaaagcgtttgctatcctgtttgagtttgccctcatgtgcgcctctcagtgatttgtctgcaatttgaatgatggtttatatcatagtttatttctgagagactttgctgtgcctttggggtctattccatgcatgtgccacttgggtgagtctggggcttgtgttagttcctacacagaattaagggattcccttctctggtcctttccttgctgggattttcttccccatctctggctcccaggcacccctttcgctgtttctcttgctagaaagatgggtttctctcagacagttttaacctccttctctgtcacacagttccatgtgactggcttcacccgaagagtgaggcagtgaaagaaaagagaagaaacaacaggattccttttacatgcttacagccacagagaccccttctctcatttcttccagggaaagagacaggctttgaggtgcctggactgctggccaacctttaggcaaggccaagagggaaaaaataatgaatgtgaaagtacgctgtcatcatgctctccagcccacatggatctcttgtcctcatcctctggccagaaagaagttttatgggttttgttttgttgttgttgttgttgttgttttgctgtctgacccctcacacaccttaccccttgggcaattctgcaaagaagaggggaaaagaacccaagaaactccagtgtactacttgatcttccagtttttactctcctctatcaaccagctatttttccttttcagaatcctcaattgctttttgtgttgtccaatttttaattgtaacctgtcaggaagagcagcttgtagtgggcatattccattttatccagcactggaattggcattcagattttttttgttttattttgttttgtttttgagatagtatctcattcttttaggctggagtgcagtagcacaaacacagctcactgcagccttgacctctgggctcaagtgatcctcccacctcagcctccctagtagctaggactacaggtgtgtgccactacatccagctaattttttttggtggtggtttgtttgtttgtttcggtagagtcagggttttgccatgttgcccaggctggtctcagactcctgggttcaagcaatccctccaacctcagcctcccaaagtgctggcattacaggcgtgaggcagtgtgcctggctgacactcagatttttaatgccttggtcttacaaatgaatagacggttaatggtcctcaaacatttgagaaaagtctctagtatgagagacagacacatatggatgtatgtccaaggaactcagagcaaccaaaaattgaagtagccagaaataaacttaaaataaacataaattatttgatctccttagatctaagaaaaagtgatatccttggctgggtgcagtggctcgtgtctgtaatcccagcacattgggaggctgaggtgagtggaccatttgaggtcaggagttcgagaccatccttgccaacatggtgaaaccccgtctctactgaaaatataaaaattagccaggtgtggtggtgggtgctggtaatcccagctacttgggaggctgaggcaggagaattgcttgaacccaggaggcggaggttacagtgagcagagatcaagccgctgtgcgaccgagcgagactccgtctcaaaaaaaaccatctcagaaaaaaaaaatgatatccttaaaacaagatgctatttatgtaaaaggaataatcagagactaagagagaacacataaaattaaacatatgttagcaataagtttaataaatgaatttaacaggtttgggagagtatatcatggtaatctcctagaaatggagtaaaaggaaaaagagggcaaatagaaaaaaagatcaaagaaaattagagggccaacatttggctaagaaatgtatgaaaatttcctaatattgaataatgtgaatttctgcattgaaagagcccttcacagtgaatgactcaactcccacaacaaggcacatcctttgtgaaatttgagaatgcccagattaaaaagaagattcttagagcagaaacaggtcacattcgaagctcagaatagcatcagaattttcaagaaccacctctgaacgcaggatggtggaagagtatctttaaaaatgttgagggatttgtggccttcagtgctgcca

SEQ ID NO: 38307 - DNA, 2300 bp, Homo sapien
ggtgtgtccattgctgcaggtaatctggcatttgtttacctgtttattatttctcttccctaaatagaatttaaggtccacaagggcagcacctcgtctggctcgttcacttctggatccccggcacgtagcgtcagtgcacacagtacatgctcaataagtatttagatgagtgaaagaataaatgaatataatggaaattattttatgttctttgaaatgtataactgaaggctgggtgtcatagctcagcctgtaatcccagcactttgggaggccaaggtgggaggattgcttgagtccagtacttcaagaccagccttggcacatggcaaagctgcaactctataaaaaaataccaaaaaaaaaatatatatatatagctgggtgtggtagtctcagctacttcgggaggctgaggcaggagaatcacttgaacctcggaggtcaaggctgcagtgagtcatgattgcaactgcactgtagcctgggcaacagaggaacatcctgtctcaaaaaaacaaaacaaaacaaaacaaacaaaaaggattgcataattctacaataaaaatcttcatggctttcacttgtttgtaaaatcggggtgatttttctctcccaacatcatcgttatacaggggtttcattctatatcttgggcatcaagtgctattaaactattgtggcctgtgaagaattacttatttatccttgctttggggcagtttgtcttcagaaccaaagtttagattttgtttagactgattctctactgacttaacaccataactggtttttttttttttttttagtatttaagaagcactctcgttcaatccagagttaacattatctttaaaggttttttattcaaaatgaatgtttgatatttgtatcaagttttatcaaataagttaacaatttaaaaaaaatcaggttttaaaaatgttaagtcaaatgcaagatttaaagttaaattgcaaataaaaactgatagggcatataatgtatccagttttttacatctgagataggattccaggaaagacctatagtttctgatattatcctgcattttttttttttgaaatggagttttgctcttgttgcccaggctggagtgcagtggtgcagtctcggcccactgcaacctctgcttccagggttcaagtgattctcctgccttagtctcccaactagctgggattacaggtgcacaccaccatgtccggctaattttttgtattttgagtagagacgggtttcaccatgctggccagcctggtctcgaactcttgaccttgtgatctgctcgcctcggcctcccaaggtggtgggattataggtgtgatccacgggcccggccctacatttaaaaaatacattcccagtatatttcttaatgcatatcctggtgaaatttgtgaagaaacaacttttcaatctatattctttgagtgaataaatagcacaacttacattctatggttttcaactgggggcagtcgtgtcccagcggatgtttggcaatggctgtgactgcatttttggtagtcacacctgggatggaggagtactggcagcatctagttgggggagctctggggtactgttagttatgtaatgcacagaacaccccacagcacaaagaattatctagcccaaaatgtcagtagtccactgttaagagacagtggacaactgtctccttctgcatagagaagtctccttctgcaaatactaatgccattggaaaacgaatactttgccctaccttctggagaagagaatatatagaaattggcaactgagagattcagatgggtatactggcacctttagatatgttcattttagatgattatttctaatcagaaatctagtgactggcctccctctctttggggcaaatcactctctcaacacaggacatttaagacatttcacaacttagttgattttagaattggataacgttctcaaataatgatacattttttaaaatagggaaattcaaatatagggttactggttttccttattttacagatggggtcgaggatttggtcttttgggttccatttttggaaaggatggtgtattaaaccagccaaacagtgtctttggacttatattttatatactacagttattacttggtaagtatttatcaatacaaaaataagtttgttatattccgtttagtactttgtgtctttgccctgaagtgtcttgatgttaaagcatgtgttatttatagaaccactagcgtgtacaacatttttgtgttatgaaaactt

SEQ ID NO: 38308 - DNA, 2300 bp, Homo sapien
ggccaggctggttcaactcctgacttcgggatccacccgcctcagtctcccaaaatgctgggattacaggaatgagccacagcgctcggtctgtatttaagaaaaatttttgttttaagttttttttctttttaaaaatatatctttttcagggcgggcgcggtggctcatgcctgtaatcccagcactttgggaggccaaggtggggggatcacgaggtcaggagatcgcgaccatcctgactaacatggtgaaactccgtctctactaaaaatgcaaaaaattagccgggcatggtggcaggggcctgtagtcccagcgactcgggaggctgaggcaggagaatggcgtgaacctgggaggcagagcttgcagtgagctgagattgcatcactgcactccagcctaggggacagagcgagactccatgtcaaaaaataaaaataaaaaaatatatatatatctttttctttttctgagatgaggcttgcactgtggcccaggctggagtgcagtggtgagattattgacagccgttgtggggccgcggttctaagtttaaaagaatttaggctgggtgtggtggctaatgcctgtcatcccagcactttgggagtccaaggtggatggatcgctttagctgcaaagtttgagaccagcctgggcaacatactgagaccctatctaagaaaaaaataaataaataaaataaaataaatgaataaaaaagaatttaaaaaagaatcccacagcaaagacaatgcaccatagagcaatttattgccaaggaaaggtattttggaagttaagtttagaacagcctgggtgcactggctcatgcctgtaatcccagcacttttggaggccgagatgggtggatcacttgagctcagaagttcaaaccagcttagccaacattagctggacattgtggtgtgagcctgcaatcccggctactcaggaggttgagatgggagaattgtttgaacccgggaggtggaggttgcagtcagctgagattgcaacactgcactccagcctaggtgacagagtgacacccccatctcaaaaaaaatagtgaagtgcaaaatgcacagttcaccctgagacacagaattcaggacaggctgctcgtaaggatgagacagcaccgattattactggggaaactccctttctgggagtcttccgtgatgaattcctaaggagctgggaagaggtgttactgtaagcacgttctgggccgtcctctggttgcacatgcgtagtagctgtacatgcttgttcacacgtcacgtgtctcagtgccgtggttggcatgtctgagggacacggtcacttccttgactacctatcctgcctcaagatcatagctcactgcagccccgaactcctggctcaagcaatcctcccacttcagcctcccaagtagctggggctgccggggctgcaagcacgcaccaccacgaccggctgattgtttgtatttttagggaagaagtggtttccctatgttacccaggctggtcttgaactcctggtctcaagcgatcctcccaccccagcctcctcaagtgttgggattacaggtgtgaccactgcacctggccaaaatctttttttaaattaaaaaaagcaccgggtgcggtggctcacacctgtaatcccagcactttgggaggccaaggcgggtggatcacctgaggtcaggggttcaagaccagcctggccaatatgacaaaacccatctctactaaaaatataaaaattcgccaagcatggtggtgcacgtctataatcccaggtacttgggaggctgagacaggagaatcacctgaaccccagaggtggaggttgcagtgagccgagatcatgccactgcactccagcctgggggacagagtgagactccgtctcaaaaaaaaaaaataagaaattaaatttaaaaaaagcaacagaaacaaatggctgcctggcagcggtggctgcagggcgctcctgtttgtgtgactcaggtcgtgtccctccctcagccctggtctctcttgtttcttgcagggctggtgaattaccagatctctgtcaagggcagtaacctgttcaagttggaagtgcgtcttttggatgcagaaaacaaagtcgtggcgaatgggactgggacccagggccaacttaaggtgccaggtgtcagcctctggtggccgtacctgatgcacgaacgccctgcctatctgtattcattggaggtaatggtggtttgggacatgcctaagggaggtcttttgcccccatgtggtgac

SEQ ID NO: 38309 - DNA, 2300 bp, Homo sapien
ggagtacaatggcgtgatctcggctcactgcaatctctggttcaggcgattctctcacctcagccttcccgagtagctgggattacagacatgtgccaccatgcccagctaaatatggagatgcggtttctccatattggtcaggctggtctcgaactcccaacctcaggtgatctgcctgcttcagcctcccaaagtgctgggatgacaggcgtgagccaccgcacctggccaaggcacttggtttcttagatcacccacttggccctcttccaagttgtactttccttctttccttcctgttctaaagttttttaatatttttttttttcctgaaatggcatctcactctgtagcccaggctggagtgcggtggcgtgatctcagctcactgcaacctctgcctcctgggttaaagcatttctcctgcctcagcctcccaaatagtagggattacaggtgcctgccaccacgcctggctaatttttgtatttttagtagagatggggtttctccacgttggccaggttggtctcaaactcctgatatcaagtgatcctcccgccttggcctcccaaagtgctggagtttggagttacaggcctgaacctctgtgcctggcctgcttttttttttagactgagtcttgctctctcgccaggctgtagtgctgtggtgcgatctcggctgactgcaacctctgcctcccgcgttcaatcgattctcctgcctcagcctcccgagtagctgggactacgggcgcatgccaccatgcccagctaattttttagtagagatggggtttcatcatattggccaggctggtctcaaacccctgacctcgtgatccccccacctccgcctcccaaagtgctgggattacaggtgtgagccactacgctcagcactggcctgctttttaacaagcttttactactgctctgcagcttacctccctctggctttctgccttatgcccctcagtgcaattctttcttctgaggaggcaagaattgaggttgttgctgatgtgtagggattcaccacccggaactccaccagtaacaggtcgaggatgctagttgaaaatgttatgtaagctgcatgctttttacaaatggtagtggttctcatgtccagcaatggccactgcaccgtccctgtatgaaagtcccctccataaatctatgtctcctttgctgtctccagatctcctcctctacctctcccacacggtgccttccctactggagtaaactggggtcccgcagggcaccctttccctgcaattttttttttttttttgagacagagtctcgctctgttgcccaggctggagtgcagtggtgcgatctcggcttactgcagcctttgcctcccgggttcaagcgattctcctacctcagcttcctgagtagctgggattacaggcacgcaccatcacgccccgctaattcttttttttttttttgtatgtttacaaaatagggacggggtttcactatcgttggccaggctggtctcgaactcctggcctcaagtgatctgcccccctcgggttcccaaagtgcacctggcctctctccctgcatctttatgtgcctgcaacaccaagagggagctcttggcccctgggttaaggtcagggctccagaagcccagggtcaaggctatggccgcatcccaaggacgtgcatccctgcaagaggctgcatcagacaggcatggaagaggcgccgctggggcctccttgaattcctgctgggaaaagcaagtggaggtgctccttgaagaaacagggggatcccaccgatctcaggggttctgttctggcctgcggccctggatcgtccagcctgggtcggggtggggagcagacctcgcccttatcggctggggctgagggtgagggtcccgtttccccaaaggcctagcctggggttccagccacaagccctaccgggcagcgcccggccccgcccctccaggcctggcactcgtcctcaaccaagatggcgcggatggcttcaggcgcatcacgacaccggcgcgtcacgcgacccgccctacgggcacctcccgcgcttttcttagcgccgcagacggtggccgagcgggggaccgggaagcatggcccgggggtcggcggttgcctgggcggcgctcgggccgttgttgtggggctgcgcgctggggctgcagggcgggatgctgtacccccaggagagcccgtcgcgggagtgcaaggagctggacggcctctggagcttccgcgccgacttctctgacaaccgacgccg

SEQ ID NO: 38310 - DNA, 2300 bp, Homo sapien
tggtggtgcatgcctgtaaccccagctacttggaaggctgaggcaggagaatcgcttgaacctgggaggcagaggttgcagtgagctgggaccgtgccattgcactctagcctgggcaataagagcgaaactccatctcaaaaaaataaataaaaataaaataaaataaaataaatttggctcctctgattttaaaatcgatcggggtttcctatgacctataggaccaagaacaaactccctctcttgacattgaagactcttcacagccttctcccaaactccttccacctctcctccctaccttttgttatagttacagccacttggatgatttcctgttcttaaagcaggccagtcacattttttgtccagacttctccctctgcctggaatgttctccccttcttccctgggcaaattccccccatcttccaagacccaatgcagaagacaggttcattagaagccccttcagggtacttccagtgcctagaatccagcctgacattttggttgaataattaattaatcagatcaaggacctcttccctgagtacccaacatagcccccctccccaacgcctgtgctccctgcacacctcctccatgctatgttggaacttcttgaagtcaggcttcatttcttttgtttcgtttctttctttgttttctcttctctttttctttttctttctttctttcttttttttttttttttttcgagacaagagtctcactgtcgcccaggctgcagtgcagtggtgccgtctcagctcactgcagcctccacctccctggttcaagtgattctcctgcctcagctgtcggagtagctgggactacaggcacccaccaccacacccggctaatagagacaaggtttcaccatgtcagccaggctcatctcgaattcctgacctcaggtgatccgcccgcctcagcctctcaaagtgctgggattaaaggcgtaagccactgtgcccggctgcgtttcttttttcttttcttttctttctttctttctttctttctttttttttttttttttttttttgagacagaatcttgctctgtcacccaggctggagtgcaatggcaccatctcagctcactgcaatctccgcctcccgggttcaagagattctcctgcctcagcctccggagtcgctgggattgcaggcacccgccaccgtgcccggctaatttttgtattcttagtagagacggggtttcaccaccttggccaggctggtctcaaactcctgacctcgtgatccacccgcctcggccttccaaagtgctgggattacaggcgtgagccaccgcgcccggcctccggccgcgtttcttttcttttttagaggagtcaggctggagtgccgtggcacaatagctcactgcagcttcgaactcctgggctcaagtgctcctcccgcctcagcctcctgagtagctaggactgcaggcgtgcaccaccacgcccggctttttttttattattattaatttttttgtagagacgggatcttgttgtattgcccaggctggtctccaactcgtagcctcaagcgatcctcccacctcggcctcccaaagtgctgggattacagctgtgagccaccgcgcctggcacaggcttcatttctgatggtccttcctttttccttgatgcctttctctgtacctggcacatagaggtgcctggtacgtgtttgttgaatgaatgaatgaatgagtgaatgagcgaacatgccatttcaccttatatatcttgtgaacctgccaggcccgggcctgatgtcatagcctctacccctggcccgagtctccagtcccctgcgtgtctgctgaccacagcacgaacgccagcgcactaccctcctcaaccccagcccaggccccttccccgtcggggtccccccaaccctttccccgcccgcttccccgccccggggccgcttagcctccagctcagcgggaggtatccccgcccacggccaggattggaggatggaggcaacgcccaccccgccgggcggcctcctattggcgcggccgtcgccaggggtggggacaggaccggcggctgctgacgccatcccggccagaaaagccctggccagtggcgggcgcgacactatccgtgcggccaggcggaggtgagtgcgcggcggccggatgggcgggacgggcgtggaggacgccgagcaccgtggcgcgcgctcacgtccgcgtccccaagggctgcgctccctcaagcgcagtgcccagaactcggagccagcccggcccggggg

SEQ ID NO: 38311 - DNA, 2300 bp, Homo sapien
tggggacaggaccggcggctgctgacgccatcccggccagaaaagccctggccagtggcgggcgcgacactatccgtgcggccaggcggaggtgagtgcgcggcggccggatgggcgggacgggcgtggaggacgccgagcaccgtggcgcgcgctcacgtccgcgtccccaagggctgcgctccctcaagcgcagtgcccagaactcggagccagcccggcccgggggaccctgctggccaaggaggtcgtcagtccggtcttgtcttccagacccggaggaccgaagcttccggacgacgaggaaccgcccaacatggcctcggaggtgagtgggacctcggggactccggtcctcctagcctccaaaggagagagtgggggcgccagacctgcctcgggccaccctgctgggaatcgccctccaggaagcaattttgaaaattacctaggaagcctgcacccccagccctcccgggcgcatcatctggagcccagcagtcacctttaccaggactcaccagtatccgcaggcagcccttgtggcaaacccaccaacccacactactaggggtagagtggctctgccctcacctcacagtgatgcctgcctggccaggaaaagtggctcccaagccttcagccttccaactcttccttccttcttaccacgtgtcctcctgtcaggtcccaccccacaccacatcccttctcctgctagagcaattgtccctgtttatagaataaagctcagcccctaagtgttcttgtccttgactgtggcatgtggaaagagccaggaaaaaggggacgtcgcctcgtggctccagcaaccctggtgcctggtcccttcctgtctcactggaccctgcctcttagggtcagtggctcctggcctctcctcctgaccactgagatgctggattcccaggcagaggttttccttccttgggccatagttgatttatctggcaatgggggtaataatagctgtcggcctcactctgtaaggcactagattatgaggccattgctttggacccttcaggtgagaggggctgttcgcctgatgcttgatgaagggaactccgggaagcaggaggtctgggttccaggcccttttggccttcattagctagcaattcacttcctctttctcaatgccctgcaagctcagtgccctgcaagcttctgggtcatggcaggggggtagggcctggactttggagccaaacagacttggtttctgtaccagtcacttgagccctttaaacctctttcctcatttgtgaaataggggtaatattgcccacctcataaaaggccgtaataacatatgtgaaatccctagcacagggctgagcaacagtaggtgctcaataaatggtggctaaccacaacaatactgatatttctactttgggaggccgaggcgggaggactgctgaagcccaggaattccagaccagccagggcaatgtaatgagaccctgtctctacaaaaagattttgaaaattacccaggtgtggtggcgtacacctgtagtctcacaggaggcggaggcatgaggattgcttgagcccaggagtttgagactgcagtgagcatgatctcaccactgcactccagcccaggcaacagagtgagatccagtttcaaaaaaataaaaataaaaaaacctggcaggcatggtggctcacacctgtaatcccagcactttgggaggtcgaggtgggcagatcacctgaggtcaggagtttgagaccagcctggccaacatggtgaaaccccgtctctactaaaaatgcaaaaattagctgggtgtagtggtgggtgcctgtagtcccagctattcgggaggctgaggcaggagaatcgcttgaactcgggaggcggaggttgcagtgagctgagatcgcaccactgcactccagcctgggcgacaaagcaagactccacctcaaaaaaagaaaaaaaacccacaagtcccaaaaccaaaactggtatttcccatgtacattcgaccttaactgttgctcattcaacccagcccaactcagtgccccatcccctggccctgaagagaccattctggcccagatgtgtcctggcttggagtagcaccttctgctaccacactaggcctccactctcctcagtgcccaaggggaggcacctcactctgatctccctgtggggtcctcttatgcctgccagtaaggataggagtttggttctagagcagagtggtctggcttccaacaagcccagtgttctaggtgacctcaggttgccccag

SEQ ID NO: 38312 - DNA, 2300 bp, Homo sapien
ctcaccaccacacctggctaacttttcgtagttagggggtctagctatgttgcccaggctgctctggaactccttgtctcaagaaatcctcctgcctctgctccccaaagtgctgagatcaagcctggcctcctttttatttttatatttttgagacagagtcttgccctgtcttccaggctggagtgcagtggcacgatcttggctcactgcaagctctgccttctgggttcacgccattctcctgcctcagcctccctagtagctgggactacaggcgcccaccaccacgcccggctaattttttttgtatttttagtagagacggggtttcaccctgttagccaggatggtctcgatctcctgacatcgtgatctgcccgcctcggcctcccaaagtgctgggattacaggcgtgagccaccgtgcccggccagcctcctttttaagtagttttccattgcacaaatgtagcacattttattcatccactcatcagtctctagttaatgcatctgttgtatatgttcagattggctggggttcaatacccactggacaacttcctagatgagtgacttttggtaaatcataatctctccaagtctgcctcagtttcttcaattataaaatgtcaataataatgcaatgtacctcatagagagtcatggttgtattgccacagtaattaataaagtgccaggaactttataaggattatttaacacccttattatttacaaagtaggcaacagaggctattgtggtggttcacacctgtaatcccagcactttgggagttggaggtgggaggatcacttgaggcgaggagttcaagaccagcctgggcaacacagtgagacccccatctctacaaaaaaattaaaaaattttgtagctgactctttggacaataaagaattttattttagaaaattagccaggtggctgggtgcagtggctcacgcctgtaatcccaacactttgggaggctgatgagggtggatcacaaggtcaggagttcaagaccagcttggccaagatggtgaaaccccgtctctactaaaaaaatacaaaaattagctgggcattatggcgggcacctgtaatcctagctactggggaggctgaggcagggaactgcttgaatccaggaggcagaggttgcaatgagccgagatcacgacactgcactccagcctgggcaacagagtgagactgatctcaaaaaaaaaaaaaaagaaaaagaaaaagaaaaaaagaaaattagccaggtgtagcggagcgcacctgtggtcccagctactctggcaggctggggtgggaggattgcttgagcccaggagttcaaggctgcagtgagctctgattgcaccactgcattccagcctgggcgacagagcaagaccctgtctcttaaaaaataaataaataaactgcaatgtttctggcagcccagatgccaccagcctcactactctctgagaggtgggattttaacatgcaaaggcccactaacccgatcacgtctcacaacttcagctgattaatactttgttaaaacctagaccacgaaaacagacagagcccggcgaggtggctcacgcctgtaatcccaacactttgggaggccgaagcgggtggatcacgaggtcaggagttcaagactagcctggccaagatgatgaaaccccgtctctactaaaaaatacacaaattagctaggcgttatggcgggcgcctgtaatcccagctactcgggaggctgaggcagggaattgcttgaacctgggaggcagagattgcagtgagccgagatcgtgccactgcactccagcctgggtgacagagcgagactctgtctcaaaaaagaaaaaaagaggctgggcacggtgcctcacgcctgtaatcccaggactttgggaggccgaggcgggcggatcacgaggtcaggagattgaaaccatcctggctaacacggtgaaaccccgtctctactaaaaacacaaaaaattagccgggcttggtggcaagcgcctgtagtcccagctacttgggaggctgaggcagaaggagaatcgcttgaacccaggaggcggaggttgcagtaagccgagatccagcctgggcgacagagcgagactccgtctcaaaaaaaaaaaaaggttaaagaaaaaaagaaaagaaaacacaagataatcctgtccgcaaacgcttagcagtcttaaatcggcctggtggaaggatgcagggacactcccccaccctgccccccgaaaaaggggaacgcgcagcgcgag

SEQ ID NO: 38313 - DNA, 2300 bp, Homo sapien
aggagttcgtggtgtgaccttgggcgtgtcacatgacttcctgaactgtgctgttgtctgtaaagggaggtggtcagactgggatcctctccaggattgcaggcctgtcttattatcttgttttacttcagtctgccaggatttctttctggaactccctgtggtcccagttgccggatttcagagattgctgtggggaatgccatggaatagaatctggccaccttgagctgagaaaggtgtttgtgattgatggttgatgccaccaagcaaacagggttaagcaacttgactgcctgcctgctgcttttaaaaaggcagctgacgacctaattctgtttagaattaggggcgaagctaaggaaactggctcaggctgtgagtatcatctctagattcagatttctgggaccacatcagaaaccaggttttatgtggacctttgatgggcagtgtggtgtgcaacgtgggggactgtgggttttagactgggcagttctggctggggattccagttctaccccttagcagcattgttgggaggacgaaaggaaatgccggatgggaagtgcaagatgcagctccagacacatgggaggcctccctgcagggctgttgctagtgggagtgaggattagaagaaggctccaaaccatttggcacatagtgggcatcatcaaccgtgttgctgatacagttcattaaattacagatgtgtgcctggcacagtggctcacgcctgtaatcccagcactttgggaggccaaggtgggtggatcacaagctcaagagattgagaccatcctggccaacatggtgaaaccccgtctctacgaaaaatacgaacagttaactgtctgtggtggctcgtgcctgtagtcccagctattcgggaggctgaggcaggagaattgcttgaacctgagaggcggaggttgcagtgagccgagattgtgccactgcactccagcctggcgacagagcaagactctgtcctgcccccccaaaaaaaaaattacagatgtgcttgtgaaatataaaagtacataaagtgccatttaacttcttcgagatgcatatgcaacctgttcaccacttctctctgtgtgtgtgtgtgtgtgtgtgtgtgtgtgtgtgtgtgtgtgtggttatataacttagctttttcctttttttcttttctttttttttttttttttttagacaaagtcttgctctgtcacccaggctggagtgcttggctcgacctcctgggctcaagtgatcctcccacctcagccccccaagtagctgggactattggcacacaccaccatgcttggttgattttttttgtttgtttttaagagatggggttcctctgtgcttcccaggctgggggttttccttttctttaaagaaaaatgctatcctacaacttggtttttactgacccattttgatcagtcgcattggctcagtccaggatgtgacttggctccacccttccgtctgtaagatggagaggactcacgaggacccaggctgtgaggtctgtgtgccaggaggccgggctgagaccatgagcacagtgggcagggctgcccaaggctgtaagtttcatttgtaaccctggaggattttctttccttctgcagatggtggaagagagtgaagagcggctcacggaggagcagattgaagctcttctccacaccgtcaccagcattctgcctgcagagccagaggctgagcagaagaagaatacaaacagcaatgtggcaatggacgaagaggacccagcatagaagagcacagctggccccggcgtttcatgaagtcagaaggcctggcagccatttcctggacgttgagaggattgtttatttgatttttatcctcatcccagcaggcctggctttgtggttagttgggtacatcacaaaaataagttaaaaagaaatatttgtgccttggggagaagaaacatggtgaaaacaggctgaggttgtcagggcagagagctgaaggtggggacagtgaccgcggacccctctgtgcttgaaagatttcctccacggcctttgccccagttgtggggaggtctctgtgcacagcggggaaaatgcttgtgtcgcctttggtgggccatgtcctaattagtttcatctgcttccctgggaacttactaaggggcccagagcactgttggaagtctggttagagtccccagagagttactctaagttaaaatgagccactgaccttggctcaccttagaggaatttcctcgagaacaacagagataagaaaagaaccgg

SEQ ID NO: 38314 - DNA, 2300 bp, Homo sapien
atatataattattatttttttttttgggtgagaggcaaggtctcagtctgtcacccaggctggagtgcagtggtgccatcatggctcactgcagcctagaactcctgggctcacgggaccctcctgcctgggtttcccaaactgctgggattacaggcgtgagccaccacacccagtcagctgattatctgtagaaggagatatcatatgtaccttagacagttgctgtaaagatcaaatgaggtccacacaaaaacttctttttttttttttttttgagacggagtctcactctgttgcccaggctggagtgcagtggcacaatcttggctcactgcaacctccacctcccgggttcacgccattctcctgcctctgcctcccgagtagctgggactacaggcgccagccaccatgcctggctaaatttttgtatttttagtagagacggggtttcaccgtgttaaccaggatggtctcgatctcctgaccttgtgatccgcccacctcggcctctcaaactgctgggattacaggcgtgagccactgcacccggccacacacaaaaacttctacacaaatgttcatagcagcatcatgtataatagccaaaaaagtagaaacagatgtccatcaatggattaatggataaataaaagatgatgtccagccaggcacggtggcccatgcctgtaatcccagcactttgggaggccaaggcaggcagatcacttgaggccaggagttcaagatcagcctgggcaacttgatgaaaccccgtctctactaaaaatataaaaattagccaggcatggtggcacatgcatgtaattctagctactttggaggcggaggcatgagaatcacttgagcccaggaggtggaggttgcagtgagccaagatcacataactccactccagcctgggagacagagtgagactcttcaaaaaaaaaaaaggtgatgtctgtataatggactattattcggccgtaacaaggaatgaagtgccgatacatgctacaacatggatgaactttgaaaatattatactgtgtgcaaaggaaggtagttaccttcccgggttcaagcaattctcctgccacagcctccccagtagctgggacgacaggcgtccgccaccatgcccggctaatttttgtatttttagcagggacggggtttcactatgttggccaggctggtctcgaactcctgacctcaggtgattcaccagctttggcttcccaaagtgctgtgattagaggcatgagccaccccacctggcctagcagagagcaattttgaatacagctgttagattctgcactcatgccttctctaatccatgtcactggagtagaaataattgctttgacagaacctggtgtagatgtgtctgtaggaagaaactgtaaaatgaatggatcattttgtgaaatatctgccctttccccacctttcttttgcttctttgcctttttctccctagttttcatttctttcttttagggcgtcagccccccacctctgtggttgggagggactattgcacgtctacactctcgtggggatgaaatagtgtttgagttcgttatttgcatttgcgcgttatctccccgaggagatgacagcttctctgccagcagcgggcaaaggtgggctctgaagcagaggagaggaattatcaggaaaagctcattttcttctcctgtcctagggtttcactgatgaaggcctctgggacacccacgttgggggtgggggcggtgaggaccgccacctgcccgcggctcccctgcagccaggccacgcgcgctgttgctagggcaaccacccggccaggcctgcggctgccgggaagccccctcgggagcgcgcacgggaagggctgtgggggcgctggccggctgcgacgtcagacccccgcccctcggcgcctgccggacccagctccattcccagccgcgcctccttcggtgggcagccggccggaactcacgaatcagagcagccgacacatcgtccgctcagccaatcgtagcagatgtgtgatcccgccacctccccggaccctggcggttgtcgctgagttggcgaccgcgggagacgctgctgaggcggcttcggttgcgggtcggaacggcgctgctctgcggggccggtccaggctggcagctgccggcgcttggcggtgagggcgggctcccgagtggccccccaccgaaggcggtgggaccagcggctgaggccaggatgccgtccaggcggcgcggcggctcctcactcatcccaggtaa

SEQ ID NO: 38315 - DNA, 2300 bp, Homo sapien
tgtgcttcagaaagaatttaaggtggcttctatgaaggtttataactataaaaattatgtttaaaaagcatgcacacaatgggaaaatgctcgtgaatattaaaaggactggatacaaaactgtgtatataaaggtaagatgatatacgtaatcttacctttgtttaacataatgcagaggagagaaaatacatcaaaatattaagaataatatgtgtaaataaataagaaaataaaaaagaataatatgtgtatgtgtctaggtgggaacattacaggtgatttttattctcttatcctttgaattttgtaagtttcatataatgagcttatatttttataatggaaatatttatatatatataaaaagtgtaaagaggatagcgattattgttttttttaatttgccctcatatgtgatggtttacaagaaggcagctcttcccatatagctgctaataatgaattgaaaaggggaaataaaagtaatacctaagagaaaggaattcacatagaaattaatctcatgaaataaatgtggcataaatttgtcaattaaagttatcaaaagacagaataaaaacatgatacggttatatggttgtagggagggaaggacactgatataaacaagagaatatcagacaaagccaaggaattttcaccttggaatcaaatagcctatcagtgaacttatgctagcatggttgtcttatttgaaatgtagtttcaaaaaagaatatatacaagtgacacaaaaaactgcagttgacagggaccaggcaatgaagagtatgggtacagaatttcagtttgggaagacaaaaaatgttctggagatggacggtggtgacagttgcacaacaatgtgaatgtatttaatgccactgaattgtgcactttaaaaagtgtcagagtggtaaattttatgttaaatatatcttactgcaataaagaaaagaatgtataagatctgatttgaaatagactcaactggtaggctatataatctagctctgaattttcagcactttctgaaataatatattgtaaagacgtgagcataacttattaaaataaaaactgtaatgtcactttaatagcaactttctcttaatcagaaggctagtgtttaataatttttctagtgtaaccaatgtttagcttttaggtatccaaaaattatgcctcatctaaacaaaggtttaaaagtaaagtggctattagatttacagaaagaaagaaatcagaagtaaggtcactaataattatggtgtttatgcagatctgcagtaattggctgagaataaatctcccaacagtgagtatcattcctagaaactgagcaaaataccctaagaactatccccaacgagccagttatccttaaaatgcagtggaagactgctgataagaaagcattctacaaatataatttttcttcattcttttttcttattttgagacggggtcttgctctgtcacccaggctacagtacagtggcatactctcagctcactgcagccttgacctctcaggctcaatcaatcctcccacctcagcctcccaagtagctgggactagagtcatgtgccaccatgcctggataatttttatattctttgtagagatgggggtctcactatgttgcccaggctagtcttgaaatcctgggctcactcgcatctcggccttccaaagtgctgaaactacaggtgtcagccctatgctgggcccaagtttttcttttttttttttgagatggagtctcgctctgtcatccaggctggagtgcagtggcgtgatctctactcactgcaagctctgcctcccgggttcatgccattctcctgccacagcctcccaagtagctgggactacaggcgcccaccaccacgcctggctaattttttgtgtatttagtagagaaggggtttcaccgtgttagccaggatggtctcgatctcctgaccttgtgatccacccgcctcgacctcccaaagtgctgggattacaggcatgagccagcgtgccaggccactaggcccaaatttttctaattcaaaatatttttctgggggaggaggagccaagatggccgaataggaacagctccggtctacagctcccagcgtgagcgacgcagaagacgggtgatttctgcatttccatctgaggtaccgggttcatctcactagggagtgccagacagtgggcgcaggccagtgtgtgtgcgcaccgtgcgcgagccgaagcagggcgaggcattgcctcacctgggaagcgcaaggggtcaggg

SEQ ID NO: 38316 - DNA, 2300 bp, Homo sapien
ccatatcagtaactgcagtattttctactgtcacttgagccagaaactgaagagtcacacttgatttcacccttttcctccctctttccattcgcatccaagatctttgatcctaccttcaacgtattttttggatcacagcagaataagagtttttagaatgcacatctggacaggagcctccccgcctgaaacatttcagtggcttccatttcacttaaaagagtccagactcctgtcagggccggcagggtcctcctctccatctcatcgcaggcctctctcccaacctcaccgcttgtgctctagaagtatctttattttcagaacatagcaagttcttcctgtctctacatatctcctctctctggaatgttcttccctttggctatttaagatgaagttttgctctgtcacccagctggcctgcagtagcacaatctcggctcactgcaacctccgcctcccaggttcaagcaattttcctgccttagcctcccgagtagctgaaattacaggcatgtgccaccacgcccggctaatttttgtatttttagtagagacagggtttcaccatgttcaccaggctggtcttaaactcccaatctcaaatgatcctccctcctcagcctcccaaagtgctgggattacaggcgtgagccaccacacccagccccctttgttctttgtctgataggctccttctcaattctgtggtctcggtaagcctcacttactcagagggattttccctggcctcttaaactaaaaggtaattctcccgctgcttgccttcttcatggtcacactttgcagtgtttcatctgtttgttgccttttttattatctgtctcctccaccagccaataagttcctggagttccaagactatgttttttcttgtctgttgtacttttggcacctagcaaactggcactttctagaaaccaagtaaggccggtcgcagtggctaatgcctgtaatcccagcactttgggaggccgaggtgggcggaccacaaggtcaggagatggagaccatcctggctaccacggtgaaaccctgtctctactaaaaatacaaaaaatcagctgggtgtggtggcgggtgcctgtagtcccagctacttgggaggctgaggcaggagaatggcatgaacctgggaggcggaggttgcagtgagccgagatcacaccactgcactccagcctgggtgatagagcgagactccgtctaaaaaaaagaaaagaaaagaaaagaaaccaagtaaaatacttggtgaattactaatcctccaaagagccttctgacatacatactgttttacagatcaggaaacaggctcaactaggtcaggtcacttacacaaggccccccacctagtgccacaggtgacttggcatgtagctgggcccaggcacaagcctgactctaatgtcctctgcagtccacttccctagccctgtccctttccatttaaaatgaatatgtccagcctgggcaacataaggagaccctgtctctacaaaaaaaatttttttaattagccaggcatggtgtgcacctgtaatcccagttactcgggaggttgaggcaggagaattgcttgaacctgggtggcggaggttgcagtgagccaagatcatgctactgcactccagcctgggcgacgagggagaatctctcaaaaaaaaaaaaaaaaaattaaaaatactgctgtcagatcaatcttgtgtttaacactgttttaagtcactcatttgctccaaaacctttaattctccaatgcctaacattacatctaaatgtctaagctggccaggcatggtggctcacacctgtaatcccagcactttgggaggccaagaagggtggatcacctgatatcaggggttggagaccagcctggccaacatggtgaaactccatctccaataaaaatacaaaaattagccaggtgtggtggcacacacatgtaatcccagctactcgggaggctgaggcaggagaatcacttgaacctgggaggcggaggttgtggtgagccaagatagcaccattgcactccagccttggtgacagagtgagactccatctaaaaaaattaataataaatgtctaagctattctgctgccacaatgtggccttactgctccctgatatacggtgcctttctcctcccttgtttcattctcttcactttcttcttccagatgctcgtacacccagtccccctacctgggaaatcacaacctcattaagagctcagctatcttaagtcctatttcctcatgaagtc

SEQ ID NO: 38317 - DNA, 2300 bp, Homo sapien
caggcagagggtttcctcacttctcagacggagcggccgggcagagacgctcctcacctcccagacagggttgcggcccagcagaggcgctcctcacatcccagacagggcggtggggcagaggtgctccccacatctcagacgatgggcagccgcgcagagacgctcctcacttcctagatgggatggaggcggggaagaggcgctcctcactttccagactgggcagccaggcagaggggctcctcatatcccagacgatgggcggccaggcagagacgctcctcacttcccagacagggtggcggccgggcagaggctgcaatctcggctctttgggaggccaaggcaggcggctgggaggtggttgtagcgagccgagatcacgccactgcactccagcctgggcaccattgagcactgagtgaacgagactccatctgcaatcccggcacctcgggaggccgaggctggcggatcactcgcggttaggagctggagaccagcccggccaacacagcgaaaccccgtctccaccaaaaaaaaacgaaaaccagtcaggcgtggcggcgcgcgcctgcaatcgcaggcactcggcaggctgaggcaggagaatcaggcagggaggttgcagtgagccgagatggcagcagtaccgtccagctttggctcggcatcagagggagaccgtggagggagagggagggggagggggagggggagggggagagggagagggagagggagtataccataaatttttaaattccccataactcttccttattccacttaaccactttatcttaaattactcatgtttgcttcagtagcacatatactaaagttggaacgatagattggcatggcctctgtgcaagaatgacatgcaaatttgtgaatcattccatatgtttttaaaaagaaaaaaattacatccggattttcactgtgtacatatgaccttttgtttaggttgaattatatccaaagatggtatttccagaagtgagattactgtgagtcacagggcatgagcattcttattacacttgatgtaaattgtcaagttttcaggcatggtggctgtctgcttataattccagcactttcagaggctgaggtgggaggactgcttgagcccagtaagttgtggctgcagtgagccataactgcaccactgcaccgctgcactccagtctgggcaagagagtgagatagaaggttgactttttaatagaatttttctgttcacttaaagatatggccaggactgtgctatatgaaaattttcataaaataattatctcatccaattaatgttggaattgggaacagaaaatgttttggtgactatttattccttcacttgctgttatagaaactattgccagtgggcacttaacaacgaagtgtcatctctgagctactcacaatgaaaggtgatgtctggggcccaggtgtgttgaggtccccatgtctgggctatgggtgctgagtgggacttacttgtccatccattttctgtattccagcactgggaaacttgcgtttatccatcttgataaaaggtcatttaaattccacctggcaaaaaccacaaatggaaaaaaggccatgaaactacaggctagcccttgttctcaaaagaatatttagctaaggtggttctgtaaaagaggaatcacattgttgaaaactcatcgcaggtcaggtgaggtggctcacacctgtaatcccagcccattgggagactaaggcaggaggatatcccgtgaggccagaaattcaagaccagcctgagcaacagagcgaaacctcatctctgcaaaaaattagaaaatgagctgggtgtggtggcacattcctatagtcccagttactttggaggctgaagtgggaggatcaaagtggaagctgcagaagtagaagctgcagtgagctctgatctcaccactgcactccagcctgggtgacagagtgagaccctgtctcaacatacacacacacacacaaacacacacacacacacacacacccctcatctcagtctgcccagccttgactagtgaaaagggtcttctggttacagaagaggtatgctcttttttaggacagggagggaccagcaagcttgttcacagcctttccctcattctctgcttagttttccaagaaccttcaggtggaaagggagtccctggagaaaagacctaactcatcaggttaccaaaggagaaatatgcatcctttgtcaattaataaatggaacacctgccttaaaaaccagggagttctgc

SEQ ID NO: 38318 - DNA, 2300 bp, Homo sapien
ctgcccatcagttccatattcacccttcactgcctgatctgcaaacatagaggtgggttccttaaatgcttcttctgtcagctggtacatgattaaatgttgtcagtacatagtactagagggaccttgtaagaggcttttctttctggttgtggtgtgcgaatctccacaggcactgagcttctccagtaccgggctcttgccctgcacggtgctcagcagcacccagtgaccagcagtttctctgcacctgcctgggtggatttgtagtgagacaactgttcattaatagcttaatctagcaccccagagggtgaattttcagcaaattccagagggcagattgctagcatgttcgaccatgtggtaatgcagcaattctgctattgaattacccatgactgtgctctctccaagtgggggctggatctcagccatagtgggggagtcttttccttgatcacagtatctcagcattgggacagtagggacagttactgcttgttatatcagctggtcctatactctttttggagacagggtctccctctgttgcccaagctgaagtgcagtggcaaaatcatggttcactgcagccttgactgccctggctcgagcaatcctcccacctcagtctcctaagtacgtaggactataggtgtgtgccaccacacccaggttttttgttgttgttgttagttagtttgtttgggtagagacagggtctcactgtgtttcccaggctggtctcaaactcctggcctcaaggaatcttcctgtcttggcttcccaaattgctgaaattataaacatgtgccaccatgcctggcctctgctagtcctatattctctagcattctctttactttttggtagcaaatctctcattatgctgttgccctgttataattaataattttttattttaaatttaacactttaaacttttgagtggtttatgtctcctgttaggactctgacaaatacagaattgatgctaggaagggtcccgggagatagacccagacaactgggatttggggatgggtttggttatccaaggggcagcgctgagctccttgccaatgggaaatgggatgctggtgatttccaggaagtgacctcataatgactcaagctaccacttactgttgattgtgatgaaatgccagtggaggcacatgccttgggagctaagtggctgctgcacttgaccactatgaagactggtgtgggaagaatccttttggatgcacttcagcagggacccctgatccctgggtcacaggcctgtactgggccacacaacaggaggtgagtaagggtgggtgagcgaagcttcatctgtatttacagccgctccccacattaccacctgatctctgccttctgtcagatcagtggcaacattagattctcatgtgagcacgaaccctattgtgaactgtgcatgcaagggatctatcttgctctgtccttaggagaatctaatgcctgatgaactgtcattgtctcccatcacccccagatgggaccatctagttgcaggaaaagaaggtcaagactcccactcattctacattatggtgagttatgtaattattttgttatatgctacaatgtaataataatagaaataaagtgcacaataaatgtaatgtgctttatatatcccaaaactgaccttcgctgcccctagtctatggaaaaactgtcttccacaaaaccggtccctggtccccccaaaattggagaccgctgcacttgagcacttacagagagaaaagcaaaaagctcaagtctttacctctcagcataagtcatggtctgagatccagagagctcccatgatagcacaaacacaattccttatttcttgtatccacaggggtgatattattggtaatcaatatcaattggtaatcaataattattaaacgtgttggttgctgaattaccatgacagttgaattcactgtgtcaccagggttctcatgataatgttagggcactaataagtgaagaatgggaactttttctcttttcttttttttttttttttttgagacagtcttcctgtgttgcccaggctggagcacagtggtttgatcttggctcactgcagtctcaacctctcaggctcaagctatccttctgcctcagactctggggtagctgggacaacaggtacgagccatcatgcccaactaatttttgtgttttgtagagatgtgtttcatcacattgctctggctggtctcaaactcctgggctcaagccatccacccaccttggacttc

SEQ ID NO: 38319 - DNA, 2300 bp, Homo sapien
atgtttgttggctgttggtatatctttggagaattgtctattgaagtccttttcccatttgttaaccagattattattattattttttttgttattggcttgtaggagttcctttatattctggatattaaccccttattatatatgtggtttgcagatatgttctctcattctgtgtgttgttcctttttactctgtcagttggttcctgtgttgtgcagacattttaaattttgatgtaattaatatatttgtctgattttgcttttgttgcctgtgcttttggtgtcatatcctagaagtcattgcaaaatccagtgttgggaagcttttcccctaagttttctagtttccagcctttacatttaggtatttaatccaatgttagccctttcttaatgggttctgtgtattttcggcagggaataagtctttaatatgactgtttcaggaatttaccatagttaacttttcctttttccttcttccttcctcctctctttccctccctcattccctccctccttcattcccttcttccctctcttacagcctgaagataatggaagcactcactttttcttcataattgctaagactttagttagtagaatgataattccttttcaacagcactttgtcatttgttcattggttagcagtaagaagatgagccttaagtctgaacgctgaggaattcatgtgcatcagtcggacctcctgtgcaagaaaggatgtggttactacggcaaccctgactggcagggtttctgctccaagtgctggagggaagagtaccacaaagctaggcagaaggagattcaggaggactgggagctggcggagtggtaaaaggacttaactaggggcggttgaacagtggcgtgactggatacatacttctgtcaccatccaaatacatttttttaaatttctgctttgacctatcagcaagtcagtttaaaattaaggaaaaggatgttttcccctcttcttctcagtcaacctttaatgaacagctttgagtattttcttcattttttgtatgtcttaacttctgattatattctttgggttatgttaatcttggttctcaaatgtagacaataagctccttggaatggaagaatggagataggcatatttcctggtgaagattaaatgagctaataaatatgatgtacccagtgcagggcttgcaaatggcactcatcaagcattatttccctcattcttttaatatattcagcgtggcatctagctcagtgataaaacacagtagtagaaatctgttgacttgtatacatagtccttgcattatagaaatttaacttttccttaaaaattaggttactcaaaggcagtttgtattatctggaaatataatgatgttaaaaattaaataatgggccaggcgcagtggctcatgcctgtaatcctagcactttgggaggctgaggtgggaggatcacctgaggtcaggagtttgagaccagcctgaccaatatggtgaaaccccatctctactaaaaatatttaaaaagttagccaggcgtggtggtgtgcacttgttatctcagctacttgggaggctgaggcaggagaattgcttgcacccaggtatcggaggttgcagtgagctgagactgtgccactgcactccagcctgggcgacagggtgagactctgtctcaaaaaaaaaaaaattaaatgatgggatggctactgagcataggaactaataaaatgccatgaataatgttaattctttgccagagcattttagaaattctaaaactgcttcaacagaagaaaggcaaatggaattctgccaactcttcttgctagtttttttgttttttcatccagtcagccaatatttgttgagtgactactttgctggcacctgtggtgagctcagagaattagaaattacacattgctttcagtgactgtggtcatcaaagagaaaattttagccaagaacatgaatgatctcctcagggtttccactgcatgcctgatgttgtcagtagcagatcctgtttcaaaaacagagtagaggccactaggcacgaactgcctcagcttactcccttcgccacataaaaatgtactaatacctttatattaacttcttgtccgtcccagagaaagaagtgtcccgattccatactcagacttagcacctcccctgtgatttttgtttctatttcttactgcttttaattgtgaccctgctaaatctcttggaaagcttgtgaaagcagtgattgctggaccttacccacagagtctct

SEQ ID NO: 38320 - DNA, 2300 bp, Homo sapien
ggggagggggtgaaggttgaagtgagccaagatcatgccactgcactccagtctgggagacagagtgaaactgtgtctcaaaaaaaaaaaaaaaaaaaaaggaaaaaagaaaatggctttggcagaggggctggccaggcagtgccttcccttgggtttctcctgggtaggcctctgccatgaggaggcgcttccttctgcctgtccatggcccacagcaaaggaatgtctgcttctgggggttggatgggggactgctggcagaactggaaaccttcttcaggtgggttttttttttttttttgagacggagtctcactctgtcacccaggctggagggcagtgacacaatctcagctcactgcaacctctacctccccagttcaaacgattctcctgcctcaacctcccgagtagctgggattacaggagcatagcatacctagctaatttttgtatttttagtagagacagggttttgccatgttgcccaggcgggactcgaactcctggcctcaagtgatccacctgtctcagcctcccaaagtgttgggattacaggcatgagccaccgcccccagcactcgtcaaggtctttgatggcaggtttttccaggtgatcagtccttgtctggtctggctctgtcccactctccctctcaccaagttcgaacccctagctagttttcagaggagtagagtgtgtaccccaatcccaactgggtatggttcagatctgcatttaactcatgaagcctggctgctccgcaggtcctggagaaaaaaagagtctcgctgcaggtatgatacaggacaggcttgtccccaggacccgcctgtccccaggaagagggaagcccaatgtcccaccaggttggcagggctggggaagggaaagtgttatagtagccccaagactaaaaagaggcagcagagggagcaggacagtgctcccatggaactcaagccgctgcctgagtgaggtgagggaagagtgcacccactgacatcagggggcagagaggtgcggttccagcgcggcttttccccttgcgtcttgccatgtgactctgatcccctccaggtgagcctgcccactttgggcccagggttgccgctggggcctgtacccaaaagcagccccccatggccatgaccccactcccaggagtggggcagagcagggaggagtcctggaaagaggagacgcagggacaagaaggaatgggcctcaaactccaggagggggaccttctcatgggtcctgttttctggtctctcctcgcttacccctgggctgatcaccctgggaagaactgagccaaggtttctcaccctcaggtccaaggggttcaattaccgggcccttagggagatgcgagccccctaaaacgatgcaaagttcctggcctaatttttatatttttagtagacatggggtttcacccatgtctactgatcggaatgcctcgagcacacaaaatgttggaatttacaggcgtgagccaacgtgcccggccagccctatttatttcagcctatacattttgcacttgttaaaagtatttgaacatacaattatcatgttttctttaagcagtccctccctgttgtacacttggatagtttatttttttagacaaggtttacctccgtctcgcaggatggagtgctgtgatgggatcatagctcattgcagccttgaaccttggggttcaagtatctgggaagctgaggtgggactacagagatggggtcgcgccatgttgcccaggcagctctttaactcctggcctgaacggatccttccgcctcggccgagcctggacatagttttctagttttgacccacagaaacactgtgctgggtcggagtttgtcaaccacccttctccagccagcaacacacagaacatggcggggaagtcgcggttaccaggctccactccgaggaaaaaccagcgcagctccaggcactgtagcgccactgtgacgtcgccgaaggccggcgctattacgacgccggaaggcccgcgcctgtgacgtcagctgaggcgcgcccctgtgatatctcacaggcccgccccttctgtagaaccaatcggaactcgaggcgcagcggctgggtattccaggagagcgcatgcgcagacgcatggccacagactgccggtcagtgtcagcaggcggtgggttagggtccgcaggcccagaccaggccgccgacaccaataagctacaaggaggagctttaccgctgcctgtactactactgcctgcgctacttcccagcctgcggc

SEQ ID NO: 38321 - DNA, 2300 bp, Homo sapien
ccatccctgggatctggagcccctgctctggggaaggagaggtggggcgctgccttcccagagtcccctcaagctggcagggacggctgtacccccagggtcagaggagaactaaaaggagcggaagctggcctgggtccagggagagacctcgtgtttgcccaaaagggagctggagaggggcagctgggcccatatgcagggaggagctgcagggagctggtggcggggcagcaaagagaagtggatttggtgggtagaggggcccctccttggttctagtcctccccgcagccccttgcaaacaggcggggctctcctgtccttcttgtctcctgcagcaagccctacatgaagaggcctctttggtgagtggcagctcaacctctgctaaatgcctccagtgatggggagttcactaccttccaaagtttttaaaagatgttaaccactgctattcaagaacaattctagaatttttttttttttgaaagacaaggtctcattctgtctcgcaggccagagtgcagtggtgtgatcatagctcactgcagctttgacttcctgggctcaagcaatcctccctcctcagcctcctgagtacctgagactacagatgtgcaccaccacactggctcattgttttcattttttgtagagacaggatctcactatgttgcccaggctggtctcctggcttcaagcaatcctcctgccttggcctcccaaagtgctgggattacaggcgtgagccactgcatctggccttttttttttggagatagagtctcgctctgtcgcccagggtggagtgcagtggcgtgatctcggctcattgcaacctccgccttccgggttcacaccattctcctgcctcagcctcccgagtagctgggattacaggcatctgccaaccatgcctggctaatttttgtattttttggtggagacagggtctcaccatgttggctaggctggtttcgaactcccgacctcaggtgatctacccgcctcagcctcccaaagtcctgggattacaggctgagccaccgcgaccggccctgctgttgcttctgaggtttgaaaaccgctgcctcaatgctcctgattcagctcttcttacccaaaggttcccccacctcatctactctgttcctgcacagtcgcccttttctctgatgccccgggcaggtttctctctgccagctccacgcttctggagtcccccatccgtcttggggcccagctgcccactgtctgggttcagaccttctcaacactccctggcttctctgccctagttttgccttctccaatccactcttggtgggtggaagtacggttaccatggtaacttgaagacaacgcaaatctgattgtatcattacaatgactgggaaaacctccagtgccacaaaataaagctcaagtcactagctttgcagtccaggccctttaccattccggcagcatttctgggggctattctccttccccccactgcacaaccccgcctggccaccccaggctcaggctgcagaacagcgtagaccagggagtggctttggggtcatgctaactacctggtttttgtctctttcaggctgtttgctcagttgcaaaatgggaaggacaacagcacccgcctcacaggctaagaggctgtgtgtgaaaagcccgcagcacaggatctggcacgcgtggacgtgcgggatgggaggaggggatttcccagctcctcatctctgcagggactggccttggcctagggaacactagctgtccagggagggggagctttccctgagccccccgatgtgtggcaggcagaggagagcaagctacttctgggaggggagttgtggggaagggcaagttagtctttactgagggtggcagtgagctggcactttggtctcacctcggctgcagaaacccaccctgctcccgtcttatttcctggggatttcagctgtgtgcaggcacagatgcatctcccaagtgcctcatgcttgccttgatctcctctccttcctctggccagtcctgaacctcttggtgatccacggcggcacctctgtgtcctacatccttctctggccatctccttccctccttccagccctccctctaggaccctgaccccaaccatccttcatccccatggggacattcagtccactgactcatcaccctcccctgtccctctgtgagagaaggagcaggcagagaggatcttgcaagagccttcagcaactctcttccacccatcctgttgcttgctgctttttttttttttt

SEQ ID NO: 38322 - DNA, 2300 bp, Homo sapien
caaactcttgggctcaggtgatccacccgccttggcctcccaaagtgttgggattacaggcgtgagccactgtgcctggctgtagctggtttctagccccagttgttggtctgtccatccatccatttttctttctttgagacatggttttgctctgtcacccaggctggaaggcagcggtgcaatcagatagttcacggcagcctccaaataccaggctcaagtgatccatactgcctcagcctcctgagtggttgggaatacagatgtgtgccaccatacctaattttttaaatttttggtagagatggagtctcactatgttgcccaggctgatcttgaactcctggcctcaagcgatcctcgtcttggcctcccaaagttcgggaattacaggtgtgagccacggtggccagcccatccgacattttcttatcagtgtccccagcataggccctgtgttgggcacaaaacaacctaaagaggcagggctgctcccctgagggtctcccagccagagggggtgtcacctggtcaccaaagtacaacagacacacttaggagacaaggggcatgaatgaggatgcccatcctgtctgggcaagtctggggagacctcccccaggagagcaggatgcttgaatgggctctcaaggcctgacattggtggctcatgcctataatcccagcactttgggaggcagaggcaggcagatcacttgaggccaagggttcaaaaccagcctggccaacatggtgaaaccccgtctctactaaaaatacaaaaagattagctgggcgtggtggcaggcacctgtagtcccagctactcgggagggtgaggcaggagaatcgcctgagcctgggaggtggaggttgcagtgagcagagatcatgtcactgcactgcagcctgggagacagagacctgtctcaaataaaaatgaaaacaacaacaaaaaaaatgggctctgaaaaggcaggtaggagtttgtgaaggatggagtggcagtgtgaagacaccggggcagaaggaccagccatgcacaggcactcaagggtgaaagatcctatgctggccaggtgtggcggctcacgcctgtaatcccagcactgtgggaggctgagacgggcagatcaccctggccaacatggcaaaaccccatctctactaaaaatacagcaattagccgagtgtggtggcgggcacctgtaatcccaactactcaagaggttgagacaggagaactgcttgaacccggaaggcagaggttgcagtgagccgaaatcacgccattacactccagcctgggtgacgagcgaaactccgtctccaaaaaacaaaaaaaagaaaagaaaaaaaaagaaagatcccttgtcctggaagtggctgaacttgggggtggtacaggggagacaactgatgggcctagcggggtccgtgcacaggggccggtgtcactgtgctgggctgttggaaatcccctgactgctcgctggccaaggtctgtgaatgggaaacagactgtgtctgggagtgtgggggctatgcattctccctgctcactgccctggcaactgtcacggcttatctgctgcttgagccccggcgtgctccgctctcccctccctgtagcctagagttgctgctggggtcagttagccctggagacggggcctgagctgggctgtaaggctgaggggtggttgggctggagatggggtctggggcagagctctgcagcagcctgtgggtttgtgccagggttgaggatggggctgggattgcaggaaggctggtttgcatgtccaacaggaaatctctctgagaagcatgggttcacatgggctgggcctctggggcaggcaggttgggtaagggtgagatgttgaggggggtgaagctagaagcaggcagggagctagggccggatgaggcagggcagagcagactgatgagtcgttggaacaaaatgactccttttttttttctctttgtttttccaagacacagtctcactctgttgcccagtctggagtgcagtggcgcagtctcggttcactgcaacctctgcctctcaggttcaagccattctcgtgcatcagcctcctgagagctgggactacaggcgcctgccaccacatccggttaatttttgtatttttagtagagatggggttttgccatgttggccaggctggtcttgaactcctgagctcaggtgatctgcccacctcggcctcccaaagttctgggattacaggcgtgagccatggtgcccagcctggctcctgtttttt

SEQ ID NO: 38323 - DNA, 2300 bp, Homo sapien
tcagcctcccaagtagccaggactacaggtgcacaccaccacgcccagctaatttttgtacttttattagagatggggtttcaccctattggccaggctggtctgaaactcctgacctcaggtgatccatctgcctcagcctcccaaagtgctggggttacaggcgtgagccactgcacccggccaaaagaattgtttttaatgaccgggtaaaaggcttaattgtattaactttttaaaagtctgtgcgataaaaaataaaactcagataaagtagaaggcaacagtgggaagtcatgaatataaataagggcttaatatagtgaaatatctaaactttattaaaggtagtacctaggcttttttttttttttttttttgagatagagtctcactctgttgcccaggctggtgcaatctcggctcactgcaacctctgcctcccgggttcaagtgattctcctgcctcaccctcccaagtagcttggactacaggtggtgccaccacgcccggctaattttttgtattttgttgtagagacggggtttcactgtattagcccagatggtctcagtctcctgaccttgtgatccacctgccttggcctcccaaagtgctgggattataggcatgagccaccccacccagcatacctaggcctttatagatgagggatcaattttagttcaaataaatggcacgtatatgggtaactagttgatagtaacaagggctgcagtcaaggtaatcaaaaagtgccatgagtgcttagccattttcactgagggaatgaggtgactgcccctgaccccgagtgtcctgccatccttttagagttaagccagacagttaggctgctgcaggcttccacaggatgtattggcccttggcgtgtgatgtcattggcctgtggtagatggggtctgtgacaaccagtcctgggggtttgttctcagccttattcatgctcttctatcgtgacatccttatgagaacccttgggagaaatttttgattttggtgtcagaatttcacctgaaggattggtttgctttcatcttttgaaccctgagttatgtaactgttttcatcttagtgatgattgctaaaaagtttagttagagacagatagatgtatgggctgactcttgactaatttagacatcttccaggaaaacatttctgtcttgtcatctgtggctctgcctgtggggtttctccatgtttcttttgtttgtttgtttttgtttacttattaaattattattattttttgagacaaagtctctctcttgtcccccaggctggagtgcaatggcgcgatctcggctcactgcaacctccacctattgggttcaagtgattctcctgcctcagcctcccaatagctgggattacaggtacgtgccaccatgcctggctaatttttgtatttttagtagagacagagtttcaccatgttggccaggctggtctacgaactcctgacctcaggtgatctgcctgcctcagcctcccaaagtgctgggattacagggtgagccaccgtgcctggcctattgtttataatttttaaaaaattgtttaatgcctatctatctatatttactagagatggggtctcactatgttgcccaggctggtctcgagttcctaggctcaatcgatattctccctcatcctcccagagcattggtattacagttgttattctttttattttctagtctgttatgctgaattgcatttatcttttaaatagactttaaatattctttggcagaaagtgaggaataaatacatatattacacctataaaatcagtaaaacgaaatgaaaattatcaagcccaatgttgtaagggccatagggaaataagcgcgtacacgtggttaatgacagtgtgcaccgagtttctgaggagtgtggctagcaatagacacttagtgctataacattgattcttttttgttttttgtttttttttgttttttgagatagagtctcgctctgtcacccaggctggaatgcagtggtgcgatctcggcacaccgcaagctccacctcccaggttcacaccattctcctgcctcagcctccggagtagctgggactacaggcgcccgccaccacgcctggctaattttttgtgtttttagtagagacggggtttcactgtgttagccaggatggtctcgatctcctgacctcatgatccacccgcctcagcctcccaaagtgctgggattacagttgcgagccaccgcgcccgacctatttattcttattaagcggttaa

SEQ ID NO: 38324 - DNA, 2300 bp, Homo sapien
tttctcttgaaagggaagaaaagggacacgggatgataatggcaagattatttatttatttatttatttatttttgagacggagtttcactctgttgcccaggctggagtgccctggtgtgggatcttggcttactgcagtctctgccttgcgggtccaagtgattctcatgcctgagcctcccgagtagctgggattacaggcaagcgccaccacacctagctacccactgtgttacctctagtccttgactgtagttgtgtcttggtcagtatccgtgtctcctgttctgtacttctctctaatccaacctagaaattgcctctcaagtgttttgttttgttttgttttttgtttttttgagatggtgtctcgctctgttgcccaggctggaatgcagtggcgtgatcttggctcattgcaacctttatctccctggttcaagtgattctcgtgtctcagcctcctgagtagctgggattacaggcatctgccaccacgcctggctaatttttgtatgtttaatagaaacggggtttgccatgttggccaggctggtctcgaactcctaacctcaggtgatccatctgcctcggcctcccaaagtgttgtgactataggtgtgagccaccgttcccggctgaggttggtttttttttgttttgttttgttttttttatcatagagtaaaattgatttgggaggaatataatgttctgcaaatttctaaattttaatagatttatgtaaacacctccacaatcagaatacagaacagtttcatcacccctaaaaactttctcgtgctaatcctttataagtcacattctttcctatccctagttcttaaatggaatcttacagtatgtaaacttttaagatggctgctatggtctgaatctttgtgtgtcctccaaattcatatgttgaaattctaatccacaaggtgatgctactaggaggtggagcctttgggaggtgattagttcatgaaagtggagccctcatgattgggattagtgcacctataagagaccgcagagagcctagccatgtgaggacacagggagaaggtaccttcagtgaaccaccagacaccaacatctgttgacttcctgatcttgaacttgccagcttcctgaactgtgagaaataaatttctgttttttataacctacccagtttatggtattttgttactgcagccagaaggaactaagatgctggtttctatcagcataaagcctctgagattcatcgaagttgttgggtgttctgatacctgttgttgttgttttcctgagtagcattctgttgtatggatgtaccataatttgtttattcattcacccattgaaggatattttagttgtcattttttgtcatcacaaataatgctactataactgtgtatagaattttgtaaatagcagtttttatttctctagaggaaatacccaggagagggattgcatggttggatggtcattgtatgttacacatttttaagaaactatggaagtgttttctctagtagtgtctgtactattttgcattccactaggaaggtatgagggttttagttgctctgcatccctgccaccccttggtattgtcagtatttattttttttctgaggtggggtctcactctgtcacccaggctggagtgcagtggtgtaatattggcttgcttcaacttccacctcccaggctcaagtgatcctcccacctcagcctactgtgtaggtgggaccacagccatgcaccaccatcgctgcctaatttttttttttgtatttttttggtagagactgggttttgccatgttgcccaggctgtgtcagtatgttttattttggccattctaataggtttgagtgatatctcatggtggttttaatttgcatttctctaatgattgaacaatgttgatcaactattcatgtgcttatttgccaccacgtcaaaaactgcaaatgttttttttgtagtagccatcctaatgggtacaaagagatatctcattgtggttttgatttgcatttccctgatttaatgatcttgaacactttttcacgtgattattggctgttggtatgtctttggagaattgtctattgcagtccttttcccatttgtaaaccggattatcttgttttttttgttactgagtggtaagagttcctttatgttctggatattaactccttattagatatgtggtttgcagatatgttctacaattctgtatattgttccttcttactctgtcatttgcttcctatgttgtgcagagat

SEQ ID NO: 38325 - DNA, 2300 bp, Homo sapien
cataatcacaggtgtagcaccagagagtgaaggtcatgggtgcacaggtcctatgaggcttagttgggtgaaaaggtggagaatgataggagcagagaggttggagagggagataggaaagggagtttcagaaatattacatagtttgcctaaagttacatttccagtacgtggcagagctggggttggagtgcagataggactgatctctgtgatttcatggtccacaccaaatcagtcttcttagactcagagctattgtttctgtctaatacatagtgagcttttattgtatgccaagtaatccacagagcactcctttatgtttttctagctcttaaagagcatctgtacaagtcttttggcatagataataggctctactggaaccagcttaagaaaaaacgacaaaagtagttaggggaccagggtgtatgactcagaatctgaggatgggcgtgcatgtaaaccttagccagggattggaactgggagattgaaatcactcaggacgtataggaccttctacttttctctgcttcttgggatatgtctattttactctgtagactgtcctgattctcagaccactggatggaagatgatcatgtcacacagctccatcattcaagagaacagccgtgacttagtcccatttccaaaactccaagcaaaagactctaacacatttggaggcaatcagctgtgaccctgaattgggggactgttcacctcatacaaatatagctgctgccagcttatatttgtggattgagaggacagtttcctgatacacaggaggtatttgcacgtgctaggcagactccccaaacttatgttcattttagtaacattgagtagtactatcatacttaacagtacaaaatttaaaaaacataattgatctatgcgaaaaaataagtatttccttttgcccatttctcttgaaagggaagaaaagggacacgggatgataatggcaagattatttatttatttatttatttatttttgagacggagtttcactctgttgcccaggctggagtgccctggtgtgggatcttggcttactgcagtctctgccttgcgggtccaagtgattctcatgcctgagcctcccgagtagctgggattacaggcaagcgccaccacacctagctacccactgtgttacctctagtccttgactgtagttgtgtcttggtcagtatccgtgtctcctgttctgtacttctctctaatccaacctagaaattgcctctcaagtgttttgttttgttttgttttttgtttttttgagatggtgtctcgctctgttgcccaggctggaatgcagtggcgtgatcttggctcattgcaacctttatctccctggttcaagtgattctcgtgtctcagcctcctgagtagctgggattacaggcatctgccaccacgcctggctaatttttgtatgtttaatagaaacggggtttgccatgttggccaggctggtctcgaactcctaacctcaggtgatccatctgcctcggcctcccaaagtgttgtgactataggtgtgagccaccgttcccggctgaggttggtttttttttgttttgttttgttttttttatcatagagtaaaattgatttgggaggaatataatgttctgcaaatttctaaattttaatagatttatgtaaacacctccacaatcagaatacagaacagtttcatcacccctaaaaactttctcgtgctaatcctttataagtcacattctttcctatccctagttcttaaatggaatcttacagtatgtaaacttttaagatggctgctatggtctgaatctttgtgtgtcctccaaattcatatgttgaaattctaatccacaaggtgatgctactaggaggtggagcctttgggaggtgattagttcatgaaagtggagccctcatgattgggattagtgcacctataagagaccgcagagagcctagccatgtgaggacacagggagaaggtaccttcagtgaaccaccagacaccaacatctgttgacttcctgatcttgaacttgccagcttcctgaactgtgagaaataaatttctgttttttataacctacccagtttatggtattttgttactgcagccagaaggaactaagatgctggtttctatcagcataaagcctctgagattcatcgaagttgttgggtgttctgatacctgttgttgttgttttcctgagtagcattctgttgtatggatgtaccataatttgtttattcattcacccattgaaggat

SEQ ID NO: 38326 - DNA, 2300 bp, Homo sapien
atatagaggtgtgaagggggaaatcaggggtctcacagccttcagaactgagaaccctgaacagagatttacccacgtatttattaacagcaagccagtcattagcattgtttctataagatattaaattaaccaaaagtatcccttatgggaaacgaagggatgggccgaattaaaggaataggttgggctagttaactgcagcaggagcatgtccttaaggcacagagcgctcatgctattgtttgtggcttaagaatgcctataagcgtttttctggttttccgccctgggtgggccaggtgttccttgccctcattccggtaaacccacaatcttccagcaagggcgttatggccatcatgaacatgtcacagtgctgcagagattttgtttatggccagttttggggccagtttatggccagattttggggggcctgttcccatcagattctacattaaatacaaggaaacttggccgggcacggtggctcacgcctgtaatcccagcactttgggaggccgaggtgggcggatcgcgaggtcaggagatcgagaccatcctggctaacacggtgaaaccccgtctctactaaaaatacaaaaaaattagccgggtgtggtgggcgcctgtagttccagctactcgggaggctgaggcaggagaatggcgagaacctgggaggcagagcttgcagtgagccgagatcacaccactgcgctagcctgggtgacagagcgagactccgtctcagaaaaaaaaaaaaaaaaggaaagtttctaactggagatatgagatgagctacacaagaagaagccaaaacatctgccctggtgctgcactgttgctcagtcgtatcattttctgagtcctgagagttttcatatttggataagtgatcagtctgaaagtcacttaagtcctgcctaaactccaggacagctggcatcttccttctcctctttcttctcacgtggcttcaccctcacagtccctcatgctctcaacttggagccatcatcttatcacgatctccctagcctccctaaccctcactcctgcctggttattctatatcaccatgttatttattttttaagtaattatgattacgttataggcttaattgtgatccccaccagattcatatgttgtagtcctaatcccagtacatcagaatgcaactgtatttagaaacaaggtctctaaagaggtgagttaagatgatgccattagggtgggccctaatccaattcaactggtgactttataaaaagaggaaatttggacacacacagagacactaaaaatgcatgttcacagagaaaaggccatgtaaggacacagtgaagaggtcactttcactggtgtccgtgtgaagagaccaccaaacaggctttgtgttagcaacaaggctgtttatttcacctgggtgcaggcaggctgagtcctggaagggactcagagtcagggaaggcagataggggtggggctgttttataggatttgggtaggtaaaggaaaatttcagtcaaagggggttgttctctggcaggtaggggcgggggacacaaggtgctcagtggggaagcttttgagccaggatgagccaggaaaaggaatttcacaaggtaatgtcatcagttaaggcagtaacaggccattttcacttcttttgtgattcttcagttacttcaggccatctggatgtatacatgcaggtcacaagggatatgatggcttagcttgggctcggaggcctgacagtgactatctataagccaagaagagaggcctcaggagaaaccaaacctgccagttctgtgatcttatcttggatttctttttttttttttttttcgtttttttagagggaatctctctcttttacccacgctggagtgcagtggcacgatctcggctcaccgcaacctctgcctcccaggttcaacagatcctcctgcctcagcctttctagtaggtggggttacaggcacgcgccacctttggatccacacctcctcccgtcctgagccaaaggccacggaagtgacgtttgcacgccgtgcgtaacgtgcattctggcggtgccgggagcggggcgaggaggagggtgggtatgaggcggtagcggaccgcggagtcgagacctacccgaacgacgcgggcgagcggggctttggacgccggtggagacgcaggcgaggtacggagcggaaggactagggccaagagcagcgcggctctcagctccgggagcggggcggcgaggtgtctcgggccggggttggggggag

SEQ ID NO: 38327 - DNA, 2300 bp, Homo sapien
tgatcctccttgctttaccctcctagtagctgggactacagatgtgagccaccacactcagctatatatatattttattttttgtagaggcagggtctaactacgttgtccaggctggtcttgacctcctgggctcaaggtatcctcccgccttggcttcccaaagtgtcttccagctattttgaaatatacaatccattgttgttaattatagtcactactctgcttttgaaccatagaacataaacctttttatctaactgtatgtccttcattaacctaaatctcttcatttctcacccaaccgttcccagcctctggtttctttctactctctaaatttatgagatcgatttgttttagctgccacagataagaacatgcaatatttatgtctttctgtgcctggcttatttcacttaacataatgacgtccatccacgttgctgcagatgacgtgatttcattccttttcatctgtgtttaaacaaggtctccctccagggattttgatgcaactgaagttggagaaaacacagacctaggacactcctgcagctgggagtgcgatggtctaacagaggaagtgctatgccaccagctcatctttgccatcctggagctgtctaatctacgactcagttttcttttctgtcactacactgtgagaatgagatgaggaactgggtgtgaaaacggtttgaaaaggagaagcatggttgcacacgcctgcgatcccagcactttgggaggctgacgagggaggacagcttgaggcaaggagtttgagaccagcctgggcaacatgacaagaccccatttcttaaaaaaaaaaaaaaaaaaaaatttttttttcttttttgagacggagtttcgctcttgttgcccaggttggagtatagtggccgtgatctcgcctcactgcaatctccatctcctgggttcaagcgattctcctgcctcagcctccctagtagctgggattgcaggtgtgccaccatgcctggctaattttgtatttttagtagagatgaggtttcaccatgttggccaggctggtctcaacttcctgacctcaggtgatccacccgcatcgcttaccaaagagccaggattacaggcgtgagccactgcgcccggccaaaattttaaaaaatcagctgagtgtggtggtgcgcgtctgtggtcccagctactcgggaggctggggcgggaggattgcttgagcccaggggttgcaatgagctatgattgcgccactgcacttcagcctgggtaacagagtgagactttgtcttttaaagaaaggagaaaatggcttgaacgggctaagaaccttgacccccaggagactccctgcgctgatagagcctctagggctggactccgcctcccagggagccgggagcatcttggggaagggcctgtctccatctgtgtgtcccggtggaaaaacggtcacggtggggagtcactgtcattattcattgaactcaagcgctcctattttgggttttctcgttcggatttctgcgcgagcgagtgaggaagaactggacacccgggcggtgccctgcggctcggggcggggccagccgcggtggcgtgtccgcagccacctcagccctcctcccgccacatcctccaggaaaggctgctcaggccttccattgaggagacaaggacccgctgctctggggccagacacacgagtaagtcgtgaccccctgtgtgaagggataaggcgtctaccctgacgcgggtgagaaccctcttcacggcagactccgacgcccagttatgagagcgtagcggcgcaccaccgccgggtctctcggagagggcgcgcccgctggccagaggaccaatcagtgcacggcaggctcgcaggccgccccccccccccccccccaacccagggaccactcaggcgccggccgctggcgctgcctgctcttcgactgggcgagcttcctgccaatcagggcggaaccagcgcggcgtcggccagtagcgggaggcggtcgggtcaggccccagctgggcgcgagcgggtcggcgttgagggagccaccgccctcccgcctgcgcactgcctctcgcccccctccggccagcccgcagccggccgcgtcatgccaggcgctgctcggcggtagggagtgcccggggccgccgcctccgcccgcccgaagccgcgcccactgcccagagccagagggatggtggtagtcacggggcgggagccagacagccgtcgtcaggacggtgccatgtccagctctgacgccgaagacgac

SEQ ID NO: 38328 - DNA, 2300 bp, Homo sapien
atggctggatctgagcctctggcagcggtggctacttgagcaagcatgttcctgaacctgtctgggccccacttgagcctcatttatgacatagagataagatagcacacacccccaatgtcattgagaggattacatgggataacccatgaatagtggctggcatggagtaatacttagcgagtgttagctggtgttgtattaggtcatagactaagctgttattgaggtagcagcattatcttggggtttactcactgtcttccgcacgtacgggtgatgtatctgattactctgagcactaaataatctaaaaagctggtggcttgcacctatggtcccagttattcgggaggctgaggcaagaggactgcttgagcccaggagttagaggctgcagtgagctatgattgcaccactgccctccagcctgggtgacagaacaagatcctatctcttaaaaaagaagaaaaaaaatctgaaaagtgaattagaaggactgaatttttattttaagaaaatgcaatatgtgattttattcagccctgaaaccagtttgttcagacattagagttaggcattttacctgctctgcatagctacagaataatactagtggcaaggatggggaacacctagaactcttctgcattgctgttgggaatgtaaaatgctgcaaccactttgttaaccacgtgcttaccctatgactgaatgactctactgctaatacttaaaagaaatttgtgcttgtgtccactaaaggtttcttttgtttgtttgtttttgtgatggagtctcacactgtcacccagactggagtgcagtggcgtgatcttagctcactgcaacctccacttcccaggttgaagcagttcccctgcctcagcctccagagtagctgggattacagacacccaccaccatacctggctaatttttgtatttttagtagagatggagtttcaccgttttggccaggctggtcttaaactcctgagctcagatgatccacccacctcggcctcccaaagtgctgggatcacacgtgtgagccaccgtgcctggcctaaaggtcttatataggaatgttcatcccagctttactcataatagccaaaaactggaaacaacccaaatgtccatcaacaagacaacagggtaaataaattacaccatattcatgcaagggtatacttacataatgaataataactaataaaaacaaaaaaacaaactactggtttgtttttattatttatttggtggatacatttcaaaaacattatgttaaaggaaagaagccaggtatgaaagagaacatactatataattctgtttatatatatatttcaagaaaaggcaaaactcatctttactgatggaaggagaagttagagtggttgcttccgtagggattaactgggaagtggcatgaggaaccttaaggaatggaaatgtttcatcttgatctaggtgatggttggatgggtatattcatacttaaaaaaacaactgaactgtacagttaatatttgtacatttattgaatatttcacctcaattctaaaactatatatatataaagggctaggtgtcatatctttccattatacttacatatacctaataatacctaatattatacctaataatagtaattatagttgcttactgataacaacaactaataacacttattgaggccctactctgtgccagggattttctaatcacttaattccctaacacattatgaggttttattgttttctccaattttacagacagggaaactgagacatggagtagttaagttcatttacccagtgtaacacagctggcagtctggttttagattttgtccaatgcacactgtgtggcactgcccaggagcataagctccttgtcaccgaccctctttccttcctgcttagagatgtgctgaatttcctgcgctcaggggacctcccacccagggagcgtgttcgagctgtgtacaaagaggcccagtactatgccatcgggcccctcctggagcagctggagaacatgcagccactgaagggcgagaaggtgcgccaagcgtttctgggactcatgccctattacaaaggtgagggtcagctgcccaggatggtgggtatgtgggaggaggtctgcaaggcatctgtgagtgtttaggtctccatcagaacaccgggggcagcattcatccagattactcaagatgcgatggagtgtcatcccttcccagtcacgctggggagattcaggttaaggtgggcctacctggccta

SEQ ID NO: 38329 - DNA, 2300 bp, Homo sapien
gtttcacagaatggtttagagaatggtgtgttgcctgattctatgatcacaagtcagttaagatctttaaagtaaatattattgtcttttggtaatagcaattatcaccatgtaatgtactactttaaatttattgtttattggctcctccacctcctcagcacaggtactttgtgtttgttttctcattttttttttttgagacagagtttcgctcttgttgcccaagctggagtgcaatgtcgtgatctcggctcactgcaacctgtttcctgggttcaagtgattctcctgcctcaacctcccaagtagctgggattacaggcatgtgccaccacgcccagctaattttgtatttttagtagagacagggtttctctctgttggttctgctggtctctaactactgacctcaggtgatccgcccgcctctgcctcccaaagtgctgggattacaggcgtgagccaccgcacccagccatacttttgttttatactctgttgtaccctcagcctagcacacattaggcacctaggaagaatttgagaaacgaatcaattaatctccactttaccaataatgagcaagaacagaaattagggccgggcgcggtggctcacgcctgtaatcccagcattttgggagaccaaggcaggtggatgatttgaggtcaggagtactagactagactggccaatatgatgaaaccctgtctctagtaaaaatacaaaaattagccgggtgcggaggctcacacctgtaatcctagcactttggaaggccaaggcgggcggatcacttgaggtcacgattccaaaccagcctggccaacatggtgaaaccccgtctcgactaaaaatacgaaaaaattagctgggcatggtggcgggcgcctataattccggctactcgagaggctgaggtgggagaatcgcttgaacctaggaggcggagtttgcagtgagccgagatcacaccactgcactccactctgggtgacagagcgcgactgtctcaaaaaagaaaaaaagaagactgaaaaattgggcaacctgtccaagaacaccacagcgacaattagcaaagctgggattccaacccaggtctatctaagagccacagcattgtattttcttttctttctttctgtgactgcacctttcaccatagatggcatccaggactcagagcaatcagcatgtagctactgtttttaatattccttacatgggaatcacataaagaaagtaaacagtatccaatttgtgactcaaccattcatactttgtgacactggttaattatttcacttctgggtctcagttacgctttttttttttttttttctttttgagacagggtctcgctctgctctgtcacccgggctggagttcagtggagggatctctgcaccctcaacttcctgggctatcaagcgatcctcccacctcagcctccccagtagttgggaccacaggtgcccgccatcatgcccggctgatttgtaaaatttcttttgtagagatgggggctctccctctgtggcccagggtggtctcgaactcctggcctcaagcgatcctcctgcctgggcctcctaaagattcagctgcttttggatcaaacgattggcttaagaccctttaactcgaacacctgtcacatcctaggatccgcgaaggactgaaacagagtttctgaagcgtccctcggcgcagtggctccgctccacctcccattcgcgcttccaccgtggcctcggctccaggagtcgccgcggtgccggcgtcgccctcccgctgctgcgcatcgggagccggaagtagggactgagccacagactaggaaacgttggtttctccggggctccccagcgccccagctttagcgcggaggctaccctcttctatttgctcttgggcgtcagagcggcaccctactctgtgtaagcctttggatcccgctcgcacttcctcccgtcatcagccaaaggccccggaagtgatgtttgcgcgccgtgcgttacgggcgtgcgctggcggtgccgggggggcggggcaagcagggggtgtgtgtgaggctggagcggactggggaacccagacctgccgagcgacgtgggcgagcggtgacctggaccacggcgcagacgcgggcgagctgcggctcggacgccagcggacacgcgggcgaggtacggagtggacggactggggctaagagctgcgcggcggggcatcttgggccgggggtggcggggctgttggtccgtgacgtccgcgcggccgggacagttgcg

SEQ ID NO: 38330 - DNA, 2300 bp, Homo sapien
tcatcccagctactagggaggtggaggcagaaggatcacttgagccagggagttggaggctggagtgcgccgagattgcaccactgtgctccagcctgggcaacagagtgagactctaactcaaaaaaaaaaaaaaaaaagaaacactcattctgtttcacagaatggtttatagaatggtgtgttgcctgattctgtaatcacaaaagtcagttaagagctttaaagtaaatgttattctgtcttttggtaatagcaattaccaccatccaaggtactactgtaaataattattgtttattccctcctccacctcctcagcacaggtactttgtgtttttttgttttgttttgttttttgaggaggagtttcactcgttgcccaagctggagtgcaatggcgcaatctcagctcactgcaacctccgcttcccgggctcaagtgattctcctgcctcagcctcccaagttgctgggattgcaggcatgtgccaccatgcctggctaattttgtatttttagtagagacagggtttctccatgttggtcaggctggtcttgaactcccgacctcaggtgatctgcccgcctcggcttcccaaagtgctaggattacaggcgtgagccactgcgcctggccttacttttgttttatactctgttgtaccctcagcgtagcacacattaggcacttaggaagaatctgagaaacgaatcagttaatccctactttaccaataatgaataaagactgagaaactcgggccgggcgcagtagctcacacctataatcctagcactttgggaagccaaggtgggcggatcacttgaggtcaggattcaaaaccagcctggccaacatggtgaaaccctgtctcgactaaaaatacaaaaaaaaaaatatgagctgggcgtggtggcgggtgcctgtaattccagctacttgggtggctgaggtgggagaatcgcttgaacctaggaggcggaggttgcagtaagccgagatcgcacgactgaactccagtgtgggcgacagagtgagagtctcaaaaaaaaaaaaaaaaaaaaaaaaaatagactgaaaaattacgcaacctgtccaagaacactacagcgacaattagcaaagctgggattttaacccaggtctatctcacagccacagcatagtattttcttttttttcttgctgtgactgcacgttacgccatacatggcattcaggacgcagaggaattagtatttactgtttttaacattccttacatgggaatcacgtaaagaatcaggtaaacaggattcaatttgtgactcaaccattaatactttgtgacactggctaatttatttcacttctggatgtcggttatgttttttttgagacaggatctcgctctgctgtcacccggcctggagttcagtggagggatctctgcaccgtcaacttcctgggctatcaagcgatcctcccacctcagcctccctggtagttgggaccacaggtgcccgccatcatgtccggctgatttgtaaaatttcttttgtagagatggtgaccttgctctgtggcccaggctggtctcgaactcctggactcaagcgatcctcctgcctgggcctcctaaagattcagctgcttttggatcaaccgatcgccttaagaccttttaactcgaacacctgtcacatcctaggatccgcgaaggactgaaacagagtttctgaagcgtccctcggcgcagtagctccgctccacctcccattcgcgctaccaccgcggccgcagccccaggagtcgccgcggagccagcgtcgccctccagctgttgcgcgtcggaagccggaagcagggactgagcgacagactaggaaacgccggtttctccggggctccccagcgccccacctttaccccggaggccgccctcttccatttgctcttgggcgtcagggcggtaccccactccgctcgaccctttggatccactcgcacttcctcccgtccagagtcaaaggccccggaagtgacgtttacgcgccgcgcgtaacgtgcgttcgctggcggtgccgggggcggggcgagcaggagggtgggtgtgaggcgggagctggccgcggagcccagacctacccgggcgaagcgggcgagcggtggtttggacgccggcggagacgcgggcgaggtacggagcggacggactggggctgagagctgctcggctctcagctacaggagcggggcggcggggcgtctcgggctgggggtggcagggcggtcggtccgtgccatccgcgcggct

SEQ ID NO: 38331 - DNA, 2300 bp, Homo sapien
atgtttcttcctcccatcctttgtgctgtggttctacacgttacttggtggtttttctctcatcttgggtagtttcctcatacacatgtgcggtagtcagccacactcaagggaaccctctgcagatacctgcagctttttctatgtagccctctcccctccgtagtgtttgcatgatattttgccatgcaaattctggtcacattggcctccgtgaactccaaatgctatctgctcaattcagcaagtcagctaggctctgtttgagtggcctctccctgtgccaagactttaaaactctcccagcagtgagctgggacactctaggacagactctgtttgtttcccttctttgaggagttaatctgctgtttgtctgtcatccagtgtctgaaaaccttttgttcatatttttgtctgaccttccagttgttaagatagtagagtaaacctgaatgccatcagagtattccatcatgactagaagcagaattattagagaaggattcactttcaaacactaaagaatttttttctaatcataccgatgtcaacacaatctttggttttccattgagataaaaaatattttagaaaagatgttgcattttttgttttaaattagattgtacctgatttatttatgtacttaaaacatagtatatccaaatggttctagcataagaggtatggtcagaagtttcctttctagtttgtctcttgcccatctagttcctaagcaccactgctttgtttctcccactttcagacaacttttgttactagtttcttgtgtatccttttgtgcttttattctgagttataaacacatatattcttatcccactaccccctattttacataaaacatagcacagtgtacataccttactttttttttttttttggaagagacaaggtctcattctttcgcccaggctgtggagtgtagtgggatgatctcgtagctcactgcagcgtcaaactcctgggctcaagcgatcctcctgctttaacccccacaaatagctggcactataggtatgcactaccatgcctggctaatgttcttactttctgtagagagagcagctactcggagacttgagtagctcagtaggagaatcgcttgaacctgggaggtggaggttgcagtgagctgagatcatgccactgcactccagcctgggcgacagagcaagacttcgtctcaaaaaaaaaataaaacatacttttaaaaaaattattttttcgttttggaaatcattgggatatggggaacttaatttccttataaacattagagagcatagttcaaaatcaggaggcttagaatgtggtcaaagaccaagtggtagttcatactttctgaaagcacttactgcctgttacaacatccttatgtctcttgtgtaaatgtcccattttcctttcagtgtgtttatttgaagaggggaaagaattgtctgcccagccggtgggatagtgtagtgcatgtttcccttgtctcttcattgtatgctttgttgtgtttatcatgctattaatactttggatgcgttctttcactttgatcagtatgactcaccaacgaaatggtgggtaaataattgtgagtctccacataaacacattaacctttgcttttttctcaagtaaaatgggatttggaaaggttgtctgacatttataagtcatttaacatgtcagtgcttctattgattgttattctatttgttgactagttttataaactccagcagtctttgagaagcctagtggtgccatttcagtgttcatgattgaatatatagatcaaagtgtgatagattttggcaaagaaaatactaatagaacaacttttatttcagtaggaatatcttttagataatgtagttttgtctactcatacttcctacttgtaaaacagatttagtttactttaaggaaagttgtccaaccattcaaacataaaattatttaaattcaagtttaactttgatgaaacataatttaaataaccttaggtaagatacttaaagtaattccatgcatggatcttttatgtcatgaaacttactatgtttaattttcccagcagaaattcaggaagcaaaagctcccagtccttccataaaccggcaaaccagcattgaaacggatagagtgtctaaggagttcatagaatttctcaagaccttccacaagacaggccaagaaatctataaacagaccaagctgtttttggaaggaatgcattacaaaagggtaggttgagaataaccacgtagaaacataga

SEQ ID NO: 38332 - DNA, 2300 bp, Homo sapien
cccacctgaagaaggtttccagttctgccagcagtcccccacccaacccccagaagcagacattcctttgctgtgggccatggacaggcagaaggaagtgcctcctcatggcagaggcctacccaggagaaacccaaggtaaggcactgccaggccagcccctctgccaaagccattttcttttttcttttttttgagacacagtttcactctgtctcccaggctggagtacagtgccacgatcttggctcacttcaacctctacctctccagttcaaacgattctcctgcctcagcctcccgaatagcagggattataggagcgtagcatacctagctaatttttttagtagagataatggttttgccatgttgcccaggctggacttgaactcctggcctcaagtgatccacctctctcagcctcccaaagtgctgggattacaggcgtgagccaccgcacccagcactcgtcaaggtctttgatggcaggtttttccaggtgatcagtccttgtctggtctggctctgtcacactctccctctcaccaagttcgaacccctagctagttttcagaggaggagagtgtgtaccccaatcccagcttggtatggttcagatctgtatttggctcaggaagcctggctgctccccaggccctggagaaaaaaagggtctcgctgcaggtatgatacaagacgggcctgtccccaggaccgtgtaagagggaagcccaatgtgccaccaggttggcagggctggggaagggaaagtgttatggtagccccaagactaaaaagaggcagcagagggagcaggacagtgctcccatggaactcatgccgctgcctgagtgaggtgagggaagagtgcacccactgacatcagggggcagagaggtgcggttccagcgcggcttttcctgcttcttgccatgttactctgatcccctccaggtgagcccgcccattttgggcccagggttgccgctggggcctgtacccaaatgcagccccccatggccatggccccaggagtgcggcagagcagggaggagtcctggaaagaggagacgcaggggcaggaaggaatgggcctcaaactccaggagggggtccttctcatgggtcctgctttctggcctctcctcgcttacccctgggctgatccccctgggaagaactgagccaaggtttctcactctcaaatccgagggattcaattaccgggcccttagggaggtgtcagccccctgaaacgatgcaaggtgcccggcctaatttttatatttttagtagacatggggtttcaccatgttggccaggctggcctcgagttcctgacttcaagtgatggcctgcctagggcaccgaaaatgttggcattacaggcgtgagcaaacgcgctcggccagctctatttatttcagcctatacattttgcacttgttaaaagtatttgaacatacaattctgttttctttaagcagtccctccctgttgcacacttggatagtttttttacttttttagacagggtttacctcagtctcgcaggctggagtgctgtgatgggatcatagctcactgcagccttgaactttggggttcaagtatctgggaagctgaggtgggactacagagatggggtcgcgccacgttgcctaggctgctctttaactcctggcctgaagggatcctttcacctcggcgcccggatatagttttctagttttgacccacagaaacaccgtgctgggtcagagtttgtcaaccacccttctccagccagcaacacacagaacatggcggggaagtcgcggttaccaggcaccactctgaagacaaaacagcccagctccaggcactgtaccgtcactctgacgacgcggaaggcctggcgctattgcgtcgccgagggcccgcgcctgtgacgtcagcgaaggcgctccccagtgacgacagagagccacgcccctcatgtggaaccaatcggaactcgaggagcggctgccgggtcgtccagaagcgcgcatgcgcagacgcgtggccacagccggccggtcagtgttcgcaggctccgacccggcggccaacaccagtaagctacaaggaggagctttcccactgcctgtgctactactaccggcgcgacttcccagcctgcagcgtagggcgcagcaagggcctgacgctgagcgagcaggcgctgcacaccaagcggttgtcgcctggcgggcacaaacagaaggtcgggcagaagctccttaatggccactgcaagccggctagctccggct

SEQ ID NO: 38333 - DNA, 2300 bp, Homo sapien
aaaaatacaaaaattagcggggcgtggtggcatgcgcctgtaatcccagctactcaggaggctgaggcaggagaatcgcttgaacccaggaggcagaggttgcagtgagccaagatcgtgccactgcactccagcctgggcgacagagcgagactccatctcaaaacaaaaacaaaaattttttttgaaatcccatacaaggcagctaggatgaaaggtttgaggttgccttttttacattctcctacggtctcaatcactaagtcatatatggtgccattggtggtggggctcctttaattacattatcagtcctagcctggtaagggacatctcattaggaagtttggttccatcattatatacacaattcaatactgcctgcacttgcagataatgtcacacccattacaacaaggaagataattcaaatggtgcaagataacaaaagagggcaagaatcatggaaataagagggtattcagtgaaggaactgagccattgtgttgaacattacaggcttcacctgataaacttttgttaaagatggctgggtgtggtggctcatgcctgtaatcccagcactttgggaggtggaagtgagcggatcacttgagcccaggagtttgagaccagcctgagcaatttgggggaaaccccatttctgtgaaaaatatgaaaattagctgggcacgatggtgcacatctgtggtcccagctactcaggaggctgagacaggaggatcacttcagcttgggaggccgagtctgcagtgagccatgatcatgcgactgcactccagcttgggtgacagagcaagaccttgtctcaaaagcaagaacaacaaaactttattacctttaaagcaccctgtactcctcccccatcccattcccctaacacttaacatgaagtttatacatctttttctcatgcttcatgtcagttcaaacaattatgtatgcatctctaaacaatatgttatgaacttgcctgttttgaattttacataatggaaatatgtagcagtgtaccattttgtgatttggtccctgccaatatagtctgcaattgactaccataattgtgtgagctgtattaaataattttcactggtcttttgtacccgattaaacacgaagatgggccaggcgtggcagctcacacctgtaatcccagatcctcccgaggtgggaggatcacttgggtccagtagttcgagaccagcttgagtaacatagggagaccctgtctctacaaaaacaaaccaaaccatgaatatatcaaagttggtttttacatttgactgtatggacatctgctttttctccccaatttttagtgagtcatactgctgctaaaaacattggtgttgctatgagcattattttgtctacttgtgcataggtgcaactgtttctccagggtaatatattctcaagagaggatgtgtatatctttaagtgtactgcataatgccaaattactttgcaaagtgattgtacaaaattatactttaaaaattttcattttcattttattttatttataaatagagtcagagactccctatgttacccaggctggtctggaactccaggactcaagcgatcctcctgccttggcctcccaaagtgctgagattacaggcctgagccaccgcgcctggtccaaaattacatgtttatcagcagtgattaatatacaagcacatcaacagacacacgcatagcacacacatgagcatgcacacgtgtgcgcactccctacacatctacgcatgcacacacccataccatcacacaccacacacgcgcacacagatgcacatacatgcactcactgcacacaccgttgtacacgatgcacactacaagccacatacacgcactacgcacacacgcacacgcacaacaccagaccggcacacagacccataaacgtccatcacgcactccacgcacgtccgcatgcacgctacccgtcccggaagcgtggtctccgccgcctgcctctgacgaagcttgtcccggccgcgccaccgtcggacgcccggggtcggaggtcacggcggcgttggaggtggcgtggttttttttttttttttcacccggaaaccgcggttgccggagcccgaactgaggcggcggcgggagcccggttggcgtctggtcttcgcgtcggccccgcggagccagacgctgcccccggcgcggggagaagatggtgcctagcggcctcgggcccgccacgcgccgccacgagtgagcccagcgcgaccgcgggcgtccgccgagca

SEQ ID NO: 38334 - DNA, 2300 bp, Homo sapien
gttttgaattttacataatggaaatatgtagcagtgtaccattttgtgatttggtccctgccaatatagtctgcaattgactaccataattgtgtgagctgtattaaataattttcactggtcttttgtacccgattaaacacgaagatgggccaggcgtggcagctcacacctgtaatcccagatcctcccgaggtgggaggatcacttgggtccagtagttcgagaccagcttgagtaacatagggagaccctgtctctacaaaaacaaaccaaaccatgaatatatcaaagttggtttttacatttgactgtatggacatctgctttttctccccaatttttagtgagtcatactgctgctaaaaacattggtgttgctatgagcattattttgtctacttgtgcataggtgcaactgtttctccagggtaatatattctcaagagaggatgtgtatatctttaagtgtactgcataatgccaaattactttgcaaagtgattgtacaaaattatactttaaaaattttcattttcattttattttatttataaatagagtcagagactccctatgttacccaggctggtctggaactccaggactcaagcgatcctcctgccttggcctcccaaagtgctgagattacaggcctgagccaccgcgcctggtccaaaattacatgtttatcagcagtgattaatatacaagcacatcaacagacacacgcatagcacacacatgagcatgcacacgtgtgcgcactccctacacatctacgcatgcacacacccataccatcacacaccacacacgcgcacacagatgcacatacatgcactcactgcacacaccgttgtacacgatgcacactacaagccacatacacgcactacgcacacacgcacacgcacaacaccagaccggcacacagacccataaacgtccatcacgcactccacgcacgtccgcatgcacgctacccgtcccggaagcgtggtctccgccgcctgcctctgacgaagcttgtcccggccgcgccaccgtcggacgcccggggtcggaggtcacggcggcgttggaggtggcgtggttttttttttttttttcacccggaaaccgcggttgccggagcccgaactgaggcggcggcgggagcccggttggcgtctggtcttcgcgtcggccccgcggagccagacgctgcccccggcgcggggagaagatggtgcctagcggcctcgggcccgccacgcgccgccacgagtgagcccagcgcgaccgcgggcgtccgccgagcagctggcccggctgggcccggggcgcgcagctgcccgccggggcggggtgagccggggctggagggcgggctggggtcgggcccagtcggggctgcccgcggggccgggagcggggagcgtgctggtcgggagcggctcctccgccggcttttttcaccgcttctcagggtgcagaccccgccccaactgctggcgggggtcgcccagcatcggccgacctcggcctggtccccccacactggggtttgcccactcgcgtcccccgagccagggttccctgccggccttggagatggcgggacttcccacgtctggagccgaggcctggataattcggatttggcacgggaaacatcttggtcgtttgccatttttcggctttggggagtgtttgcgtttcttctccgtttggcagtgaaacacatctcagaaaggtgggagggagagactcacgtacgtccacaaagttaaatggcatagtggtgttccctgtgtcaagcttggtaaatatccggaatggggtggattctttcttcatgtttttaataaaatgaggagtgatcgcaaggtaatctagaggcatgtagtttcagttcccttgatggggaccatcagaaataaaaccaggcttgttgtgctgttttgagtcgtttgaacgccgtacccatcggacagctggtgaggaggcctttgtggaagaatctgatgtctgagtttagttctcaactagcaggtgacagccctcactggctgatgaatggtgagcttctctgaagcctgctttgtaaagattgtggcttccgcctgaactgcttctttcctgcctcaaaggtgagccgctacgggagggaatgggaagaaaaactccgagactgctgatgaatatgtgataaagtggtttgtctcgatagcaccatcagcttgggtcagcttagggtctcagcatgtgtatctcatttgtagatgagtgttccatcagcgcttgaccgataaggg

SEQ ID NO: 38335 - DNA, 2300 bp, Homo sapien
atgtaaatactatgtaaatagttgttacagtgtatttttaaaacttgtgttatttttattgttgtattcttatgtattggttttttttcttttgagtatttttgcttttttaattttttttttttttttttttgagacagggtctcactttgtcacccaggctggagtagagtggtgcgatcgtagctcatgactcaatcatagttcactgcagccttgacctcccaggctcaagcgatcgtcaacctcctgagtagctgggaccacaggcatgcatcaccacacctggttaatttttgtattttttgaaaagacagggtttcgccacattgcctaggctggtcttgaattcctgggctcaagcaatccacccacattggcctctcaaagattacaggtgattacaggtgtgagctaccatgcccagccctcttttgtgtatttttggttgaatctgtggatatgaaacccacaattacagaaggccagcggtagtttctgtcttcattagaagtgtctttactctcaacctaaattatgttgttggatttttaatcatatacccaagcctctgttgctattaaagggagtgacttggcagttgttctcaagtctccactggagcactactgactctgggtagctgcctcctctgtagttccatcagcataagaagtcttctaacagaatgcttatcaaggtttaaagacagttacctcagctaggtggacctgtaatcccaggacttttaggaggctgaggcagaaggatcacttgagcccacgagttcaagaccagcctgggcaacatagtgagaacccttctctactaacagttaaaaaattagccagatgtaatggtgcatgcctgtattcccagctactggggaggttgaggaaggagaattgcttgagcccagaagttggaagctgcagtaacctacgattgcaccactgcactccagcctggacaacagagcgagaccgtgtctcaaaaaaacaaaaaccagttaattctgtctccgcacagtggttccagatgggccgcgtcttgcaggagactttgagatttctagtaatttcttcctaggtgagattttctttttagggatttagtaacttcactgtctggttgatatgtgcaattagtgtggcatcctggtctttgggtaggggctgagttacctaggcttcccttttttgactggtttccctggcttgctgtcttccaggtggctttggctgaagcctaattccacagctccttgttttttgagagagactgagagaaccataatccttgcctgctgaacccagcctgggcctggatgctctgtgaatacattatcttgcgatgttgggttattccagccaaagacatttcaagtgcctgtaactgatttgtacatatttataaaaatctattcagaaattggtccaataatgcacgtgctttgccctgggtacagccagagcccttcaaccccaccttggacttgaggacctacctgatgggacgtttccacgtgtctctagagaaggattcctggatctagctggtcacgacgatgttttcaccaaggtcacaggagcattgcgtcgctgatggggttgaagtttggtttggttcttgtttcagcccaatatgtagagaacatttgaaacagtctgcacctttgatacggtattgcatttccaaagccaccaatccattttgtggattttatgtgtttgtggcttaataatcatagtaacaacaataatacctttttctccattttgcttgcaggaaacataccttaagttttttttgttttgtttttgtttttttgttttttgttttcctttatgaagaaaaaataaaatagtcacattttaatactactctagttaggacagacttgtgcttttatcctgactaaaaagttaaatatttaagtcacatacatggtaaagatctaagtttcattttccacatggatgaccaggaacctggtcttgttggagctggcataggaggttctactgtcttgtcgtccactcttgtccctcccttctgttatcaaagttaaagcgcctcttcactcaaaagggcttcaaaatgtaaatggctctagagttagagtgactgtttgctcttctgctttctggaatgcagatgacagtatggaaagaaagaataatgattctatctaataggaaaggatttcttctttcttttttaaagagtgggtggattttctcccttttgttttgcttttattttcatgctactaacatatcttcagaaggaaatggcaa

SEQ ID NO: 38336 - DNA, 2300 bp, Homo sapien
ggttgcacaggctgagcactgcacaatttccacggctgccatacaacagctactcctgaagtgcaatggtccagctatcaagatagctctttatggcaataacaggcattttctgtattgaaatcatttttaaaaataaagatggggtctcacaatgtttcccaggttagtctcaaccccctgggctcgagcgatcctcctgactcagcctccagaagtgctgggattacaggcatgagccaccatacccacccgattgaaacacttaattttttaaaattgttaaagtactttgcattagaaagaaagaagagctaaaataaatcttatttataaaggcaaacatagggccaggtgcagtggctcacgcctgtaattccagcactttgggaggccaagggtggatggatcacctgaggtcaggagttcgagaccagcctggctaacacagtgatgagggaagagagagatcctctcatattgttttatattgttttatactcagtacctgttttaagaaaaaacaacaaggaagtaaaaccaaagacaggcagcccagcgccatgcccgaaaccacgcctgggcctgcctggtctaaacccagtagttaaaactcaactcataacttagaaaccaatgttattcatagattccagacatcatgtaatcccagctactcaggaggctgaggcagaagaatcgtttgaaccctggaggcgaaggttgcagtgagccaggatcaggccactgcactccagcatgggtgacagagagagactccgtcctgaaaataaataaatgcataaataataaaggcaaacagaactttttattacaattattccccccccccccccccaccgcttaattctgaaacagcatgttttggacaaagactccaatctttttttttttttttttgagacggtgtttcgctcttgttgcccaggctggagtgcaatggcgccatctcagcttaccgcaacctccgcctcccaggttcaagcgattctcctgcctcggcctcccaagtagctgggattacaggcatataccaccacgcccggcaaattttgtatttttaatagagatggggtttctccatgttggtcaggctggtctcgaactcctgacctcaggtgatccccccgcctcagcctcccaatgtgctgggattacaggagtgagccactgcgcccggctgacaaagactccaatctaagtaattaaatcgacgtgaagaaatagagaaaaattggactctctgcattaggaagtttataaaataagcatgtattgatcgcctgctagttgtgaggctttgcattaggggatgtattcgtgactttggcttcttctagttaagtagttctcaaagtggggatacaccattaggatcgcctgcctcagcctcccaaagtcctgggattacaggcgtgagccaccgcgcctgtagctgcactagaccaatctggttcaacttttttttttttttttttttgagacagagtctcgctctgttgcccaggctggagtgcagtggctcaatctcggctcactgcaagctccgcctcctgggttcacgccattctcctgcctcagccttctgagtagctgggtctacaagtgtgtgccaccaggccggctaattttttgtatttttagtagagatggggtttcaccgtgttagccaggatggtctcgatctcctgacctcgtgatccgcccgtctcggcctcccaaagtgctgggattacaggcatgagccaccgcgcccggcctgcttcaacttttatgtaacaaagtcgttagtttatcagttgcctggaaccctcagattatgtaacctgagcacgtccagacgaaccaagcctgcacccacagggggatcctaagtgctaggatcggggcatggggactaaattaagaaacagacacagcccaccaggatccaggatccaatcagattgagccctggcatcaccccattgcagcatccagtcagatcacacctcctggcatcacctgactacaagatccaatcatatcatgactcattagcctaggcctataaaagccaacccagcccccactctccaagtggcactgttttgggagctgtctgtaatccaccaagcgactgaactcatccactgcgtaggtaacaagaacttgttacaaatgcaaaatcttggccgggcgcgctggctcacgcctggattcccagcactttgggaggccgaggcaggcagataacctgaggtcaggaattcgagaccagcctggccaaaatggcgaaa

SEQ ID NO: 38337 - DNA, 2300 bp, Homo sapien
aactgcccgcatcggcctgagggaacattttcaaaactcagaaccgtatttgccttaccatttgctcactggagaaaaatgtcatgggaggacgtaagaaacacaagggtggggtggggtgcagacagctgctgccacggaatgccagtccctagatggcagcagtgaagacactacgcactttaaactgctagggctactgagatctatgacaccagatgtacccacaactatgacagtattcgtaagactaggttctcagccatcattattctaggaaaaggaccacaattacgagatttcttggctgcagcttttatgacaccaacaaaacaaaaccccaaaccaacaacccaatccgaaccaaccaaataaagaagaaacccttggcttaggcgccaagctcggacagcgacgtctcatgctcacagcaggaatgttccatttcctccccggccaacaccccagcctggcccattcactcgacttgggcagagacaggccgcctcggaggtgacggctcaggcccaggcccaggcccgagggagggggctactcacacgccgctccgccagccgacgaccttgtttttgtagcaggcgatttcgaagcgcttcccggcacgcttcatccgtaccacggccacattggttaggcggatctggttggtgggggtgaagatcgacatcgcggctgttcaaagacccagaagccggcgaaccagggctgacccgcgccgtccagcctgaaggccaccagcgcctcgcggtaacgaccgatcggcgcgcggcactgacccaaccaccagtgcgcggcgccgcgactcactagcttcaggcagccgtcacagtgtgtctggcaggcttacttactgcgcaggcgtcaggtggagcagaagccgggaggggaaaagtgagcgatgacgcctgcgtattgtggctttttacgccatctttccacgcccaaaaagggaggtgcttttccttggcgtatttactttcgccaatgagctgagagctctgacaggatgctcgcggatgtttagtgaccgggttaaaacacagcgttggcaccacctcgttccgcggaattcaagggccagacccactttataatataaatattttttataatagaattattttataataaatatttttatttactcacccttttataatagaaatattttaacataaaatgtagacaaaaaagtgtaatgaaccttctatgtacccatcaccccgctatcaacattttgccatccttgttttattcttttttcatttttttgttgcttttttatttacagttttttttttaagtcagtctcactctgtcacccaggctggagtgcagtggcagggtcatggccccactgcagcttcgacctcctgggttcgagcgatcttccagcgttagcttcccaagtagctgggactacaggtgtgagcggccacgccaagctaatttaattaaataaataattaaaaaaaattttttgtacagacgaggtctcactatgttgctcaggctggtctcgaactcctgggctcaagcgatcctcccgcttcggcttcccaagtgctgggattacaggtttgagtcacagcgcccggccggttgggggtattttaaagaaaccatcatatggtttcagcattaaatacttcagcctatagcccttaacagatacacgcgacgagattaactacaattccttaatatcatctaatagcgagtccatcctcgggtttcccaaaaataatgcctttctacagtcggtttatttcagttaagatccaaacaggcccacatagcatttcccccgctccccgctcctttcctcttttaattttcccatgccaatcatttctctctgggcccgccttttcccagtctgagccaatccaaatggaggcggaagcgctccgccttcatcgcctggaactctgggaggtgcttatttctgggcacgccccctttcccctctgagccaatcggagcagggccgagagcgcaccgggcactggcttcctttcccggagctctgggctttcctctgggcccacctcttcgtcctctgaaccaatcaggaccggcctggcagtgtcatggctgcccacaggtctgcaggcactcggtacgccgctaacgcggcgaggtagctcggtgcgtctcgcggtaccagtgcgaatcatcgggctatccaggtccgagatcctagtctcctgtcggctctgaggaggatgggtaagggcactcggcgggcaaggaccctggggcggcaggggaggtaa

SEQ ID NO: 38338 - DNA, 2300 bp, Homo sapien
agccaagattgcgccaccgcactccagcctgggcgacagagcaaggctccatctcgggggcgggggggtggggaacaactgtaataaaaataacacactatgtagtaacgtaataaaattatcacactgttaacactaactcaaagaaaaaacagaatataaaattgtatcttcacttcgaaatgagcatttagaagcaagagaaggaacacaaagtaaaaatacttcatgtgaaattaattttgttttgttgtgcttgctccataaaaaaagcttaagtagtaaaagcactctttttactaactgtactttcaaaggctcacggttaaacttgtaaaagattctcaagtaactgaccttacacctcatttttttttttttaagagagatatgcagggacctggcttcaaacgttcaacctgggagcaatttcaaaagtcgaggcctgaaatttaggctttacaggtgcaaaagtcctaatacacgtaggtaaagtgggaggggtagttttctgtctaaccccctagcctcaaaaggcaaaagccaggtcaaaagtagggatcagtcctccttgctctcagcggcgactagccggtgctgtcaagtgcaacagtctccgaaggaaagggaccgaggacgccactccgcccggagagggtctcagtaaaacgtttacctcccctgccgccccagggtccttgcccgccgagtgcccttacccatcctcctcagagccgacaggagactaggatctcggacctggatagcccgatgattcgcactggtaccgcgagacgcaccgagctacctcgccgcgttagcggcgtaccgagtgcctgcagacctgtgggcagccatgacactgccaggccggtcctgattggttcagaggacgaagaggtgggcccagaggaaagcccagagctccgggaaaggaagccagtgcccggtgcgctctcggccctgctccgattggctcagaggggaaagggggcgtgcccagaaataagcacctcccagagttccaggcgatgaaggcggagcgcttccgcctccatttggattggctcagactgggaaaaggcgggcccagagagaaatgattggcatgggaaaattaaaagaggaaaggagcggggagcgggggaaatgctatgtgggcctgtttggatcttaactgaaataaaccgactgtagaaaggcattatttttgggaaacccgaggatggactcgctattagatgatattaaggaattgtagttaatctcgtcgcgtgtatctgttaagggctataggctgaagtatttaatgctgaaaccatatgatggtttctttaaaatacccccaaccggccgggcgctgtgactcaaacctgtaatcccagcacttgggaagccgaagcgggaggatcgcttgagcccaggagttcgagaccagcctgagcaacatagtgagacctcgtctgtacaaaaaattttttttaattatttatttaattaaattagcttggcgtggccgctcacacctgtagtcccagctacttgggaagctaacgctggaagatcgctcgaacccaggaggtcgaagctgcagtggggccatgaccctgccactgcactccagcctgggtgacagagtgagactgacttaaaaaaaaaactgtaaataaaaaagcaacaaaaaaatgaaaaaagaataaaacaaggatggcaaaatgttgatagcggggtgatgggtacatagaaggttcattacacttttttgtctacattttatgttaaaatatttctattataaaagggtgagtaaataaaaatatttattataaaataattctattataaaaaatatttatattataaagtgggtctggcccttgaattccgcggaacgaggtggtgccaacgctgtgttttaacccggtcactaaacatccgcgagcatcctgtcagagctctcagctcattggcgaaagtaaatacgccaaggaaaagcacctccctttttgggcgtggaaagatggcgtaaaaagccacaatacgcaggcgtcatcgctcacttttcccctcccggcttctgctccacctgacgcctgcgcagtaagtaagcctgccagacacactgtgacggctgcctgaagctagtgagtcgcggcgccgcgcactggtggttgggtcagtgccgcgcgccgatcggtcgttaccgcgaggcgctggtggccttcaggctggacggcgcgggtcagccctggttcgccggcttctgggtctttgaacagccgcgatgtcgatcttcaccc

SEQ ID NO: 38339 - DNA, 2300 bp, Homo sapien
aggtggaggttgcagtgagctgagatcatgccactgcattccagcctgggtgacagagcgagactctgtctcaaaaaaaaaccgcaaaaaggcagcaagcaagatgtggctcgtggattgtagtttaccggccccgtcttagtggttaaatatctagctttaactctgtccatttctttgtcccccaagaaaatgtactggtgtgcacatgagtgagcttgaatgtgctctaaattatttgtgaaaaattattagcaaactttgatattacttataacttacctcatgacttggaactcttaagatgaattcaaacaccaggctatcaagactaaggatacacaggttgagaatccctgaaccgcaaattggaaatgctttaaaatccaaatttctggagcgctgacaggaggccacaagtggaaaatttcgcacctgacctcctgtaatgggtcaaggtcaaaacgcagtcaaaagtttgtttcatatatgaaattgtgaaaaatattgtataaagttacctacaggctatgtgtgtaaggtgtatatgaaacaaaggaattttgtgtttagacttgatatatccccaaggtacatcattatgtatatgcagatttaaaaaaaaaaaccaaaacagaaaaaaacctctaaaatccaaaaaacttcccatcccaaacattttggataacggatacctagcctgtattttgtatccccgggatttgcaacagttctgtttagataatggtgccaagtgttaaattactttatgtttaaaactttttattgctttaatttattagataattttttagagatctctctgtattttttcttttcttttcttttttttttttgagatggagtcttcgcttcgttgcccaggctggagtgcagtgtgcaggggtgtgatggtggcccactgcagcctctgcctcctgggctcaagcagttctcctgcctcagcctcccgagtagctggaactacaggcacccactaccacgcttgcctagtttttgtatttttagtagagatggggtttcactgtgttgcttaggctggtcttgaactcctgatctcaagtgatccacccgcctcaacctcccaaagtcctgggattacaggtatgagccactgggcccagccaacatccactgccttgatatggatattcacagcttcctgcctgaggagatggtaatggacctagaacatggttcccctattccttggagacttcagagatttaaaacaatctcaaacaccaaatacaactcttattgggtaagcaaggtcaccacattccttgtctttctgacaccacagagcagcttccactctaaggaagcaggaacatgagctgttgttttctcttaaggtttgaaactcaggtgccttattttcccccagtgtgttcttccattagtagccaccgtgcctggccatctctctgcattttttccttttttttttttttttttttttgagatggagtcttgctctgtcgcccaggctggagtgcagtgacgtgatcttggctcgctgcaagctctgcctcctggattcatgccattctcctgcctcagcctcctgagtagctgggactacaggcacccgccaccacgcccggctaattttttgtatttttagtagagacgaggtttcaccgtattagccaggatggtctcgatctcctgacattgtgatccgcccgcctcagcctcccaaagtgctgggattacaggcttgagccaccgcacccggcctgtattttttcttgattgatttggattttgtttccactgtggcaaattagcgatgatgagaatgtatagtctggataacggaatggcgtatatggtgaaatataccaggaggtatactggcaggagcaagggactgggttttctcccccgtgcaagctgttcttgctgtgtttcttagtcatgcccttcacttttgaagatgaaccatgtttatgaaggtgccctttgttctttgagatgagtatgctttttttcaaaggattttcttcattgagataatttatgccttgtatgttccactgaaacaattactttcttggttaggtgactagtaaaaatgtctgtgtcttcctggttgcgacatacactgacggcctaccaactgaaagtgcagagtggttctgcaaatggttagaggaagcatccattgattttcgatttggcaaaacttacctgaagggtatgagatatgcggtatttggcctgggaaattctgcctatgctagccacttcaacaaggtaggtctatattg

SEQ ID NO: 38340 - DNA, 2300 bp, Homo sapien
caatggtatgatcttagctcactgcagcctccgcctcccaggttcaagcgattctcctgtctgagcctcccaagtagctgggattacaggcacccaccatcacacccggctaatttttgtgtttttagtagagatggggtttcaccatgttgggcaggcttgtcttgaactcctgacctcaggtgatctgccctccttggcctcccaaagcgctaggattacaggtgtgagccactgcaaccggccgtcccctatattgtagcgcagtgaacaattgtttcctgaacatcacaagctcttttaaacactacagtgtataagcaggtctctctctaaaccactctcctcttcctcctctgcccaaccaatgtctgctcatccaaagaatgtatcccgtgtgttcattaacttagcaatttccagtaaaccgtttaattgataacttgttaagagaaggcaggaaacctccatgaaagagaaatcattgggtatttcctacagcatttaccacattgtaggccttcaataaacccttgtgaaataaacaaacctctttactcttcattccaccttgctaagaatctcacctaagtctgtctaccatgtgaaactgcagatgacctcacagaaaattgaaagaagtatctctaaaaataaatttattaggcaacacactataggctacagtccacttctgatttttttttttttttttgaggcggagtcttgctgtgtcacccaggccggactgcagtggctcgatctcagctcactgcaacctccgcctcctgggttccagcgattctcctgcctcagcctcccaagtagctgggattacaggcgcccgccaaccatgcccagttaatttttgtatttttagtagaaactggatttcaccatgttggccaggctaggcatgagctcctgacctcatgatccacccgccttggcctcccagagtgctgggattataggtgtgagccaccgcgcccggcccacttcagatatttattttcaggagggagcgcatttagatacagaccgaaaatgtatttaaatgtgaatacatttaaatgtagttacttaaatctatctaatatatttaaatgcagagagcgaatttgtgtttacatatctgacatggaatgcaactgtgctagccaagattcggtgtagcttaccagccagaaatcacatatcctaacaggtagaaatgcattgcattttgtaaaactgcgcagctatgcaaattaggatgtgtctggacgctctaccttccccaaaataacctcaattttttaaaaaggccaggcagcgtgcatcaggcctgtaattccagcaccttggggggccaaggcgggcggattgcttgagctcaggagttcgagatcagcctcagcaacatagcgaaatccccgtctctacaaaaataaaaaattaaaaattaaataatataaaaataaaaataaaaggggagagagaacaggtagaaaggaaatgcattcagtctatggggatttcacgctagggcttcaagttcacggccctgtgatgggatgtgggcagggcctgtctgggacaggccgaacccagctccttacagggccgaatcctttgcccgcagccaaagaccccgaaggagcctgcctcggccttaaggcgcaaccaaggagcactggatggctggggcgctgaggacgccgctccggggcctccacgcctcgccacgcccctcggccatgttccccccatttccagggaggttggaacgccgtggttctcaaggaggacgcgcgagaagggagaccgcgagcccagctcacctctagctctcagctcgctccatggactcaatacccgatccgcctcggggcctgggaaagttccctccacgactcccacaggcgccccgcctcctgggctcccattggctgcttttgacgttgtgctccaccctttctgggcggggcggaaaaaatacttcccgtctctccttttcgcctattagctccgtcaaaggtcgagtccgtgacgtcaaagagcatgggccaatcagagcacaccggactgctttttttttttttcccgaacgaccgcagcagggtcacaagggagatgtccgcccccagtcgtagcctcggacggtttctgagcgttggtgtttggcacgcgccaccctctcttgctttggttccgccatgccgatgtaccaggtaaaaccttatcacgggcgcggcgcgcctctccgtgtggagcttcccacctgcatgtaccggctctctaacgtgcaaggcaggagc

SEQ ID NO: 38341 - DNA, 2300 bp, Homo sapien
accactgcactccagcctgggtgacagagcgagactcggtctcaaaaaaaaaaaaacccacctttgacctaggccccaaagaactccagggaaaatgagtggctcacaataaacctagtaaaacatataaagaaacaaggcactgacaaaattatttcacaaacactttagataatcatctatcatagattataaaatgactatgtttaataaaattttaaaaataaaacagggagagaatgggctcaaaaaaagaaataaaaggccaggcatggtggctcgcacctgtaatcccagcactttggaaggctgaggcgggtggatcatgaggtcaagagatcaagaccatcctggccaaaatggtgaaaccccgtctctgctaaaaatacaaaaattagttgggtgtggtggcgtgcacctgtaatccaagctactcaggaggctgagatgggagaactgcttgaacccgggaggcagaggttgcagtgagccgagctcacaccactgcactccagcctgggtgacacagtgaaactccgtctgaaaaaaacaacaaaaaaaaaaacaaataaaaacccagactatattgtttagggatacttaggtgacaaaataatagacacaaatagaacataattaccataaaaatcaggaccttgagggggttggggggaaggtttaagtggaaagaatggagcggtgacaatgtgtgtcaacctgggaggtggtgaccctggagttcgctttgtaattcctcaaaatgagcatttatgtgctattcacttttcacagggcagaatctctgaactaacatgtttaagcagccatataaaaaaaaaattattctcaaaatgtctcaaaaaaacaaaaatgttatatatatacgtataaaagaaatatatacacatacgtatatatctatacatatacgtgtgtatatatatgtatatatacatacacgtgtacatatatatatatatatatatatatatatatatatattttttttttcctagtcgggcgcggtggttcacgcctggtatctcagcgctttgggagaccgaggcgagaggattgcttgagccctgagagtctgagaccagcgtgagcaacatagtgagacccttgtctctattttttttttttttttttgagtcggagtctagctctgtcgcccaggctcgagtgcaatggctcgatctcagctcactgcaaactccgcctccagggttcaaacgattctcctgcctcagcctcccgagtggctgggattacaggcgcccgccacacgcccggctgatttttgtatttttagtagagacgaggcttcaacgtgttggtcaggttggtctcgaactcctgacctcaggtgacctgcctgcttgggcctcccaaagtgctgggattacaggcgtgagccacggcgcccggcctgaataaatcttttaaaacataaaggtttgggtgagtccctggccggccggcacaaatgccggggtgggaccgcgaaccgggtgggaccgcaaaccgggtgggacacactcgttccggcccggggggactcgggccagcagccggccgccgcgcgtgcgcacttggcgcggggtgggggggaaggaggggcccgcgctcctacctgtaggtggccaacgccgggcgctgggccgccgctcctgccttgcacgttagagagccggtacatgcaggtgggaagctccacacggagaggcgcgccgcgcccgtgataaggttttacctggtacatcggcatggcggaaccaaagcaagagagggtggcgcgtgccaaacaccaacgctcagaaaccgtccgaggctacgactgggggcggacatctcccttgtgaccctgctgcggtcgttcgggaaaaaaaaaaaaagcagtccggtgtgctctgattggcccatgctctttgacgtcacggactcgacctttgacggagctaataggcgaaaaggagagacgggaagtattttttccgccccgcccagaaagggtggagcacaacgtcaaaagcagccaatgggagcccaggaggcggggcgcctgtgggagtcgtggagggaactttcccaggccccgaggcggatcgggtattgagtccatggagcgagctgagagctagaggtgagctgggctcgcggtctcccttctcgcgcgtcctccttgagaaccacggcgttccaacctccctggaaatggggggaacatggccgaggggcgtggcgaggcgtggaggccccggagcggcgtcctcagcgccccagccatccagtgctcc

SEQ ID NO: 38342 - DNA, 2300 bp, Homo sapien
aaacgaggtctataattacatgagtatatagaaaatgttaagtgttttcgtgaaaaggtatataaacaataatgaataatcatttcacattgaaaataatttaattttaaaaggagatagtacaaataacaaaaaaaaaagtcgaagtacggtaatagtagaaatttcaaatattttaggaatgtctttctccagagtagcatgttgtttagaaactaaatttccacagtagatttcatagctcctgaacatgaattaaaactttgatattagctgcagaaatgtacattagtttgtggggaggggataaagaaaataatgtgccaaccttccaacaatttccccaaacagatttttgcatcttggtcattacacttactttcaagattcttttcttggtttaaacatgtaatcttgtctctttgctcacctgctcactcttcaagcaagcctacagccaaataaattgccatacttgtttaccaataaaccattattttccaaggaattttttcttaatttttaaaatttaacaagtttaactacaattaataaagtactcccggcacaaggactctgaaacattgtttgggtcttggaaaagtttgaaacttccaattcattaggactttgagtaactattttgtacctaagaatgagaattgatggagagagtggtactaagcacataattttatgaaatatgatgaaaacatgagagttttgttatgacgcacataacaataaagaacctgtttctttttagcaggctcctaaaaagtacttcccttataattattaaataaaaacactcacttattcagtactcagctagcttttaagatctgaataacagaagtacacagtgagagaggtacttacatggtttccttggatactggatgatgccattcaggtctatgtttttatctgaaaatggtgccctgtggagaaacgaggcttggtgagtggctgtttatacatagtaagtaaataggaactttgtttattttacaaagcattttttattttgacccagctttccttttctcatcacacccaactcctgtaaacagcaataatatggtagaacaggtactctgtacaactctttttaactccacttaagaaatcataattattaaggcagaagctcagaatgctttggctaaggatgttactccttgggctgctttatatatcttgactattttatttatgtcagacatattaatgaatattgcctgcctctctattttcctcaaaaggaatattgctcaaaccactaataaagaaattagtctaaaacattcacataaatgataaatgtccttaccttaaccaaaagataagagaactcaagctttagccagtttctaaacatgaagggtttccatagaccttagctgccattttacatgttccagtgtcatcctagattcccaatagttttagtgctatgagcatacaattttgacattcagtccctcagaactacacacattctaattttggtagtatgaataatctctcctatgtgataagttatttaaccttctaatatttcttagaatcgaaaagaacaaatgagctgcagcaaagaatggcaaataacttttatgcttaacacaatttaataacctgaaatgaagtaagtatgtgctatgtttccattaaaaagtttccagccacaattaattgaacgaaaacttgtcttgttccaagattattcttggaaatgtaattttaaaatctgcttgaaatgaggaaacttacttttttataccatatgaaagcaatttcattttttaggaatgatttttggatagacttccgattggatattttccattggaactagcagcatagggggtcgggaggggggaggggagggaagcaattctgtgttcttttgccagcactgacaaaggtctggttgtcagtgatacctttacagctaaatttactccagagtgacagaaacaggtgcacctcggcctgccagacacttgtgcagagagatcacgcatctcacggcttgacgatcaagggggcaaagcctcggtcttcatagaaaaggagaggaggcaaacgcagcccaaactggggggtttctcttcaaagccagctggtctggctttattctacaggaatttttttacctgtcagggtttggacaacaaagccctcagcaggtgctgacgggtacaacttcctggagaagcagaaaggcactggtgagtttcaattgccaaaatatattttttaatctctaaaagttaattttgttgtcttgaaag

SEQ ID NO: 38343 - DNA, 2300 bp, Homo sapien
ttctgtggtttaagattaaatacagtatttgaatactaaaataattaagattggaatcattgatatctatgtctatctatccacttctgtcacatctctatgtatctgtaatgtaaaccttcccaatctacagagaattaatttctgattaagcgttcatgaaagagttggctgtataccaggccttgaggaaaacgtaataaatttcaaaaagcagaaattgtagggttcagattttctgatcacaaagcaaataataataatgattataaatgcttaaaatacccacttgcttagaaattaaaacaaaaactataataagtttttgagtccaagaggaaatcagagccataattataggccatttaaaaaaataatgacaatgaaacagtgtctatcaactcttacggaatgctgttaaagtagaagcgagagataagtgtacacttgtgatcacttaaatttttaaacaagagagaaggtaaataaacaaaccgcacattcaacccaagaaatcagaaactcccatcccagcacttacaagaaggaagtaaataaacaaactgcttattcaactcaagaaatcagaaactctaatcccagcactttgggaggttgaggcaggaggatcacttgagcccaggagtttgagactagcctgagcaacacagtgggactctgtcactacacaaaatttttttaaaaattagcctgttttggtagtgtgctcctatagtcccagctatttgggaagctgaggtgggaggatggcttgagccctggaggtccaggctacagtgagctatgatcgcaccactgccctaaagcctgggtgacagagcaagaccctgtctcataaaacaaaaacaaaaaaaaacctccttttctcagaaacagtgcctggagaaggggaggaggaaagggttggagggaagggatggactttgcctgcttcttctgtaattagctagatctgtctgcaaagatgggcacagaaggaggggtgcagaattgcaggctatttctataaaatctccagttctttatgtttgcccaaccaaaccctggctttccccttacttctttattcaactggaactttatacctttttgcctcccttcctgcacccattcacatatgacacggtaacctaaggtatgattatttggaggggtttcaagtctaactgccccatgtttatagaacaacctataattacaattaatagcagataccaattcatggcacaattaattcaagcacagagggacatctgggcaatgaggtttttttaagatgacaaatggattcaagtgaactaatgcgtgtgaagtgtagtgcttagctggtacatttcaagtgctcaatacacatcaactattagatcatttacttcattacatatatttgtgcacatagaaaaattataaagctattagaactaataatggagctcagttaagtgtctgaataaaaggcaaatgaactaaaataaatatatttactatgttctatcaatatgctcaaagatgtagtgagaaaattccacctaggaaagttttttaaaaatgaagcaaaacaaaatagagaaaagtgaaaatgagtaatgtacataataatatttatgatatgcatgacctatatgaagggaaatataaaaccttatggagaaaaatactgatgaataaatggagagattctttggttagaagacttcctgtcttaaaactgtagattattcacaactaaaggtatattttaacataatccaataaaaatattaatggaagtttttggggaaatctttggatcatgttcatctggaaaaaattaagagataagattattcaatatcattggcaattaggaaaatacaaattaaaactacaatgtcattttttactttttggagagtcactcactttactttttagggtctcactctgtgatatggtttggctgtgttcctacccagatctcatcttgaattgtaactcccataatacccatgcattctgggcagaacctggtagggggtgattgactcatgggggtgggtcttttccatgctgttctcatggtagtgactaagtctcacaagatctgatggttttaaaagatgggagtttctctgcacacgttctcttgtcttgtctgccaccatgtgagatgtgcctttcaccttctgccatgactgtgaggcctccccagccacatggaactgtaagtccaataaacctctttctttggtaaattgcccactctcaggtatgcctttatcagcagcatgaaaatggac

SEQ ID NO: 38344 - DNA, 2300 bp, Homo sapien
aactgtgcctgctaagcctggtaaggcctaataattgttaaatgaaaaacaatcaatcactcaatcatagatgtgtcagattgtgagagaaaacacgtccttactgttttctctaccaccctccttccagtaatactaataaaatgtgcacatttgtattctaaagaggtgaaatcatatacacagcgctctagcacggtgcctggcccattgtaattaatacatgccagtttattttccttttcttcctccacaagtatgggctactagggaggacgaagggttggtgccgtggtgtttatgtgcctggacagaaagtgaagcgtatccaagaggctgctgagagcgggctgtcggtctttctgatccgtatagatcaattccagtgccctgaaaaacgcacagctattttacccagagaggctggtcgcttttgttgatcgattctcggctgcagtcagctctttaatacaactttttatgagcatcagccacattgcggcgggaggaggggctgtggtggaaaaagcagggaaaccgccccccactcccaaaaagtaaaggaagcccgcggggcagggactgcggtttgccggtctaacgggtcctcgagctggggcggcggtcccggccccttcggccccgcccctcgcccgcggccgcctccgaggttcaagttcggcccccggctgttaggcctcgcgctcccggatctgaagccgcccgtgcgtccctaggtcccccgctggaagacgaggcgggaatcccaggggtcatccgggcgcggggtcgctcgtccacgcactgtggtgccacgtggaggaaaagtttccaactctgccagttggtgctcccactgcgcccaggcggagcaaaggcccgcgctttggcacccgctccccgttctgtctcctccagtcgcgccccctcccagggacgccccccttgtaccccttctctgaattcccttctctcctcgcagcgcaggtagccaagggaaaacacccttgggggctggtggggcttcccgagaaggcggcctcgggccggccaggggtagaggatccagggacaagtgtcccgaggaggatgtggggggcgcgcgcgcgaagtggcctgggagcaggggcccacacgcgtccccgctgcgacaggcgggatcctccggcggcttccacgccctggcgcgccaactctgcccggccgcggccgaccccacgcgggcgccccctccacgcccccgcccccgcccccctcacagctccccaccgcccccagtgcgcaggcccggccgccccagcgcgcatgccctgggctcgcgagcgcggccagcccccagccttttgctttctacacactctacaactggggagggggcgggggaggagggagcccagccgtccacgtgatcccgccggccggggccgcgggggcgggagcgcgcgccgagagaggcgcggggagggcgggtgcgcgggagcgcgcgcactcgagcgagcgagcgaaagcacgaacgagcgagcgagcgagcgagcgagcgggcgggcgcggggttgggctgaggcgggcggcggcggcggcggcggcggtgggctggccgcggagggggaggagcgggagctgcgcgaggcaggcgggcgggcggaggatggggcagtgcccgggctcccgctgcagccgcccggggacacgccgtgcaccctccggctcggggctttctcggcggcggcggcggcagcagcagcagcgttagcggcggcggcgagagcagcgttcccggctgcgcttctccctcaggcggggcggcgagagaagcggcggcggcggcggcggcacaccggtgtctctcccgctggagatttctttctgctttcctcatcgactgactgactcaccccctcccttttttgaggaagggtgacctcttctctgggactggaaaaaatatttttgtgaggaggggggcgggtggcagcgacagggtttgcttcttctcttctttcatctccctctcctcccccctcgaagaccgaaaagcaaaccccacaactgctccagcagcatcctccttcccttcctccgcctcccttctcctccgccgctcgcagtttcgccctctcttccgctaatgattgcattattatgctcccctctctggggggtctcgcccctcttgggtcgctccggagccccggcctcccctggctgcatttcttaaaaatttgggagcctgggagtgagttttctccgaggcgtgtgtgagaggcggcgggggtgttttcctgcgcgaggggcgggtg

SEQ ID NO: 38345 - DNA, 2300 bp, Homo sapien
gttaggcctcgcgctcccggatctgaagccgcccgtgcgtccctaggtcccccgctggaagacgaggcgggaatcccaggggtcatccgggcgcggggtcgctcgtccacgcactgtggtgccacgtggaggaaaagtttccaactctgccagttggtgctcccactgcgcccaggcggagcaaaggcccgcgctttggcacccgctccccgttctgtctcctccagtcgcgccccctcccagggacgccccccttgtaccccttctctgaattcccttctctcctcgcagcgcaggtagccaagggaaaacacccttgggggctggtggggcttcccgagaaggcggcctcgggccggccaggggtagaggatccagggacaagtgtcccgaggaggatgtggggggcgcgcgcgcgaagtggcctgggagcaggggcccacacgcgtccccgctgcgacaggcgggatcctccggcggcttccacgccctggcgcgccaactctgcccggccgcggccgaccccacgcgggcgccccctccacgcccccgcccccgcccccctcacagctccccaccgcccccagtgcgcaggcccggccgccccagcgcgcatgccctgggctcgcgagcgcggccagcccccagccttttgctttctacacactctacaactggggagggggcgggggaggagggagcccagccgtccacgtgatcccgccggccggggccgcgggggcgggagcgcgcgccgagagaggcgcggggagggcgggtgcgcgggagcgcgcgcactcgagcgagcgagcgaaagcacgaacgagcgagcgagcgagcgagcgagcgggcgggcgcggggttgggctgaggcgggcggcggcggcggcggcggcggtgggctggccgcggagggggaggagcgggagctgcgcgaggcaggcgggcgggcggaggatggggcagtgcccgggctcccgctgcagccgcccggggacacgccgtgcaccctccggctcggggctttctcggcggcggcggcggcagcagcagcagcgttagcggcggcggcgagagcagcgttcccggctgcgcttctccctcaggcggggcggcgagagaagcggcggcggcggcggcggcacaccggtgtctctcccgctggagatttctttctgctttcctcatcgactgactgactcaccccctcccttttttgaggaagggtgacctcttctctgggactggaaaaaatatttttgtgaggaggggggcgggtggcagcgacagggtttgcttcttctcttctttcatctccctctcctcccccctcgaagaccgaaaagcaaaccccacaactgctccagcagcatcctccttcccttcctccgcctcccttctcctccgccgctcgcagtttcgccctctcttccgctaatgattgcattattatgctcccctctctggggggtctcgcccctcttgggtcgctccggagccccggcctcccctggctgcatttcttaaaaatttgggagcctgggagtgagttttctccgaggcgtgtgtgagaggcggcgggggtgttttcctgcgcgaggggcgggtgaagttcattgcccccacttttcccgcgacctttttcggacccgattttggatcgagttgaggggggcgcgggcgttttcggggggcggggggcgcggcggagaatggccgcggggagggctccccggagcctcccagtctcttgatcaaagcattccgctattctgatttattgcttgcttggtgagttatttttttttcctctaaaggagacctgtgtgttcagccattactttgctcggcgctgctcccaggcatctccgaccctcggtgctgtggggagccccacacttgggctcctcgcctctcgccctcgctccccgtccctcctcccctctctccgccccttcccccttttctttctcctctctttcttcccctctctcccttctttcggccgccgtctcccccgcgccctcctcggggcggagggaagccgtgaagggggagggagggctcggtgtcaatttttttttgtgtggctgcggccgtagcctgtggcgggcaagcggggagaccccggcgcagcagaaccatggatggcccgacgcggggccatggactccgcaaaaagcggcggtcgcggtcgcagcgagaccgggagaggcgctcccggggcgggctgggggccggcgcggccggcggcggcggggctggccggacccgggcgctctcactcgcctcgtcgtcgg

SEQ ID NO: 38346 - DNA, 2300 bp, Homo sapien
aaattccaagcagcatgttctaataggaacatgctgccatttcaactcctattttaaaacaagagagagagacagaaagaggtcacactgtatggtaaccaccacccaccttggcaaacttaaagccacagttggaattattctaataagtggtgaacctcaacactcaaaattttggccaataaagcaccaattctagaaccagagagtaactgattcaatcactaacatcaaaatctacgaccaccaccaataccaccaacatcaccatcaccaccacctgcaccaccaccaccaccaccaatacctcccttactcccaaccactggccaccatccaccaccatcaccaccagcagcccaaaccaaaagcagttcacacagaaaaggacaacactgataggaagccttcctttgaaaaaaatatttaaagctgacacccaaacacataaacagaaccagcaatctaaacctgtacagttaccgtatgtgagatttaagctgtcattaacaaagcttgcatctgagcatgtgaaacaataccataataacgcaaaaaaaaaaatggaaagggaaaagtttccttcaggaacctcaaaccatcacatcaggtgcatgaaacactataagccaactataaaccgtatcttggttttgtgcttaagaaaggtggaccaactctgcagaatctcaaagccttctgtgtgtgtgtgcatggtgtgtggggggtggggacagggaggtgggggaggaaattaggcggttaaatttatagaggccaatgaccaataccacaccaaaggagacaggtccaggcaaagacagtttccccccaaccctggacagtctccccctccctcccttttccctttccccctaccctaggagccagttggctggaaggaaaatgtgcatttgaaaatcaacgctgcaggtgcccaaggaataaagaaagacacacacatagacacacacaaagccaatcacttagaaagaaaaaaaagaaaacacaaaaaaggaaagggagagggacaattggtgacaagcccttcagatagcagctaggattttattcttccctcccaccagtcttccctggtgtacctttttctgtcctttaactaaattgctcatgtacacacacacatgtgcctatgtatgtgtatagataatattataattaaccctttctgtaacagaaccccatacagaatacagagagctattccacccttccctcttctctcccctcctccctcctttctcccaaccaggagaaaacgcccccttccccagcttcaccaaaaaaaaaaaaaaaaaaagaatatgggggggtaatggggggaggcgcaaagaaatcacaaaaccccatcagtctccagtcccgaggacacccgggaaaggtatatactacacagacacacacacacacacacacacacacacacacacgaacatatgactctgtagaaagcacacagaaccgtccacaggcgccccaaacccagcaaagagacttccaccagccaagaagccatgattggggagggagaggaggaaggagtgggggcagagctctctgtggagagggggcgcattgttgtgatgcccgaacccctttctttctgcccatctgctgtggagggggtgcagggagggggcgcaggggaaaggcgagcgaggaaacgagaccaggcacggctttgcgactccctcctgctgcctgtctgcccgcgcccccagctccccccaccaacaataagacctcagcctagacagacagacagacagacagacagacagacagcccggagcgcggcgagggaggcaggagagccgggcgcagccgagtggggtcgtgcataaagggaacccgggggaaggggggtcccccttacctccagcgcttcaaaagtgacaaagctggtcatggcaaatccatcaatgatgtcctcttctgccgaggtggactctctccgcttcctccgcgggggtctgggccgggacggggcggaggacgggggcttcccattgtcttccttgtcggagcccgacgacgaggcgagtgagagcgcccgggtccggccagccccgccgccgccggccgcgccggcccccagcccgccccgggagcgcctctcccggtctcgctgcgaccgcgaccgccgctttttgcggagtccatggccccgcgtcgggccatccatggttctgctgcgccggggtctccccgcttgcccgccacaggctacggccgcagccacacaaaaaaaaattgacaccgagccctccctccccctt

SEQ ID NO: 38347 - DNA, 2300 bp, Homo sapien
aaccaacgcttacagtctcctccatggttttgtcacatcagtcattcctttccctttgccttgtacctgctgtctttttcaccacttccctctcagctcatgaactctagcgagtttcctccaatctttaaaaatctaaaggagaaaccacctccatcttgtgtgtctccatccctcaaggtcaaagaacttttatgcttgctgtcacccttcataacccgtggatgaatagttactgtatcctattgtgctaataaaatagtttcttaatacccaccaatgactttctaataaaatagcttcttaatgcccaccagtgaccgcattctgcctagttgacaagctgttccactttggatctctctcatcccatggactgcctgactttgccactccttgttcccatccttttctgtatctttgtcaggctctcttctctttctccttaaatattcgtcagtatcccaaagtttatagagaatgttacttaacagcatggatatgaggaacaggtaggcctgaattcaaatccttgctccactacttatatggctatggaaacttgagtaaattagtttttctgagtatgttttctcatactgacttcagatggttgtgaggatgaaattagcaaatacatgccatgtgcttagcagagtgccttaggtcactgcccctggcctgtctttcccctcttcccactgttcatgctcttacctgccattgttattctttctgttcctggcctccttcgggaacccaaaagccacattgtcaaccacctgccagacacctttctcaaatagaaataactatccctttttcccaaagtaaatttctccttccccaacttggcttgatagtctctctcaagtaggaagcacagatgtccatttgacctcctccctctctcttaccctcatatccggtcgacaatccatgtctatcctagcccctggattcttgagtctagacctttctttgattcttaataccaccatcttggctaaggcttctcctacctccagcttagattattgttctggcatcccaagtcgttccccatctctattctattgtaagcattctccctgaaattgtacatatattatttagttgccttctcaagttgttctcctttgtactttccaatcccttattaacttttggctgaaggtttcatagccaatctgtagctcaggggtagaaaggcaaaaatggttgatgccctgcatagagttagaactcattaaatgctgaattaatgcagtataaaataaagcaaaataggaagtgtagtaagtcataatgtaataagaagtggggataagtggttgattaaccaaaagttagctttccattgataaatactacagaattagttgtagaaaaaagagatttataacttgatcttcatttctcacctgagcctatgacaagagggtaatggattggacaaacaagtggaaaatctcagctggcatcaatgggctgtcttctgctcccacccagtgggtgtgaagtcactctctggctctctgtatacctctccttccagccattgctgatggagccaggtctctattttttttttttttttttttttttgagacagagtcactctgttgcccaggctggagtgcaatggcatgatctcagctcactgcaacacccaccttccagattcaagcgactctcctgcctcagccacccgagcagctgggattacccgccaccacatctggttaaattttttgtatttttagtagagctgagttttgctgtgttggccaggctggtctcgaactcctggcctcaagtgatccacccaccttggcctcccaaagtgcttggattacaggtgtgagccaccacacccagcctggatctccattcttgatataggtgttttgatcctaaggagacaatcgttggtgaatttgaaacagattcttcaggaaatatagtgcaagaccaaaattgggtcccaggaaaaatcatgtgatacttcgtaatgcaggtctcttgtagacacaagaaggcacacttgctcgtttccctgggtttggtttttgttttgttttcttccccctatgtctcacatcctctcctgcaaccccaaccctccgtaccgcaggcaagaaaacattgatgtttctgcatctggcagcatgtctctgggagaagaggccggcggaagggagtttgatgtgtgagtgacagatccccaggtaacaccactggggaacacttgatctgacctgtttgaaggtgaaaactcaccaggtcacactggaaac

SEQ ID NO: 38348 - DNA, 2300 bp, Homo sapien
tgggcctttttaactgttttgtgtccactttcaggtagattttacaaagcatgcgccctgaggacccgattgcacccaggcagagaattccaagggaatgaaataaaaagactatttttttgcatatacatttctatgttaaaaatcaaaacttaaaataatacacaggcaaaaacaaaacaagaaaccaagccccagaaaaaaccaaaacaaccgcaaaaacaaaaacaaaaactttaatgagatcaaaatgatgaggggaaaacgatcagctccatttagctttgctgcccgatttttattagttggcggcctgatttctattttagacccaaggaattaaatggatcaaccggggtgggggggcgttgaattccagtatttcgagttcctgggttttgggaagaggaagaggtagtggaaaaccaggagccaaatgaatatgcttcttataataaaatttgaacagagcagcgggtgggcctagaagcagtgactggggaggttagaattcttgcacgcagagaacccccccaagcccgctcacgcccggcctggctccgaaggtctcagaatccgagcctccaggccagattttccctctagccattcctggccacgcagcgcggagccgcgagcacacagaaaaggatgtcttcatcgccaaccgggatggaacgaacccgcccgctcagggagtactgagaactaaagggtccctccagcgccggccgcagccagcatgccttgactgcctccatcccgcgcggtccccactctccagaagcccccgccctgcccgggtgcgcgcgcgcacgagtcggcgaaccggggagctgtgcgctcggcagcctgcgggcggcggcggcggccgccgacagcctctcggggacagggtggcgaagagcggcggaggaggagctggcgccgccgccgctcccctcgggccgcgccccgccctccgccgccacctgcgcgtcccctccgggctcctcagctccggggctgtgtggctctcggtgccgcagcggcggtgtcaccgcgtccgccaattgggagactcggcgttttggctcccgggggcgcgggacgagccgcgcggccggatctggcgagcggagggtgattcggcacgcgtacctccccgccgcgctgcccgcgacgttttgggagggggtagagaactgctgtgacttttgaggtccgactccttccggccagcctcgcgacgcgccagctccgagacaggccggtgtgccctgaaggccccgaaggctctcggcgcggtttgggggcttggaacgtgtccgggagccggcggcgctgtgagcgctggtgagtttgccggcggggtggggtggactccgcgcggggggcggagaggacgtagcgctcggcccggcgcccgccccctagtgctgcccccactttgagagtaattgagacttgagcgtgactgcggagcctggaggatgcgggctccccgagcgggcttcccctctgcccggcgcgatggagcgggtcggtgagcggaacaaaggcgcctgcccgggggagcgggtcttccgctgaagagcgcgggtggcgcgccgcgacggccgcctgcgggccaaggtgggaggctgtgcggccccaggcgcggcgcgctccgccgtgggcgggcggcgatccctgagtccggcacctgtgcgccgctccctctgtgcctcccgggcagccccgcctgccggcctcggagtccgcggcgccggcggctagaggtccagaggcgaaccacttgctggtgcagaagagaaaccctcaaatccctggcctttcgcggagacgcctggacggggccgtgcgccgtggactgagcaggcgtctcggggagcacttctgcagagcgaggacttccatgtgagcgattccgttctccccaccaccaatccgacctcccagccgtctccgccgcccgagcatccttgaggtgggacgagcaggggcttggatccctgccggccgtctggtgtgtgaggcttgcacggcccctggctgccccgcgcctcgccggagcccgagggggcgcaggtccggggcgagggccggccgggctgtttgatggcttcactgagaagagtcaaagtgctgttggtgttgaacttgatcgcggtagccggcttcgtgctcttcctggccaagtgccggcccatcgcggtgcgcagcggagacgccttccacgagatccggccgcgcgccgaggtggccaacctcagcgcgcacagcgccagccccatccaggatgcggtcctgaagcgcct

SEQ ID NO: 38349 - DNA, 2300 bp, Homo sapien
gatgaagatgagctcacctgctggagacaattctcttctggaaaaaatccgattccctctcatccctactagggcccaggtcacaggttgcttctatgtgttaactctttcttcctcaatgttctccaagcctctccttgctgatcaatgacaacgccacccccttgggctcctgtgccatccctgaatcttgctttcatggggacaaatcctacaagcatccacatgcttaaggacgctgcatgaaatcccaaaacccattcagtgtgatgctttcttttgtgaacgaaaaagctcagacaaaagcatgttcatcctaatgacgactggcaggtttgtgcctcctgacgacgagagccactctgcagcccaccttatttccagtgcagtttagcaaacatctggggtttgagatgcaaccagatgggaaccttttagcctggtgggagaagaagtaatcgaatttacacagcagaatgaaggaacagcagtgaaggaagagtagcaatgcagagagagaagggaaaaggagagggccatgttattctttgcccccgcaaggctagcccagcatttagcactgtgtcaggcacatagcagatgcccattccgtatttgttgaatgagtgaatggaagggcttctgcctgtttagacaaccagtgtgtgtatgttccaaaaggaaaatcctgcataagggcagaggagggaggaatattgtgcagatgggttgagggctgaagaatgtcctcaggacatcctgagtcctatggactcaggactggggtccatctcaagggagggctgtgggtggggggatgtctgcttctatggggagggtcaggtttcaggtgaagcagatatggtagggggaggttactgagaaaaggctaaagcctcagagaagttacctgctgtgggaaggtctcagaggctacctggaaatggtttgccaggaggaaagggatggagaattcgctaggagggaaggagtgctaggcaatgtgggggtgaaggctcaagaaaggaccgaaggcaggaggggttctgagagtgagcaggacatatagagggtggtggcttagctgggggatctgctcagagccaaggtgggaccagaacacatgccccactgccactcgttttttaattttagagacagggtcttgctctgttacccatgcaggagtgccatggtgtgatcatagctcgtggtaacctcaaactcctagggtcaagtgatcctcctgcctcagccccccccaagtagctgggactgtaggtgtgggccaccatgcctggctaattaaaaaaaaaatttgtgtgtagatggagtcttgctgtacacctttcccaggttcttttcaaactcctaggctcaagggatcctcttgcttcagcgcttggattacaggcatgaaccactgtgcccagctctccctgcttttattttatttttttgtggttcaaatttttgtcttggtttaattatgttgattatattgattttattgtattacagcaacctgcaaattattctcatacctacatagaaataaataaaaataatagttaaaaaaatagtagactctccaagcttagaaagccaggctgtcttctctctctgggagtcagcatcagtggacactcaggtaagatttaaagaaaatctattccagatgatatggtttggctgtgtccccatccaaatcttatcttaaattgtagtttctatattctccacctgttgtgggagggacctggtgggaggtaattgaatcatgggggcagttactcccatgctgccgttcttgtgagtgagttctcatgagatctgatgtttttgtttgttttgagacagagtgtagctctgtcacccaggctggagtgtagtggtgaagggtgaagccagctggacttcctgggtcgagtggggacttggagaacttttctgtcttacaaagggattgtaaaatgcacccatcagtgctctgtagctgcaagaggtttgtaaaacgcaccattcagcactctgtaaaatagaccaatcaacactctgtaaaatggaccaatcagcactctgtataatggaccaatcagcaggacatgggcggggacaaataagggaataaaagctggcggcagggaagcccgcagctgcaaccggctctggttcttttcggtgctgtggaagctttgttttttcgctcttcacagtaaatcttgctgctgtatattctttgggtccacgccgcctttgagatgtaacactcataacactcaccctgaaagtccgtggct

SEQ ID NO: 38350 - DNA, 2300 bp, Homo sapien
ggtgtgttcaggtcactgtaatttttcatctagtgccatcagatttgtgcacgacttttattccagtggggtgtgtgtgtgtgtgtgtgtgtgtgtgtatgtatgtgtgtgaatgtgtacacaggctagtgccttctttgggatatttacccaaattcattttggatgtgaggagatctatttcagagtttggtagcccaattcaaccctaagatataaaatatgattttaaaaagtcatagctgcccgggacattgggccagaaagtagcactggtggtgtggctgtggaatgtcatatctccattgatgggcacacgagggtttttgcactagtgactgacaggtgttaagtcaccacccttgcaactgactatcggagttccaaatgtgagaggtcggaacattttagtcactcacctgcggagagagggagactatagggccttagaccagtaaggcttttagaccacctgggcccgcccctcattctacaggtgagatctgagcctgcggggaggcagctggagaagggtatgtgtgggaccagctggtggcccgccttgacccccggtgcaatcagttttaaggccagtgctcttgcatgttaataacttttctcttggatggtgttttaatccgctgggactaaatgattctgtcataaatccttgcagacgagaggatgggaactgccgtttatgaagtcacctgcaatgtgccaagtactcaacacatgctacctcatgaattcctaggtagtggacctaggaggtggcaattatttgttccattgtacagataaggaaaccgaggctgatgcagaattggggtttgttacaccatgatttttcccaggctccacgcattccacagatttacagtctcagttttcagttttcattctggaggtatcggacaggtgtctgctgtgtgcacgtcctgagaacacagtcctggccctcgtgggatgtatagacattgccactgtagcgctggaatcaatgggatttactgcagagatgaccgtgggggcgaggttaatgccaagggtcagactgaaccctatgtccttcctgtgtgtctgcttgtagatttctggagggaatgtttctttttattattacaattttttttttaattgagatggagtcttgctctgttgcccaggctggtgtgcactggtgtgatcttgactcactgcaacctccgcctcccgggttcaagtgattctcctgcctcagcctctggagtagctggaattacaggtgcctgccaccatgcctggctaatttttgtatttttagtagagaagaggtttcaccaaattgataatcaggttggccaggctggtctcgaaatcctgacctcaggtgatccacccaccttggcctcccaaagtgctgggatcagagtcgtaagccactgcaccctgccctggagggaatgtttcaacctcataatcccggcctctcaaagcctgcctctccttcatgcctgacaccggagggggaacaatgactgccatgttcaataaaacttttgtgggagatgatttaaattgctttgatgacacccttgggagttgggactccttttagtaatttaggttgaaggaatgtgtgctttcatgaaagagaggaaatgtatctggactctgggcttgaagctcttctttctaagaggaggcttgttggatttcaaaaccaagacgacaccacctcttggtgtgctggcagacacagagagaggactgtctgtcttccctcctgtgtccctctctgccacagctgaaatggctgatcttttcagaatcactgactgggggatgttcatgagcttggacaggataacaaatggaggtgggttattttctcatcctaataagtgagaaacagctgttcttcctagcttggaaagcaagtcatttgttttctacacacacacatgcatgcgcgtgcacatacacacaaccacacacacaaacacacatggttatcaacatgctgctaggaaaaattaaaaattgcgcatcatatttctaaaagaggaagcagagaaaagggatttccagaattctaaacacgcctcccatcactgcgtctcctctcagctaggactttctgtttgcacagccgaggcctgcagggtacattccagaggtggacttggggctggccttgaacttccagaccctctctcccctctctggccggggctggggaaatgtcagctattctgagggccttggaagctggactcagttattttcggtaatgtatcatcaaccacttattccac

SEQ ID NO: 38351 - DNA, 2300 bp, Homo sapien
cgtggtggcttacacctctcagcactttgggaggctgaggcgggcggatcacctgaggtcaggagttcgagaccagcctagccaacatggcgaaaccctgtctctactaaaaatacaaatacaggcgcctgtaatcccagctactcaggaggctgaggcaggagaatcgcttgaacctgggaggcggaagttgcagtgagctgagatcatgccattgcactatagcctgagagacgagtgaaactccgtctcaaaaagaaaaaaaaagaaatatcattggaaccaaggtcttctgcctccatactcagtgactctttcgctgctgatagatgggctgaactgaatgcttctaatgcatgatctggacttgcatggggttcatcatggttcatcaaagaggtagtggagcttcagaattaagacatgaaccagaccagctaggttagaaacctccttctaccaccacttggctgtataacctggggcaagctacttaacctccctggtcctcagtatcctcatttatataatgctgatcattgtatctacctcatacgattatcttgggggttgcattagtcaacacatgtgaaatatttcgaatggcccccagcactagtaagtgcttaataaagatcagctatcattagctcataaggaaaaataattcgtgttcagagttgattagcaaaggcagctgcgcagtcattgtgacttgaataaggtggggaaaatgatctaagagttgagaggaagaactcccacgggagaggtggtacttggtcttgggaccaggtggtgagagaggtgtgggaggtggtacttggtcttgggaccaggtggtgagtgaggtaggagagatggtacttggtctaagcctccttagatggctgtgctctctgccagtagcaaagggcatccccaggggagaatttcatgagtggaggcttggccagggccatggtcctaagcctgcctggaagccttggaaaattagtgccatttggcttcagcttatatggtgtgtgcagaagtattggaagcaggtaatggcccagggtatattttattgctcattttaaatagaaagatgagatgagccaacaggtaattcaatagctgcaaatgaaaagagatgggttgtcgactgtgtgttctcattattcttcccgataatgcagaggaatgggattttcgcttgactctgttccaaagcctgcattctgttataagctgggagattaatgccctggcttaggagagccatcttctccttctcgaatatgggaaatgatcccttcccgcgcctgcctcggagacacacgatggtggaggtgtctggccatctgctgtctcctaagccagtcgggctacaccttgaacctggagccagattcctgacgaattacctgctgcagcctcgagctggggaagtgagcaggaagctgggattctgcctgcctttgcatttaattagtttccagtctcctattgctaaccaattcaattagatccctttaagaaatcaattaaatcatcaattaaaacaactgaaataatcacacacacacacacagagaagctagtgaaatgtgtgttaaaaccaggccatccgggcagaagtgacctattttgggaaagggaattcagtgccagcagaaaaaacaagcggtggcagtcagtgccctggggggaaactgacgacactgtataaaactgtcatgcaatgtgaatcatggagtccaccgtcagtatgagaagtgagacttggcactttcttgggaaggagaccccatgttctgaactcctcttgctccaggcttttcgggccagagcaggcatcactctagtgattccaacaaggggaaaggggtgcgctgatttcacacgcttcacagcccaggagtgaagctgcaggatccagcgtgggcaggtccctgggagcctcagtttgcatctgagttccagccttcccaaagcccagccttaagtagctaaatgctgttcattccgtgtggtcttgggaggtgtgcctcacgggagagaagagaggtttcatgtctatttctctatgtttcagggctgagccggttctatcccgcatccaggaaaaccggaagcgtgtgatcctcccctccattgacaacatcaaacaggacaactttgaggtgcagcggtacgagaactcggcccacgggtacagctgggagctgtggtgcatgtacatcagccccccaaaagactggtgggacgccggagacccttctctccccatcaggtctgtggctggtgagcctggc

SEQ ID NO: 38352 - DNA, 2300 bp, Homo sapien
actccgtctcaaaaataaaaaataaaaaagaagctctccttgttggccctagcatatttcaaacattgcagtagaccgtggactactttagggcagggactatgttatttatcttttgctcattaaatttagcacagtgccaggcacttaccaggccttcaataaatatttattaaattactgaatgatagatttgattgcagaaacattagaacaaagtttaaaagcctggcagcctcaaatcatgacgtaaagcaaatattctgttaaaacattcatgtccttaatatgtaaagagctcttggccaggcacagtggttcacacctataatcccagcagtttgggaggctgaggtgggaggattgcttgaggccaggagatggaggctgcagtgagctatgattgcacccctgcactccagcctggagtacagagcaagaccctgtcactcaaagaaaaagaaagaatttaaaaatctgctcgagttgtctgagcctaaacacaatttgggtacataaagaacaaaatgccagccaggcgcagtggttcacacctataatcccagcactttgggaggccaaggcaggtggatcacctgaagtcaggagttcgagatcagcctggccaacgtggtgaaacgccatctctgctaaaaatacaaaaaattaactgggcgtggtagcgggcgactgtaatcccagctactcgggaggctgaagcaggagtatcgcttgaacccaggaggtggaggttgcagtgagtcgagatcgcgccattgcatttcagcctgggcaacaagagcgaaactctgtcccaaaaaaagaaaagaaaagaaaaagaacaaaatgccttttcctctctttgtttccatggagaatataacctggaggggaatgaatatagatggaaaggaccagcaacatgacctttttcccactcattgagaccctagggtggtggtgggatggatacccatatagatcacagtgcacccagagatccaaattagatcagttctcacatgctcccaaagacccatgcctagtttcacgggtgttgctttggggacttttgtctatttcctccgtgggtgcattccaaacaccaaacacctacaatggtgcttagtacagcataggtatcagtaaatgtttttgaatatataaatagatactgctagagcattttatgatagtaagcttttaggttttttttttcttttttttttagaaataggtcttgctctgtcgcccaggctggagtgaagtggtgcaatcatagctcactgcagcctggaactcctgggctcaagcgatcctcccgtctcagcctcctgaatagctgggactacaagtgtttgctaccatggctggttaatttgttttaatgtttttttaggatggggcctcgctatgttgcccatattggtcttgaactcctgggatcaagcgatcctcctgcctcccaaagtgctgggattacaggcgtgagccaccgcatccagcctaatttgcttttaggctcttcatgcctttatgcaaataatgacctgagaagctaacctctgattacccagtttattaaaaccaatgtcggtgctgaggcccacttacaagcctaaccatctggataactggattttacaagccacttagaagacttagaagccactgagaagcttagaagccacttagaagcttcaaagctgtttagaagtctaagatcggggtaaccagtgctcctgtatgcagaagttccctgagattgcctttcatgttaggaatggaggtgctgtgagggtgggggggcaagctgcccaggacacagtcagagacctagcatccatgccatccaccttaagacttgatctttcttgttaaggtgatcaccgcaaagatttgagccctggtcctcacttagaggctcgtgttgtcttcccatcatgaagttggaaccaagccatggtagaacagtgactcggcatccacacctccactagctgagctctcatgggtcgtgttttgtctattcttgcagcttcgcaacaacaaggcaaaagacgtctgcttggaccaggggccgctggagaaccacacagcaatattgtatccgtgccatggctggggaccacaggtaggagctcgtctctgaccaggaaggaagtaatatcaccatctccgacccacagaggccttgcaggccttctggataaactttgttgctgtctaccttggtagttatttattctgagaaaaatttttaagaagaaggtaggagtctttctggttatttctgtaaa

SEQ ID NO: 38353 - DNA, 2300 bp, Homo sapien
gtcctgggttcaagtgatcccctcacctcagcttcctgagtcgtgtgccaccacgcccaactcattttatgtattttttgtagaggcgggggtcttgttatgttacccaggctggtctcaatctcctggcctcaagcaatcctcccgcctcagccatcacagccacctgcattagattctgtagctcatattgctttccatgtgcatccccatttccctacagagaaccttcagggagaggagaaggtctaggcttcccagccaatctcctactccccacaggcacttttcaccaatcgtagatggtgatggtgctccataaataacttggatttaaatggatcgcatttgacttttttttttttttttttgagatggagtctcgctctgtcgcccaggctctagtgcggtggcacgatctcagctcactgaaactccacctcccaggttcaagtgattctcctgcctcagcctctccagtagctgggattacaggcacccgccactatgcctggctaattttttttttttttgagacagagtctcactctgtcgcacaggctggagtgcagtgttgcgatcttggctcactgcaagctccacctcctgggttcatgctattctcctgcctcagcctcccgagtagctgggactacaggcgcccaccaccacgcccagctaattttttgtatttttagtagagacggtttcaccgtgttagccaggatggtctcgatctcctgacctcatgatctgcccacctcagcctcccatagcactgggattacaggcgtgagccaccgcacctggccaacagagacggggttttgccatgttgtccaggctggtctcgaactcctgacctcaggtgataatttgactttaaaatgcttggctgtgcttggcccagggcggaagctcacacctgtaatcccagcactttgggaggccgaggtggtggatcacttgatgtcaggagtttgagaccagtctggccaacatggtgaaaccccgtctctactgaaaatacaaaaattagctggggcagggtggtgcaagcctgtaatctcagctactcaggaggctgaggcaggagaatcgcttgaacccagaaggcggaggttgcactgagctgagattgtggcactgcattccagtttgggtgacagagaaagactcagtctaaaaaaataaacagataaataaataaataaatagtataaaatgcttggctgtgctggaaagcctgggttctaggttgctttgctcacaggcacttgcccctctgtgcctcagtttcctcatgctgcctgcctacttcccagagttgctgcaaggtcaaagggctgaggatttgaacagtaacctgtctggcattgctcacccaccttaggaggaagggtgagtatccatctggacattgagaactaccggcagtgatgtggcagagggtacacagctgacctcgggggaatgcaaaaccactacacacagagaaaaacctgtgagccttggccgggcacggtggctcacgcctgtaatcccagcactttgggaggccgaggcgggcggatcacaaggtcaggagatgaagaccatcctggctgacacggtgaaaccccgtctctactaaaaatacaaaaaaattagctgggcgcagtggcgggcgcatgtagtcccagctactctggaggctgaggcaggagaatcacatgagcctgggaggcggaggttgcagtgagccgagatcataccactgcactccagcctggaggacagagtgagacgccatctcaaaaaaaaaaaaaaaatctgcatgctgcaacaaccacttatgaattttttccctagcttctttacagaaataaccagaaagactcctaccttcttcttaaaaatttttctcagaataaataactaccaaggtagacagcaacaaagtttatccagaaggcctgcaaggcctctgtgggtcggagatggtgatattacttccttcctggtcagagacgagctcctacctgtggtccccagccatggcacggatacaatattgctgtgtggttctccagcggcccctggtccaagcagacgtcttttgccttgttgttgcgaagctgcaagaatagacaaaacacgacccatgagagctcagctagtggaggtgtggatgccgagtcactgttctaccatggcttggttccaacttcatgatgggaagacaacacgagcctctaagtgaggaccagggctcaaatctttgcggtgatcaccttaacaagaaagatcaagtcttaagg

SEQ ID NO: 38354 - DNA, 2300 bp, Homo sapien
catttttgttctgtccatgagactgtgaattcctacgggatagcaaccatgccctgttggtggttttatctccatactacttagcacacgtgagccctagatcaatatttgttgaatacaaggatgagtgcacattgtcctaagaaacgggtaaaacaaccaatgcatggaggaaaatcctcacttatgaagaaaaatatgtggcaaatggagacgttcaacaaaataagccatgattctatagaagcattaaagcaaggagaggggtggaataaaatctagtgacagccatgagacttaaggaatggaaaatacaggatataacatggtaaagaaaaaaaaaaaaaagaccaaatagaggatgaagaatcagaagaccaggcgaggcacagtgatgaatgcctggaatcccagcactttgggaagccaaagcaggactgcttgaggccaggcatttgggaccagactgggtaccatagcaagaccctgtttctacacccctgtgcccctctaaaaagaattagctgggtttagtggtacaggcctgtcataacagctacttgggaagctgaggtgggaggatcacttgagcccaggagttcaaggctgagctatgattgtgctactgtaccctagcctgggcagcaaagtgagatcctgtctcttaaaaaacaaaaaaaaatcttaaaagttaaattggcccggcgcagtggctcacgcctgtaatcccaacactttgggaggccgtggcgggtggatcacaaggtcaggagatcgagaccatcctggtcaacatggtgaaaccccatctctactaaaaatacaaaaattagctgggcatggtagtgcgtgcctatagtcccagctactcgggaggccgaggcaggagaatctcttgaatccaggaggcaaaggttgcagtgagccatcatgccactgcactccagcctggtgacagagcgagactccatctcaaaaaaaaaaaaaaaaaaaaaaccaacaaaaaaaaactagttaaattaaattacataaatgacacagagtaaaaaggaagtggccacctgctatctcagtctcccttttaaaggtaattacgatccaccctaaaaaaaaaaaaaaaaaaaaaaaaaatcagaagacttaagtcaattgagcccaggctgagtgaagagtagaaaagaaatacgtatatagaagtggttgagaggaacagcaaggtaaggaatgtgtccctttcatgctgtacaaatattagcatcaattgttaaaaacattgggaaaactaagctattgtgttctgagatgtaaaagtgttctgagatggaaaagtgaaactaagggggttattatgatttttttcttagaagcccaaaatactcagaatatccttgcaccagttttagttcccaggggaagccctatgcaatttggagacctccttcttcttccaggaaacaatcagacaggattccaaggttaggcccggggccctctgttcattaaacagatgacaaatgcagactgcgtttaagccatagtcactggggcacatatatggtgtatgggaatgtggtacaggactctgttttagctttttcatttctttgagacagcgtcttactctgtcacccaggctgcagtacagtggcttgttcacagctcactgtagcctcaaactcctgggctcaggcaatcctcccacctcagcctttcgagtagttgggactatgggtgcacatcaccatgcccaggtaattttaaaaaaaattttcatagggacgaggtctcactatgttgtctaggctggtctcaaactcctggcttcaaggaagggatcctcctgccttgctctcccaatgtgctgggattacaggaatgagccactgtgccctgccaagacttttgttttcataaccagctcacaaacacggcacttgcctaagcccctggccttttgttttggtaactgatcacaaaggtaacatggctgagcttataatcctccagtaaccagatcactaatatggcacttggataagtcacacttccttctgtttgtcttaccaaatcatacataaggcatgcagttaggaattacaaccctctgttttagtaaccacagggaaacatggcggcacggggtaagtggtagaaatatctattatatttaggaaccatatcacgaacttagcctgtgtttaaaccgtagcctctcccttttaataaacagatcacaaatatggcaagtggcattgcctctcagatcacaaatcgagcacacggctaagctgtgcaatgtg

SEQ ID NO: 38355 - DNA, 2300 bp, Homo sapien
ataaacccggcacagaaagacaaacatcacatgttttcacttatttatgggatctaaaaatcaaaacaattgaactcatggacatagagaatctaccagtggttaccagaggttgggaagggtgaggggggctgggtggggggtgaggaggttgggtaggtagggatggttaataggttaaaaaaaaaaaaacaagttagaatgaataagacctattatttgatagcacaacacagtgactatagtcaataactcatattttacaataacttagagtgtaattggactgtttgtaactcaaaggatgaatgtttgagggaatgctacccggttctccatgatgagcttatttcacattgcatgcctgtaacaaaacatctcatgtaccccataaatatgtacacctaccatgtacctataaaaataacaaaaacatatttaaaaaagattactagggaagtagggtctatacaagatagtaataatacaggttaggaaatgctaaatgctaaaggcgtggcacccacaatgagtgcctcagggactctgaaaccacacccaggtgagacacacacacacacacacacacacacacacacacacacacacacacacacacacacactgtgctgctggctgacaaaaacgcccaaacttccctggcagttgaaccaaacagtggagaggtgattgctgagttgtttgcatgagaggcttagagcagcattgcctgcttttgttctgattggtgtgaaatttttcacatgtatcttttctctggttctgggaattgaagacatctgagctggtgagcagtctttgccaccaagaggggacaagaaactggggacccgggagaggagggtgctgtaaggaaggactagcctgctttggccaggtttgttgctctttctttattggcacaaccttgggggcagcagaaaggaactggcaagcgtctaatctgtctacgggacagtctgagacccaccttgctgctttctttctttttcttgccaagacaaaccttggttgcactgtgtattccgtcagttcttgggaggcagacaggtggggactgggaaaggtgactgctgactccaagcacatgcgttgcccttgagacctggggcaggggtctgtctgggcgtagactcagtagaggtcagcgcatgggcaggttgcagacagtctgcgaatttgtagctcacacctctgcccaagcgccctctccttcccatcggatccattctatgaccttggaagaagtgggggccacaccacatgttctcaggccctggaggagtgggatcgctggtgggtgggcgatgccctgcggcagccgtgcctccctggacgtctccaggggcggtcacgcggaatgctggtccccgcagtttcggccattggcccctccacttcggcgccccgccttccccctgggctcaggtgtaatcgtggatctagggtgtgggcacctgggatgaagtagtgaaggcggcgggcgctagggtgagttgtcctgtgctgaggagcagcagtttgccggagttaacgtgggcagcctctttgggaagggaaggaaggagcaccgtctgccaagcgcctgctcgccccccgcgtgtctgcctgtgtgtgccgtgcatgtgcatgcgtgtgtgtgtgtgtgtgtgcgcgcgagtgtgagtgcgcgcgcgccgaggcgttcctcaggttgcgctgcttggaaaccgagggagccattggagaggcggaggttggggggtgggggctccccgaccctcggaggagctggggcgcaggcggccaaggcgagcccagaagcccggctcctgaacgcgggcgccggcagagcgaggagtgtggtgctgtcggcggcaaggccctgggggatccgctggggaggagctggggaggaggccggagctgcatggagtttctagggcgcgcaactccagcggggcctcggccactgggctccggggcgcagcgaggcagccgcgcacatgggctgaacccgcgcggccagcgggagcgggaggggtagaggagcgcgcggtgcagggggtgcggggcacacgtccccagacgagagcagaggacaaggacagggaggcacgcgcccagatcgcgctccgagtcgacgagggggctcgtgcaggtcccggcgcgcgcgtggggagcggcccgggggcgccgagggagccggcggcagcgaggatgccggcacggggacgcggctgcctgctgggggtgtgagcgagaggctgagcgctgcccgctcggcgcatccattccgc

SEQ ID NO: 38356 - DNA, 2300 bp, Homo sapien
cctgcaagagaagctgtgtgaccctgggaagccactcagcctctctgtctcgctctacccaattgtgaactaggggttgatcaggtcagtttcttttgtaggtcactcttcatgttggtagataattttaagccctggttaaggacactgctctgtagtaggtgcacagaacgaaggattcggccccaggactcaaggaggcccatgggcctctggctccagcatgggtctcttgagcttcccgccaaactctaggatcctggatcttcccacggtctgcctccaatgagtgaatccgtctcatacctcactgctcctgcttggcgagggtgatgggaagatacggtattagtgggtaattaagttattagctgccaaagcttaattgctctcaggagtattttaattgtagcaggggactcaaaaacagaaagccttggagacagcagacatcatggaaacagaaggaagggggagtatatgtgagggtgcatgtatgggagtgcggtgtgtacgtgtgtatgtatgtaagagtgtgtgtgtgcatgtgtatacgagtgtgtgtgatgtgtgtgcatgtttgtgtatgtgccatgcatgtgaatgcataagtgggaatgtttgcgagtggtgcgtgtctgtgtagtgtgtttgttatgtgtatgtgtgtgcatatgtgctgtgcgtgtgtgtataagtgtaagtgtatatgtgtatgtgtagtgtgagtgtgaatgtatatgtgtatgagtgtgtgcataactgtgagtttatatgcgtatgtgtagtgagagtgtatatatgtatgtgtgcatgtgttagtgtgtatatgtatgagtgtgtgtgtggtgtgcatgagtgcatgcatgtatgagcttgtgagtgtgcgtgtttatgagtgtatctgatgtgtgagtttgtgtccttatgtgagcatgtgtggtatgagtatgcacgtgtgtccatgtgtggtatgtgagtctatgtgagtgtacgtgtgtgtaagaatgtgcatgtgtggtgtgcatgtatgagtatgttcgtgggtgtgtgtggatgagtgtatgtaaatgtatgtgtggatgtgagtgtatgttagtgtgtgtatgtatacgtgtgtgtgtacatgtggtgtgtgtgtgcatgtgtgtgtgaatgtatatgtgtgtatgtgtggtgtgtgtgagtgtatatgtgtgtatgagtgtgtgtgtgtgagtgggtgggcacaagtgtcagtgtgtacatatgagtgtatgtgtaagcatgtaagtgagcatacgtgtaagagtgtatgtgtgcatatgtgtctaacagaacctgcctctgtgatctctgccagggcgtccatcagtgcaaaccccccgggtgagcccaggtctgaaggtggccaccagccactggcctactccaggtgggcttagcgtgagccagcacagccatcagagaaccttctcggagctagaccagctgccccaggagaaagagggtaaccctaaatattatcctaccaggaaagccaggcctggggctgtggcctccatggtctgggtgcttccttttggaggtgggagatggattctccagggagagctgggccaccagatatttctctgtcctgtggcttgactgcttctagaaacttcctgggctgaaagcaagggactttgacaagggcttgatttggaatgtggggcatttttattgttccagtttgtttttcccaaagcaggttccatgggggaagggtgaggggacaagggctggggctgctcctccagcagtggcccctgggtgtgagaggtgaagccagctgggcttctgggtcagtggggacttggagaacttttctgtctagctagaggattgtaaatgcaccaatcggtgctctgtgtctagctagaggattgtaaatgcaccagtcagcattctgtaaaaatggaccaatcagcactctgtaaaatggaccaatcagcactctgtaaaatggaccaatcagcactctgtaaaatggaccaatcagcaggacatgggcagggctgaataagagaataaaagctggctccccgagcccgctggggaagctcgctggggtgctatccgcttgagtttgtgtttttttctttcctgcttcttaataaagcttactgcttactctgggtccgcgccacctttaaagctcacggccgcggtctgcgtcttcgttcttgaagtcagcaagaccgcaagcccaccgggaggagcagacgactccggacgcgccatctttaagagctgtaacactcaccgcgaggtccgtg

SEQ ID NO: 38357 - DNA, 2300 bp, Homo sapien
tactggcttagttcaaccctgtctaattttcaaattataaacccaggctcaaaaggggaagggggtcaaatgcatgctcttagtagagctgagatgggatctggggttcactctgacactacagcccacctccctcctggacacccctgacactcactccaaggcacgtaccctggagatctctggcttctgagcaccaattggctggatttatttcacgtgcttatgaggggaaaatggcattaaaaagatcatgcggccgggtgcggtggctcacgcctgtaatcccagcactttgggaggccgaggggggaagatcatgaggtcaggagtttgagaccagcctggccaacatggtgaaaccctgtctctactaaaaatacaaaaaattatccgggcatggtggtgcacatctgtagtcccagctactcgggaggccgaggcaggagaactgcttgaactcaggagacggaggttgcagtgagccgagaccacgccacagcactccagcctgggcaacagagtgagactccgtcaaaaaaaaaaaagatcacgcaaggtgccaccatattgactaaagaaagatctcggaaaaaccgactccatagtgtgggatgccaagtgcaatgagctattgtgaggatgaggtgtggcggtcttagccaagacaggctcacaaagggaccagcagctgctcaagcaggggcaagcaaaaagaggcagcgtgggaagggggtctctgaggctgaccctctatccctgacacaggaactgtccttgacacagattcgtgctctatcaaaggcagccggagatgccaggaactcccaacacgggtttgctcttcccctcatccctgtggctacgtttctctgttccactcctggccatgctgtgtgtcacaactacttctcttggtgatctgcctgtaatatgcaggcagtgtgtctagctggctgcaggcacatggctggaaaagtgggcaagtaggtgtgtgtgcatgggaagatgtgtgtgcatgaacaggcatctatgggtgtacgggcagacatgtgtgtacctgggtaggtgtgtgtgtgtggtatgtcaggcatgtgtgtgagtgtgcatgagcaggcatgtgtgaacctgagcgggcatgtgtgtacctgggcaggcatgtgtgtgtgtgtgtgtgtgtgtgcatgggcaggcatgtgtatacctaggcaggcgtctgtgtgtgtacatgggcaagcgtgtgtgtatgtgtgtacatgggcaggcacgtgtgtgtggtatgggcaggcatgtgtgtgtgcatgggcaggaatgtgtgtgtacacgggtgggtatgtgtgtacataggaatgtgtatgcatatacacgagcaggcatgtgtgtgtacatgggcaggtgtgtgtacatgtatgggtaggcatgtttgtgcgtgggcaggtgtgtgtgcgtgcatgggcaggcacgtatgtataataggcaggcatgggtgtgtgcatggcaggtgtgtgtgtacatgggtaggcgtgtgtgcatgcagcttacataagtggcagtgctctcaggaggggagcacacagtacagaccaggtttcccactttccccaggcagtgtcccgtgcagccccgtgtctgaagagggtgtcaccgatgccccctgcctccacggagccccgctctttccctcggtctggaagacagcgagcaggaccttggtacttcctagggtaggcagtgcgtgggtccacagccctgtggttccgattcaaaccatgcagcccgagagactccggtgtttctgggggcacttttccaccttctcagccccgttttcttgctggagtgagagggctgcaggaagctttcccagcagcaggagcagcagccagagcagacacggcagcagccacggcagcagcactggcacccttcaaattgggactctagccctttaaatctgctcagttaccaaaaaagaagaggcatcagaccctgttaattaaagctcgccccggtccatcattctgaggagctgcagtgccctgctccttcctgatggcttagagattctccttaactcccagccatggatcttggagaatttcccccgagatcagcaggaggtatgacccttgccgatgacactctgaagcttgtgtgtctctcagtcaatgatataactgactgcatggatgctgcctgccttcccccttctgcttttcctcttcccctcttcctcctctccaatttcccagcttgtgtttagttgagacagaatcaagttttgatgggtttccgaggaa

SEQ ID NO: 38358 - DNA, 2300 bp, Homo sapien
gacagagcaaggctccatctcgtggggggggcgggggaatcaactgtaataaaaataacacactatgtagtaacgtaataaaattatcatactgttaacactaactcaaagaaaaaacagaatataaaactgtatcttcacttcgaaatgagcatttagaagcaagagaaggaacataaagtaaaaatacttcatgtgaaattaagttaattgttttgttgtgcttgctccataaaaaaagcttaagtagtaaaagtattctttttactaactgtactttcaaaggctcacggttaaacttgtaaaagattctcaagtaactgaccttacgtctcatttttttttttaagagagatatggaaggacctggcttcaaacgttcaacctggcagcaatttcaaaagtcgaagcctgaaatttaggctttacaggtgcaaaagtcctaatacacgtgggtaaagtgggaggggtagttttctgtctaaccccctagcctcaaaaggcaaaagccaggtcaaaagtagggatcggtcctccttgctctcagcggcggctagccggtgctgtcaagtgcaacagtctccgaaggaaggggaccgaggacgccactccgcccggagagggtctcagtaaaacgtttacctcccctgccgccccagggtccttgcccgccgagtgcccttacccatcctcctcagagccgacaggagactaggatctcggacctggagagcccaaaggttcgcactggtactgcgagacgcaccgagctacctcgcggcgttagcgccgtaccgagtggctgcagaactgtgggcagctacgacgctgccaggcccgtcctgattggttcagaggacgaagaggtgggcccagaggaaagcccggagctccgggaaaggaagccagtgcccggtgcgctctcggccctgctccgattggctcagaggggaaagggggcgtgtccagaaataagcaccgcccggagttccgggcgatgagggcggagcgcttccgcctccgtttggattggctcagactgggaaaaggcgggtccagagagaaatgattggcatgggaaaattaaaagaggaaaggagtggggagcgggggaaatgctatgtgggcctgtttggatcttaattgaaataaaccgactgtagaaaggcattatttttgggaaaccccgagggtaaaccccgaggatgacttaatatcatctaatagatgatattaaggaattgtagttaatctcgtcgcgtgtatctgttaagggctataggctgaagtatttaatgctgaaaccatatgatgctttctttaaaatacccccaaccggccgggcgctgtgactcaaacctgtaatcccagcactttgggaagccgaagcgggaggatcgcttgagcccaggagttcgagaccagcctgagcaacatagtgagacctcgtctgtacaaaaaatttttttaattatttatttaattaaattagcttggcgtggccgctcacacctgtagtcccagctacttgggaagctaacgctggaagatcgctcgaacccaggaggtcgaagctgcagtggggccatgaccctgccactgcactccagcctgggtgacagagtgagactgactttaaaaaaaaaaagtaaataaaaaagcaacaaaaaaaatgaaaaaagaataaaacaaggatggcaaaatgttgatagcgcggtgatgggtacatggaaggttcattacacttttttgtctacattttatgttaaaatatttctattataaaagggtgagtaaataaaaatatttatcataaaataattccattataaaaaaatttctattataaagtgggtctggcccttgaattccgcggaacgaggtggtgccaacgctgtgtttcaacccggtcactaaacatccgcgagcatcctgtcagagctctcagctcattggcgaaagtaaaacgccaaggaaaagcacctccctttttgggcgtggaaagatggcggtaaaagccacaatgcgcaggcgtcatcgctcacttctcccctcccggcttctgctccacctgacgcctgcgcagtaagtaagcctgccagacacgctgtggcggctgcctgaagctagtgagtcgcggcgccgcgcacttgtggttgggtcagtgccgcgcgccgctcggtcgttaccgcgaggcgctggtggccttcaggctggacggcgcgggtcagccctggtttgccggcttctgggtctttgaacagccgcgatgtcgatcttcacccccaccaaccagatcc

SEQ ID NO: 38359 - DNA, 2300 bp, Homo sapien
tgagggaacattttcaaaactcagaactgtatttgccctaccatttgctcactggagaaaaatgtcatgggaggacgtaagaaacacaagggtggggtgcagacagctgctgccacggaatgccagtccctagatggcagcagtgaagacactacgcactttaaactgctagggctactgagatctatgacagtattcggaacactaggttctcagccatcattattctaggaaaaggaccacaattatgagatttcttggctgcagcttttatgacaccaacaaaacaaaaccccaaaccaacaacccaatcggaaccaaccaaataaagaaacccttggcttaggcgccaagctcggacagcgacgtctcatgctcacagcaggaatgttccatttcctcccgggccaacaaacaccccagcctggcccattcactcgacttgggcagagacaggccgcctcggaggtgacggctcaggcccaggcccaggcccgagggagggggctactcacaagccgctccgccagccgacgaccttgtttctgtagcaggcgatttcgaagcgcttcctggcgcgcttcatccgtaccacggccacattggttaggcggatctggttggtgggggtgaagatcgacatcgcggctgttcaaagacccagaagccggcaaaccagggctgacccgcgccgtccagcctgaaggccaccagcgcctcgcggtaacgaccgagcggcgcgcggcactgacccaaccacaagtgcgcggcgccgcgactcactagcttcaggcagccgccacagcgtgtctggcaggcttacttactgcgcaggcgtcaggtggagcagaagccgggaggggagaagtgagcgatgacgcctgcgcattgtggcttttaccgccatctttccacgcccaaaaagggaggtgcttttccttggcgttttactttcgccaatgagctgagagctctgacaggatgctcgcggatgtttagtgaccgggttgaaacacagcgttggcaccacctcgttccgcggaattcaagggccagacccactttataatagaaatttttttataatggaattattttatgataaatatttttatttactcacccttttataatagaaatattttaacataaaatgtagacaaaaaagtgtaatgaaccttccatgtacccatcaccgcgctatcaacattttgccatccttgttttattcttttttcattttttttgttgcttttttatttactttttttttttaaagtcagtctcactctgtcacccaggctggagtgcagtggcagggtcatggccccactgcagcttcgacctcctgggttcgagcgatcttccagcgttagcttcccaagtagctgggactacaggtgtgagcggccacgccaagctaatttaattaaataaataattaaaaaaattttttgtacagacgaggtctcactatgttgctcaggctggtctcgaactcctgggctcaagcgatcctcccgcttcggcttcccaaagtgctgggattacaggtttgagtcacagcgcccggccggttgggggtattttaaagaaagcatcatatggtttcagcattaaatacttcagcctatagcccttaacagatacacgcgacgagattaactacaattccttaatatcatctattagatgatattaagtcatcctcggggtttaccctcggggtttcccaaaaataatgcctttctacagtcggtttatttcaattaagatccaaacaggcccacatagcatttcccccgctccccactcctttcctcttttaattttcccatgccaatcatttctctctggacccgccttttcccagtctgagccaatccaaacggaggcggaagcgctccgccctcatcgcccggaactccgggcggtgcttatttctggacacgccccctttcccctctgagccaatcggagcagggccgagagcgcaccgggcactggcttcctttcccggagctccgggctttcctctgggcccacctcttcgtcctctgaaccaatcaggacgggcctggcagcgtcgtagctgcccacagttctgcagccactcggtacggcgctaacgccgcgaggtagctcggtgcgtctcgcagtaccagtgcgaacctttgggctctccaggtccgagatcctagtctcctgtcggctctgaggaggatgggtaagggcactcggcgggcaaggaccctggggcggcaggggaggtaaacgttttactgagaccctctccgggc

SEQ ID NO: 38360 - DNA, 2300 bp, Homo sapien
tgtaaaccaaaaataaaattctaagcccccacaactgactcagtggactcccctgttggccaacaggatccaaaataaacatggaaaactaatttaggtcatgatgggaaggagggggttggacatgccttgtcataattctcctcccgtcagagtttaggcacagctgaccaacattatgatctctattagaatagagatcataggactgacaaaacaggctctttttatcagtaagatacccatctccaaccagactctgacatagcatcacatgacagatagcagtccctgaagtaaatcacagtattttaccccataacatattttctttgacaaattttaaaatagtcctgcaaagccatctctttgggggaaatttgcattctgtagagaatctctttcccttacagaaaagactccaggtcttttctggagagtctgacaccttttaagatccaataagagatatttatcatctattctctctgaagcctgttctgaggcttcacctacataacaagaaccttggtttccacaatcccccttatcttaactcaaacttttctttcttttttttccctccctctttcttttccttccttccttcctctctctctttttctctctctctctttcttctctgttgcccaagctggaatgcagtggtgccatcatggctcactgtagcctcaacttcccaggctcaagcgatcctcccacctcagccttctgagtagctgagtctacaggcatgcaccaccacacctggttaattatttttttttgtagaagtggggggtctcactgtgttgcccaggctgtccttgaactcctggcctcaagggatcctcccagctcaccctcccaaaatgctgggattataggcatgagccaccgcaatagcccatttctttatgtagtcttccagctgttcagccaacacttaactctgaaccaactgccaatctttcaatctactagtgacctgaaagcctttcctggctgacccaacatatacttcccgtgtattgatttatgtctttgcctgtaactactgtctccctaagatgcataaaaccaagctgtaacccaatcactttgggctcacgttctgaggaccccctgaggctgtgtcaccagccatggtcactcaaataggaggcccagaataaaactctttacagactttgactctttttggtcaacataacctaaccctaaacataatcctcctggggaaggtaagatcacaggtatctcttcttcgttcagtttgtgtgtgtatgtccttatttctctacagtttttaggcattcgctgtgtgatctagaaaagctatggagtctcgctttgtcgccaggatggaatgcagtggtgtgatctcggctcactgcaacctccacctcccaggttcaagtgattctcctgccttagcctcccgagtagctgggattacaggcacacgccaccacgcccagctaatttttgtatttttagtagagacagggtttcatcatgttggccaggatgatctctatctcttgacctcgcgatctgcccgcctcggcctcccaaagtgctgggattacaggcttgagccaccacacccagctacaaattctattttctttttgttccttggaaagcatcgctgggcatttatcctgtcccagtatttgagtgaaacttctcagcatttcagagcagtgaccatgatacaccctttcctttccttctccttatgggaaacttggttctaacccagaggacttgggctccaggacccagtaacgcagccctggacttgaccctaaaagggagtaaagacaaaggtgaagttcagtctggggttcagggctgccaaagctcatagcctggagcttcttaacctttaggcggggtagagacatttaagacggcccctaaacttggggagcgcgtaggctcataggaaatagagtccgttacttgtcctgggaacggcggtgggtgtcccaggaggcggacttccggtgcactcctgcgcgtgtgcacctctccctgcgtgcgtgttcgcgcgtgcgtgctcgcacatgcgcgccacctccgcactgccctcgcttcctgcgcctcttcaggtcaccgcttgctctagttcccaggctttggcctctagtggatgagaatcaccgagtctgcggggctggacgctgaccgcccgggccagcacctaggcgggcgggagctgtgcggcccagggttcgcgcgggccgggtagaggctcgagccgggacccccgagcgtgaaccccggagcca

SEQ ID NO: 38361 - DNA, 2300 bp, Homo sapien
ttttttaaatcagctttttctgtcaagctttttcaagtatcttcatggatacaagatttttcttctttgctgtgttatagtggcttatcatattaatagatttccaagtattaaactagtctatattattggaataagtcctatttgtctgttgtatattatgtttttaatctggtactggattttgtttggttatgtttcattttgggtatttgtattgatgtaagtggtattgacatgtaattttatgttatttattggtccatcagtcttctaacccctaccacctccttgctttctggactaacttaacccagaaagttattactctctcttggtgattttatcagctcctttggcctgcctgtggataagcttggatgttctgctttagtttctcagcccaccagcctagcggctctgcctctgctatctcttgggatctacatggtcctagctgtatcactgggtttgaaccccttgttgatatgttctttataaataacaggataatgcaacatgcttattgggcacttcctttttctaaactacaagtttgggcggggcatgctggctcaagcctgtaatcccaatactttgggaggccaaggcaggtggattgctggagcccaggagctttgcatttttcttttttttttttttgagacaaggtctcgctctgttgcctaggctggagtgcagtgttgcattcacagctcactgtagccttgacctcccaggctcaagccatcctcctgccttagcttcccaagtagctggaactacaggcatgtgccatgatgcccagccaatttttaaaaaaatttttatttttagcagagataaggttcttactatgttgcccaacctggtctcgaactcctgagctcaaacgatcttcccatctcggcctcccaaagtgctaggattataggcatgagccaccatgcccagccccaacctcttaaaaattgaagctgcttcatgtttgccattggtacttttacacctcatcatattcttcctccccttcatcccatagaatacacaattcatctttaaggacttcaagttaactgagtctgtgaagcctaatctgatggcataaagttaaactaatttgatcctcttttgttaaatcattctgcaccttgtctgcattactctaataacagctttgggcattcattcatttaacgaatatttattgctgtgagattgagatgtttgagataaaatcagtcatgcagatagccagaggccactggctatgagaataaaagagccaaaagaacaaggagctgaaactaggtgagagccccagagcagtgagttaggaagaagaagaccaggaactgagtggtgggcactccaacatgaggaggtcccggagaaggggagcgcctggcagcaaagaagactaaaagaagtgacaaggagtaaaatgcttgtgtttgtttacatgtttatctccttattaggttgtctgctttctgagagcaggcatggtgtttcactcatctcatatccccaaaacacagttcagttgcaaaataggagctcagttgtgttttgggtttttatttttgtatatatataaaggaccccaaaggatatgtgtttccaatatgatttcccttccataatctgtaacataaaataaggtatacaatgttcatggttaacttcaccagtgagctttgtaaaatgttatccccctatcccttttccatatctcccaattctgatcatgttgccattacaggggccagtgtcattcaaagatgtggctgtggatttcacccaggaggagtggtggcaactggaccctgatgagaagataacatacggggatgtgatgttggagaactacagccatctagtttccctgggtgaggatagcttgctttctgaatgctctcagttgaatggggttttatgcttgagtttgaagaaataagtgacaacaccatttaattccttgtgggcactagctgcagtgtttatattattcttcattgaaaggttctaactttgataaggtaaaaaatggagcatttctgttatgcagcttatgaggtggcaacatcttgtacttcggagatctgaagccgagcaacttgcccaagtccttcttcttttcccattaacaagatatgatatcaccaagccaaacgtcatcattaagttggagcagggagaggagctgtggataacgggaggtgaatttccatgtcaacatagtccaggtaagttagtagagtatcaaatgttaaaaaatgctcatcccagacctttgg

SEQ ID NO: 38362 - DNA, 2300 bp, Homo sapien
gtcactgcctccatttcttcaccttccagtcactgttcaacccagggcagcctggcttttgtcccactagtctactgatactgagatttttttcttaagcaacacagctcccccccaaccccccccccctttttttttcaagttaagtcttatgtgaaatcgcagtatattaaatagaagcagaattgctttgggactgggttggggaggatctggaacccaaactgcactttcttctcatctctctgtgttgccccagaggcatctatacctttccaacttttctatccccctaaacaccctaatctccagcgatactgaacaattccatctctggacttctgcacagtgctccttcatctgccttgaacctgccagacctctcagctccaggagcacttccctgtctaccttcccctttatcataacttttttttttgagacggagtcttgctctgtcgacagcccaggctggagtgtgcagtggcacgatctcggctcactgcaacctccacctcccaggttcaagcaattctcctgcctcagcctcccgagtagctgggactacaggcaggcgccaccacgcccggctaattttttttttttttttttttttttttttgagacggagtctcgctctgtcgcccaggctggagtgcagtggcgggatctcggctcactgcaagctccgcctcccgggttcacgccattctcctgcctcagcctcccaagtagctgggactacaggcgcccgccactacgcccggctaattttttgtatttttagtagagacggagtttcaccatattggtcaggctggtctcaaactcctgacctcagatgatccgcccacctcggccttccaaagtgctggaattcaggcacgagccaccgcgcctggccttcttatttttttttcctgttatcacactgataacactgaattgcaatttttttttctttttttgagacggagtctcggtctgtcgcccaggttggagtgcagtggcgcaatctcggctcactgcaacctccgcctcccgagttcacgccattctcctgcctcagcctcccaagttgctgggactacaggcggcacgcccggctaagtttttttttttttggtatttttattagagacggggtttcaccatgttagccaggatggtctcgatctcctgaccttgtgatccgcccaccccggcctcccaaagtgctgggattacaggcgtgagccaccgcgcccggcctgaattgcaatcttctacttacacatcttcctaactaaacagtttctaaagatcagagatcctatattttcccccttaatctctttaatgtacataaacaatggaatgaataaatcaatgaatgaatggctgaggaaactgaactacaccaaagtgtattggcagactaccagactttttaaacagctttattaagatataattcacataccatgcaaatcatagggtggtgcaatcaccaccacaatctaattttaaactatctttatggtgctacaaaaaagcctataaccatgaccagtcactttctattccccacccccaaacccactccctagccctaggcaaccactaatctaccttctcagaccgttaactttagcataggtataagtcgatcacagagccacaaaatccacccgatatctgggccatgatgtgaaatttggtaggtaatcgtcccacgttttcaatttgtaacatagaaatggaggggggagggactcacaaccgctagtagcgtttgtgaaaagtacctggtaacaggctgtgctggaggggaattcagcccccataaaagatcacggattaggaattacgtaagcataggtctcgggcccttttatcttggacgcgatccttccacgggatcgcctccggatggatgtggcgctgggagccacgcggaaaacctcaagagtcagaaacaggcgttaaaggcaggcggcattttccaaaccagttgggtctcgggcgctgccgggcggtagcgtctcccggagtcgcgcgcgcatgacgtagagggcgcgcgatgacgcgacgcgcggcgcggtgcacgctgggatatttaagtctcctccgcggcgcggagccgcgatgtctccggcggctgcggcggctggagcaggcgagcggcggcggcccatagcgagtgtcagggacggccggggccggggctgcggcgggccggccagggcggtgctcctgggcctgtcgctggttggcctcttactgtacctcgtgccggctgcggctgcactggcctggct

SEQ ID NO: 38363 - DNA, 2300 bp, Homo sapien
cgtaagcggaaagttcagctgctgccttctcggcgaggggaacagctgaccttggtatggtcttgtccatctactcctgccctccccggcttagctctcctaagtattaggaacgctaaggacaagtttcttctgattttttttctaatttatttttgtttttgttttttgagacaacatccctctgtcacccaggctggagtgcagtggctcgattttggctaaccgtaacctctgcctcctgagttcaagcaattctcctgcctcagcctcccaagtagctgggattacaggtgcttgctaccacgcctggttgattttttgtgtttttagtagagatggggtttcaccatgttggccaggccggcctcaaactcctgacctcaagtgatccagctggcttggcctcccaaagtgctgagattaccggtgtgagccaccatgcctagccttcccgttttttctgattggcctgacttcttctttttcactttggtagcctccacctccccagcttggctattcgatcactgccgaggacctagacttagagaagaaggcttcattacagtggttcaaccaggccttggaggacaagagcggtaaggagcacagattgttgcacactggagaggtttcaggtgtctgttttctttggttttattttggtgtttgaaaaaatgggtttctctgggaaaatcccaagtagggttccatgttttcttgtggtctttctcacctgagatatccgtgttggtcttcacgggaactggacagcagggaccactgcaattgagggcaggcattcctccatgagctgtgctgagagcctgctctccgacaggcatgtggaaagaagtcccagacaagccaggactgcttcacctttctttctttcttagatgctgcctcgaactctgtcactgagaccccacctatcactcagccttcatttacctttaccctgcctgctgctgcacctgcctccccacccacctccctcctggccccaagcaccaacccactgttagagagcttgaagaagatgcagactcccccgagcctgccaccctgcccaggtgagctggagtggggccgtggatccagccttctgagcagcatccccggcttgagttggaataagggcgtcgtgcctgtcagtcgctggagattgctctgcaggccgaacgcaccctggctcagcacaccggagcgggcccacgtttaacagcgccagagcccgcatcaggaagtgttagagaaggggtgctgcgacgctcaggatctgaagcctggctcgtagctgccctgagcctcgccttcctcatctgtcagatgagaatgatcttccctgtgcggcacctctgaagtgtgaatgtggtggcgtggtcaggatatccttgcctgtcagaaccactggtccagaacagcactgcttcctttccctccagcacttcgagggctgctggtgttcccggcccaggccttcacggcactgcgcgcgcacacctctttatcagacggtaacctggggttcgtacgcaccctccctgctcaagggcagagacttccccattcatagttgtgtgctcttagcgcctggcaggtgagcttagtaggcaaataaagtatatctagattcatacgtgaacttcagagttcagacaattggactgtcttagtctctacacattaggcccccatttaggccccattttatccccttctgtctgatgatctgtgaggtagaaataacacttccttgatttactgtacaggcctgtagtgtagacttagctgagtttattgactgactcttggatcccaggctctgtggtaggcgtggggaggacactgaaatactgaataccatcatctttgaagtgtttattccaatttcacattttctattcttcttccagaatctgctggagcagcaaccactgaggccctctcacctccaaagacacccagcctcctacccccgctgggtttatcacagtcagggccgccagggctgctccccagcccctcctttgactccaaacccccgaccactttgctggggctgatccctgctccatccatggtaccagccactgacaccaaggcacctccaacccttcaggcagagacggctaccaaaccccaagccacatctgccccgtcccccgcccccaagcaaagcttcctgtttggaacacagaacacctcaccttccagccctgccgcccctgctgcatcttcagcacctcccatgttcaagcccattttcacggctccacccaagagtgagaagg

SEQ ID NO: 38364 - DNA, 2300 bp, Homo sapien
tccgtgttggtcttcacgggaactggacagcagggaccactgcaattgagggcaggcattcctccatgagctgtgctgagagcctgctctccgacaggcatgtggaaagaagtcccagacaagccaggactgcttcacctttctttctttcttagatgctgcctcgaactctgtcactgagaccccacctatcactcagccttcatttacctttaccctgcctgctgctgcacctgcctccccacccacctccctcctggccccaagcaccaacccactgttagagagcttgaagaagatgcagactcccccgagcctgccaccctgcccaggtgagctggagtggggccgtggatccagccttctgagcagcatccccggcttgagttggaataagggcgtcgtgcctgtcagtcgctggagattgctctgcaggccgaacgcaccctggctcagcacaccggagcgggcccacgtttaacagcgccagagcccgcatcaggaagtgttagagaaggggtgctgcgacgctcaggatctgaagcctggctcgtagctgccctgagcctcgccttcctcatctgtcagatgagaatgatcttccctgtgcggcacctctgaagtgtgaatgtggtggcgtggtcaggatatccttgcctgtcagaaccactggtccagaacagcactgcttcctttccctccagcacttcgagggctgctggtgttcccggcccaggccttcacggcactgcgcgcgcacacctctttatcagacggtaacctggggttcgtacgcaccctccctgctcaagggcagagacttccccattcatagttgtgtgctcttagcgcctggcaggtgagcttagtaggcaaataaagtatatctagattcatacgtgaacttcagagttcagacaattggactgtcttagtctctacacattaggcccccatttaggccccattttatccccttctgtctgatgatctgtgaggtagaaataacacttccttgatttactgtacaggcctgtagtgtagacttagctgagtttattgactgactcttggatcccaggctctgtggtaggcgtggggaggacactgaaatactgaataccatcatctttgaagtgtttattccaatttcacattttctattcttcttccagaatctgctggagcagcaaccactgaggccctctcacctccaaagacacccagcctcctacccccgctgggtttatcacagtcagggccgccagggctgctccccagcccctcctttgactccaaacccccgaccactttgctggggctgatccctgctccatccatggtaccagccactgacaccaaggcacctccaacccttcaggcagagacggctaccaaaccccaagccacatctgccccgtcccccgcccccaagcaaagcttcctgtttggaacacagaacacctcaccttccagccctgccgcccctgctgcatcttcagcacctcccatgttcaagcccattttcacggctccacccaagagtgagaaggaaggccccacaccgcctggcccttcagtcacagccacagcgccctccagctcctccctccccacgaccaccagcaccacagccccgaccttccagcctgtctttagcagcatggggccacctgcatctgtgcccttgcctgctcccttcttcaagcagacaactactcccgccactgctcccaccacaactgccccgctcttcactggcctggccagcgccacctctgctgtggctcccatcacctctgccagtccatccacagactctgcttcgaagcctgcgtttggctttggcataaacagtgtgagcagcagcagtgtgagtaccacgaccagcaccgccactgccgcctcacagcctttcctcttcggggcgccccaggcctctgctgccagcttcaccccggccatgggctccatattccagtttggcaaacctcctgccttgcccacaaccaccacagtcaccaccttcagccagtccctgcacactgccgtgccaacggccaccagcagcagcgctgccgactttagtggttttggcagcaccctcgccacctccgccccggccaccagcagccagcccactctgacgttcagtaacacgagcacccccacgttcaacattccctttggctcaagcgccaagtccccgctcccatcatatccgggagccaacccccagcccgcatttggggccgctgaggggcagccaccgggggccgccaagccggcccttgccccca

SEQ ID NO: 38365 - DNA, 2300 bp, Homo sapien
ggcagaaacatgtttggtatgttgaagagcagaacaaagacaagcatggcaggagggcaggagctaaagcagtggtgtggaaggaggccaagaggcaaggattgtttgtggccagggttgggtgtttgggtcttaagtgttcaggaaaaccattgcagaatcaggcagaaggatgcagtgatggttcctcccatgtggaagatgaatgtagatcccatggcttctgtttgcttcgtgaagtagagaaaatctgggagagagagggtcaggataaagtgtataaaaaaaggggtcttttgaaatagtcattttggacagtgggggaaaggaacatcatattaaaaagtgtgatcagtttccaggcagtttgtgggctggaaaattgtgattgtgaagttaaagtgaggccagttagcatggcatgtgtttcccagcgacactgtgggtgtagacctaaggtcagcggacagctggtgccacccggccatggagaccccagcaagcacagcaggaggggcagcgggtcagtgccccgatgcagctcagggggtgcaggagtggagagcgggtgaagtcagctgcaggaggggtggtgcctacaggagattcgggagccggagcagttgtggtgacagtgtggctgcaggagtggtggcaggggtcggggagaggaggtcatgggggtggcagggttgaggggctgagaggaccatcagtcagcctcacagggcgaagtcaccgtgagtggtgatgggaaggaagccagtgagccaagggtcctctgtgaatcagggagtgacctggcagttgacaggtgacatgaggacatggcagattaaagtgatctgaacttgagttacggtatttagggaaggaagagaaacagtgtggaagcagcgtgggagcacagggagcttcctcttgtccgggccggaggccaagccctgagagcagccatccctgcagaggggctgccagagagggcctcgggcaggcagccagagccagtcagggcaaggccggggaagggaggggaccacggggcatcacaaaagacgcgggacggacaaaccaggcttcagaggggaggggacggtggctggggtaaaaggcctgaacagaggaggtagccaacccaggtacgctaggaggcgggggccccagagtactcccctctgcagcgatggtcaggaggcccacgaggtggctgcggggcaggggggctttttctctgccctggcgtggccattagcgggtgggagaagcaggctgagctggggcaccaggcatgaagactcggttgtctggctcagctgctgatggaggagtgccccagaagcagaagtggggctgagggtcccgtgggaagtgccctgcggagcacaggctcctgcccggctcctcgcttgcctctgccctctgctcactggccagctctctgttctcttcattccaggcaccgccacccccacctttggtctgaacacccctgcgcctggagtgggcacatcaggcagcagcctctcctttggggcatcctcagcacccgcccaaggctttgttggtgttgcacctttcggtaagcagcaagccaccctgtggccctgctcatctgtctgaggaggggttgggcggggtggcaggttcctggtcctctgaggccccgtgaagatcaggttcagcacaggaaagacatttcgggttaggagtccagcacaacccagggatgggagttggatggcagagatcagagaggagctgtccggggtggaagtttgcctcccatgggaagccaggtaaaaatggattcttgggcctcgctctgagactctctgggagtttgcatttcaggaggcttctcccgtacagtgtttctgatgcagcggggaaagccctattgaggcaccctgtgttttattactggcctggccttccagagatttgggcacccagagtcagagtctcaggtagcagctgccctgatgaggtcttgttgaatctttccaggatcggcggccctttcattttccattggtgcgggatccaagaccccaggggctcgacagcgactgcaggcccgaaggcagcacacccgcaaaaagtagcctttgtcccctgtccctgttccccccaccccttccctaaatctggaccttggcacctgctaggaagagccttggacccttccagttgcgtaaagcaaacctaccccggatctctggcttcagccgccagggggcagtggcagccctggggccctttcccttctggaggaagcacaagcctcagggaaggggaag

SEQ ID NO: 38366 - DNA, 2300 bp, Homo sapien
atttcttatgtcttccctttctacacagacacagtaacagtctgatctctctttcttttccctacaggattgcaggcatgcagcaccatgcctggctaattttgtatttttagtagagacgggatttctccatgttggccaggctggtctcaaactcctgacctcaggtgatctgcccaccttggcctcccaaaatgctgggattacaggcatgaaccaccgcgcccggccatgctaagtcctttcttggctccattgtgctgtccctcctgcttcctctccaggtccatctgccacagtgctacgtgcaccagcgtgccagcaacagtggctggtctctgccccgtgcctcctccactgggctcacacctgtcttattttgtcctttggtggctctgagaagcagcctctgcccctctccctttcccttactctttgtaagatcctcttccttctgccctaccatgttgcttggacaccagggtggaatagcagagaacggctgcttgtgtttgaattccagctctgccacttcgatagatttctgaactgagacatgtgactccctaggcctatttctgcatgggtcggagagtgggcgggactgctttactgagttatagtgaatgtagttttaacctaagcgcctcacatgactaactcctcatccatcaagaatgagctcagctctcacttccccactcctcacccccctgtaaagtaacctttctccaaggttatgcttcaacaggaatagctaacatttattaaattgtggcacgtaagtatcttggatatattggctcattgaatcctcacacctactattttacagagatgccagtggggcttgagattgaatcacttgcccaggctcccactgctggtaaacagtagagggggctcctgacccataagtctggcttgacaacccattccctcaactgcggatcccggattcccttatcaccctgttgatttctccatagctgtggtaacatttgttgcatgaatggaccgttgaaatagggcctggcagggagaaattcaggaaatgatgaatgaatggttcttccctggcagcctcgatgacttacgagccctcaaggggaagcattttctcctggaccccttgatgccggagctgctggtgtttcccgcccagacagatctgcatgaacacccactgtaccgggccggacacctcattctgcaggacagggtaggcaagaggaatagaaaagggaagaatgtgtaggcacgggaagggcctagcctggggtctctgtttacccggcccctgtgttctgcctgccaggccagctgtctcccagccatgctgctggacccccgccaggctcccatgtcatggatgcctgtgccaccccaggcaataaagaccagtcacttggctgctcttctgaagaaccaagggtgagtgccacaggaggaggaggaggacatggggtttgattttgtgcctttcagtgggtaatgaaggctgaaaggatgactttcgcttaactctttcctgctgcaccaaagtagttcacggtatttgccccaagctaagctttccccactgcaggtgtgagatgtggatcccttagcccttggggcagagaccccaggccagttacctctgaccctgggccctttaaatataggctgtttcaatattgtgtgtcctggcttaacctgcatgttctggttgtctgtgtcagctgtgacaggcccttagctgctccatgcatgctcagctcacccctgctctgccctctgccctaggaagatctttgcctttgacctggatgccaggcggctggcatccatggccacgctgctggcctgggctggcgtctcctgctgtgagctggctgaggaggacttcctggcggtctcccccttagatccgcgctatcgtgaggtccactatgtcctgctggatccttcctgcagtggctcgggtgagatggtgagaaggcgtggctgagggactcagaggtccacagcagcttagacctggagtcatctgttttggtcttagttctgacactttaatgggcttgggaccctggagcaaaagttctcctctgtgaagcgaggatttcaggagcgaggatttcaggactgaggcagcctgtgaagctgtgtaaccgagacacgcttttccttaggtatgccgagcagacagctggaggagcccggggcagggacacctagcccggtgcgtctgcatgccctggcagggttccagcagcgagccctgtgccacgcgctcactttcccttccctgcagc

SEQ ID NO: 38367 - DNA, 2300 bp, Homo sapien
ataagagaggccttcctctgcctctctcttatagggatacttgtgatgccatgcaggacctgcccagataatccaggataaccttctctccaaatccttcccctgatcactcctacagatctcttccatagaaggtgacatttccaggctctaggaattaggacctgctctctctgggtggccgttgttcactccaccaccccaggtttccccatcctaccaaaagacacagcagcattgtgtcaactgcccaaactgaaaacctatgagttattctcgacctgtcctttttcctgagcaagttctgtggatttaacttagcggtcacactgccaacttcaaccgaactccactgccaccaactcagtccaggccaccagttcttgtttaggtgactgccatgacccccattggtctctccctgcctcaactctgtcccctccatcctatatccccacactgtaaccagactgattatttatttatttatttattttttggggaaagaagcttgctctatcccccaggctggagtgcggtggcacaatctcagcttactgcaacctccgcctcccaggttcaaacgattctgcctcagcctcccaagtagctgagattacaggtgtctgccacaatgcctggctaatctttgtatttttagtagagacgggttttgtcatgttggccaggctggtctcaaactcctgacctcaagtgatccacctgccttggcctcccaaagtgctaggattacaggtgtgagccaccgcacctggccagactgatctttaaagaagtatacatgaacacagcactccatgacttaaaacccttaagaggactaccatttatctcaagatgaaagaacaaaatcctcgctgggcacagtggttcatgcctgtaatcactgctttgggaagccgaggtgggaagatcactttaggccaggagttcgagaccatccatgggcaacatggtgagaccgcatttctacaaaagataaaattagctgggtgtggtggtgcacgtctgtagtcccagctacttggagggtgaagtgggaggatcacttgagccctggagttcgaggctgcagtgagctatgacggtgccactgcactccagcctgggtgacggagtgggacctcatcaaaagcaaaaacaaaaccgttattgtggctttgaggcctggatcataactacatcatttaatttggccaaaccggcccatttcaggtacccaaataccccgtgtgctttcttgcttggctctgggactaatgtggttactggtgcagggtgagtggcaggtatcatgaaccacattgtggacctggagttgctaggaccttttctgccattacacagaaaaatcctccctgagaacacagccattggaggacacatggcagaggaagataagacaataaacagagacacataattatggccagcgtgggggctcacgcctgtaatcccaaaactttgggaggccgaggtgggcagatcacctaaggtcaggagttcgaggccagcctggccaacatggtgaaaccccgtctctactaaaaatacaaaaattagccgggcgtggtggcacgggcctgtagtcctagctactccagagggtgaggcaggagaattgcttgaacctgggaggcggaggttgcagtgagccaagatcgcgacactgcgcgacagagtgagtctttttgtctgaaaaaaaaaaaaatatatatatatatatacacacatacacacataatacacacacacatatatatatgaaatgaccaatacacatgtgaacatattcaacgcaataactgcggttaaacagcagtaaaatcccattatttatccatcagattgacaaagactgaagaactggagaagaagtggcgaaacgggctcgcagcgtcgcattccctaccccagcaggtgcgcccgcagcgtcgcactccctagcccggcaggtgcgcgatcacacacacaccctgcagggggacttcgaccggcacttccggtcccggaagggcatgcccttggaccccggaagtccgggcgggggcagagccgggtgcgctttgcgacagagccgtaaaggcgcgcgggaacatggggctgtacgctgcggtggcaggcgtgctggccggcgtggagagccgccagggctctatcaaggggctggtgtactccagcaacttccaggtagcgggcccgcgcgccacaagtaggggtggggggtgaggaacccggggtggggtgggacgggcccggatggggtcgggaggtggggc

SEQ ID NO: 38368 - DNA, 2300 bp, Homo sapien
aggaaaaaggatgcagcatgtgattgcagggcaacctggtgaggacacgagagccacctgccaccagcagggttcagggctcccagctgtgggttacttccaccttctttcactttccctcttccattgtattctagagaatttaggcccagacaagacactgattgattgattgattgattgattgacagaggctcgctctgagcccaggctggagttcagtgatggatctcagctcactgcagccgccacctcctgggctcaagagatcctcctgcctcggcctcccaagtagctgggattacagacgtgcaccaccaggcccagctaatttattttttagtttttaatttgctggtaagatggtttgtagctttgttgcctaggctggtcttgaactcctggcttcaagcgatcctccagtcttgacctcccaaagtgctgggattataggcgtaggctacagccaactttcaatactgccccattgggggttacgtttccaacacatgaaattaggaggatacattcaaaccacagcagtatattatgaccataatattcattaactgtgtaacaggctgggcgcggtggctcacacctgtaatcccagcactttgggagaccagagtgggtagatcactcgaggtcaggagtttgagaccagcctggcccacatgatgaaaccgcctctctactaaaaatacaaaaaattagccggtgtggtggcaggcgcctgtaacctcagctacttgggaggctgaggcaggagaatcacttgaatccgggaggtggaggtggcagtgagcctgattgcaccactgcactccagcctgggcaacaagagcaaaactctgtctcaataaacaaacaaacaaacaaaacctgtataacagagtgtcattgaatttctaaacgttgaaagacttcacattaaaaaaaaactcacaatttaatattattgagtgaaagaaaccagacacaaaagggtacattctatatgatgctgtttatgtgacattcaaaaacaggccacatgacaacatggtaataaggacagtggctgtccttgttaggagttatgactggaaggaggcaggagggagctttctggaaacactgtacatcttgctcttgagagtgcacgtatatacatcaagtgtttatcaagctgtgtggttaagatttgcacacttgtatatgttatacctcgatttaaaaaatctaaataagtaaataaagataccttcaaatcttttaaaaaaaaaaaaaaaagaggccaggttcggcggctcacacctgtaatcccagcactttgggaggctgaggtaggaggattgcttgaggccaggagttcaaaaccagcccaggcaacaaagtgagacccctgtctctactaaagtaaataaaacaataaaataaaaaaaaaaattcgagagatcgaaccatcatctgccagtttgtattagaaaaaaagagagagagaaggaagactgcgtgcaataaggctcatgcctgtaatcccagcactttgggaggccaaggtgggaggattgcttgagcccagaagttgaagaccagcctgggcaacaaagcaagacccggtatctacaaaaaaaattttaaaaattagcttggcatggtggcacgtgcctgtagtcccagctactcaggcagctaaggtaggaggatggcttgagcctaggagttggaggctgcagtgagctgtgaccacgccactgcactccagcctgggcaacagagcaagacactgtcttcccctgccccccagccccccaccccccccaaaaaaggatataagagcaagagattgagattcagaaagaactgtttcccagcacctgtctgctcctgtcggggtcgtgaggtgtggacagtgtgcctagtccctctgtttctgcccctcctccacagtggccaaggccagcacttgaatgttatcagagcaggcccaacaaaggctgcctccccagtcctgtgatgtaacccagtttccacctgattctggtgaccttggggacacaggggtgttgctggggaaggggaggagagaaggggcagagaccaggcagtggtgcaggcgtccagctgcacttcccacttctgactctgtgcctgctgttccctgctgggaagaagaaaagccagtgatgctggcttgaggccatagtgggaggcccagtggatcctgagaagctaggtattccaatgtcgggctctcgctgggggcttctggtgcttcttctgtctcactgacaagctttcataggggagcaggt

SEQ ID NO: 38369 - DNA, 2300 bp, Homo sapien
gtcttccttctctctctctttttttctaatacaaactggcagatgatggttcgatctctcgaatttttttttttattttattgttttatttactttagtagagacaggggtctcactttgttgcctgggctggttttgaactcctggcctcaagcaatcctcctacctcagcctcccaaagtgctgggattacaggtgtgagccgccgaacctggcctcttttttttttttttttaaaagatttgaaggtatctttatttacttatttagattttttaaatcgaggtataacatatacaagtgtgcaaatcttaaccacacagcttgataaacacttgatgtatatacgtgcactctcaagagcaagatgtacagtgtttccagaaagctccctcctgcctccttccagtcataactcctaacaaggacagccactgtccttattaccatgttgtcatgtggcctgtttttgaatgtcacataaacagcatcatatagaatgtacccttttgtgtctggtttctttcactcaataatattaaattgtgagtttttttttaatgtgaagtctttcaacgtttagaaattcaatgacactctgttatacaggttttgtttgtttgtttgtttattgagacagagttttgctcttgttgcccaggctggagtgcagtggtgcaatcaggctcactgccacctccacctcccggattcaagtgattctcctgcctcagcctcccaagtagctgaggttacaggcgcctgccaccacaccggctaattttttgtatttttagtagagaggcggtttcatcatgtgggccaggctggtctcaaactcctgacctcgagtgatctacccactctggtctcccaaagtgctgggattacaggtgtgagccaccgcgcccagcctgttacacagttaatgaatattatggtcataatatactgctgtggtttgaatgtatcctcctaatttcatgtgttggaaacgtaacccccaatggggcagtattgaaagttggctgtagcctacgcctataatcccagcactttgggaggtcaagactggaggatcgcttgaagccaggagttcaagaccagcctaggcaacaaagctacaaaccatcttaccagcaaattaaaaactaaaaaataaattagctgggcctggtggtgcacgtctgtaatcccagctacttgggaggccgaggcaggaggatctcttgagcccaggaggtggcggctgcagtgagctgagatccatcactgaactccagcctgggctcagagcgagcctctgtcaatcaatcaatcaatcaatcaatcagtgtcttgtctgggcctaaattctctagaatacaatggaagagggaaagtgaaagaaggtggaagtaacccacagctgggagccctgaaccctgctggtggcaggtggctctcgtgtcctcaccaggttgccctgcaatcacatgctgcatcctttttcctgaacctgccccacgtgccccaccacgcagccactccgagggctccttcaagggcggcagccctgtcactcacgtgttccaaaagtgcttcccctgtgccctgacggcctcgccatgtgtcccatcatgccccacgcgctcccactgtgcgccccacctcgcacccgtgccccatcatgctctgcgtgctcgttaggtgccccatcatttcccgctcgctctcattacgtacccagcctccggcccctgtaagtgccccatcgtgctctctgtcgctccagttagatgccccatcctgccccgcgagctccaattacgtgccccacctaaccccccatgtccgtgccccatcatgccccgcacgctctggttacatgccccgcctggcgctcccgcacatgccccatcatgctcagcgcgctcccattacgtgccgccacctcgcgcccctgcaagtgcccaatgtgccctgtgtggtcccgttacgtgtcccatcatgttttgtgcgctccgattacgggccacacctggcaactcaccgtgcgacctctgtagttccagagctcgcgagggccagggccgttggcggcggttggaacgaaacgatgagtgcctcctcgtggccccagaatggaatgccgccgtcggtaggggtctgccgggcataaaggggccttcggaaccccaccagagtcacagccaggaagggcagcggggcgcaccaggccgaaggctcacgccacagggagggcagctaggacatggggggaagcgcgttaaaccagggagtcctggaaggggacgacg

SEQ ID NO: 38370 - DNA, 2300 bp, Homo sapien
gcatgctcagaaggcccagctccatgccccacaatgtaatatctgtaagaagggacaaagaaggtgggtgaagcttgctcagtatcctgcttaatgctatcagtttcttccccctctaagtcagcagtactctggcctccatgtctccctcacacagttccctcttcctgcaatgtcttcctcctgagcctgtgcccagcttctagtgatagaaattttattcaaacttctgggctcagttcaaatgccccctcttccaggaagccttccctgaacttcccagctagaattaatcatgccttcattaagcacacccacaacactgctttcacctcccaggcactcatccgattctaccaagtgagctgagtgcaggtcagtctcctctactacattgtgaggtccttaagggtggagatgttctaatcttctgagtacaacctctcttttcaccatgtattgtgggaagtaagcattcgtcgatttttacttaataaatgaacaaagaaacattcccagtggtgagttaagtcagagtgcaaagattataccttgcccattaagccatctcccaaatgcctaggtctcaaggggagagaacatggctgttttaccaaaacccagcctcagcaaagtcaattcaaagaacctgcgctctgagcagtcttcccagcctgaggcatggtgcctcatctcgctcctaaacaatcccttcttctccagctcctactctgaatttaccctctccaagtttcattagccgaggagttttcctaaagtaattagaatcgaagggtctgtccaagtgttccaggtatccatactatttcactagaatagaggaaagaatgtaaggaaaatggacccaaaacacccacgcctccataatatcgagtctctcatgatcacacagaaacaatgcgatcagatgagcttaagctgcccgacaccacgaggtacaggaataaatctctctgcattttaggagcctgcccttcggctcagaggttcaagagcttcatggaagcatcacgcaaaggggacataggggtccttagctttcctcttaaaaaaactaattcatggcagaagcagcggctcacgcttgtaatcccagctactggggaggctgaggtgggaggatcacttgggaccaggagtctgagaccagcctgggcaacatagaaagtgccccatctctacaaaaatattaaaaattagccgggcatggtggattgcgcctgtaaatctcttatttgggaggctgaggctggagaatcacttgagcccaggaagcagaggctgcagtgagctatgttcgcaccactgcactccagcctggggaactgagcgagaccccgtttcaaaaacaaaaatccacttcaaacaaagcatttccaaccccattaaatgctttttgaaaatgaggcctctctcttcccaacagagtgcgatgacatggatcctgcggacaaaccgccccagggcgtacctagcaccgaagcatcaggcgccactaggtctccagctccttctcggatgacgtccttcagcacgccccggtcccccgagatgtccagcatcctctgacttaaccgctcgtacagggactgatggagaatgaaagccaggcctcagagccgcagacccacccggccacccctcagcgtctacgcccccacgtctgggccctcacctggccgggggcgtcgtccccttccaggactccctggtttaacgcgcttccccccatgtcctagctgccctccctgtggcgtgagccttcggcctggtgcgccccgctgcccttcctggctgtgactctggtggggttccgaaggcccctttatgcccggcagacccctaccgacggcggcattccattctggggccacgaggaggcactcatcgtttcgttccaaccgccgccaacggccctggccctcgcgagctctggaactacagaggtcgcacggtgagttgccaggtgtggcccgtaatcggagcgcacaaaacatgatgggacacgtaacgggaccacacagggcacattgggcacttgcaggggcgcgaggtggcggcacgtaatgggagcgcgctgagcatgatggggcatgtgcgggagcgccaggcggggcatgtaaccagagcgtgcggggcatgatggggcacggacatggggggttaggtggggcacgtaattggagctcgcggggcaggatggggcatctaactggagcgacagagagcacgatggggcacttacaggggccggaggctgggtacgtaatgagagcgag

SEQ ID NO: 38371 - DNA, 2300 bp, Homo sapien
caaggtgggaggattgcttgagccgagaaatttgagaccagcctggcaacatgatctctacaaaaaatatagaaattagccaggcgttgtggtgccagcctgtagtcccagctacccaggaggctgaggaaggaggatcgcttgagcccaggagtttgaggctgcagtgggctatgatcacatcactgctctccggcctgcgcaacagtgcaaggtcatgtctcaaaaaaaaaatcccagctggctttttttttttttttgagatggagtcttgctctgttgcccatgctggagtgcagtggcggacgatcagcctcagggcaggccatctagaagaattaccaaaaacaccaacccatttgtctctctataaagtgctgacatttgtgctctgcaacgtacagctgagagagcacaaaacttgtctgactcagcacagtctaggaagtcaagcagctcaatcttgaacaggacagtggtgtttggggggatcaagggaggggagcccagcgttccataggcgtagttcggtttgaacagaaacctggccagctctcctctctgcatgctcagaaggcccagctccatgccccacaatgtaatatctgtaagaagggacaaagaaggtgggtgaagcttgctcagtatcctgcttaatgctatcagtttcttccccctctaagtcagcagtactctggcctccatgtctccctcacacagttccctcttcctgcaatgtcttcctcctgagcctgtgcccagcttctagtgatagaaattttattcaaacttctgggctcagttcaaatgccccctcttccaggaagccttccctgaacttcccagctagaattaatcatgccttcattaagcacacccacaacactgctttcacctcccaggcactcatccgattctaccaagtgagctgagtgcaggtcagtctcctctactacattgtgaggtccttaagggtggagatgttctaatcttctgagtacaacctctcttttcaccatgtattgtgggaagtaagcattcgtcgatttttacttaataaatgaacaaagaaacattcccagtggtgagttaagtcagagtgcaaagattataccttgcccattaagccatctcccaaatgcctaggtctcaaggggagagaacatggctgttttaccaaaacccagcctcagcaaagtcaattcaaagaacctgcgctctgagcagtcttcccagcctgaggcatggtgcctcatctcgctcctaaacaatcccttcttctccagctcctactctgaatttaccctctccaagtttcattagccgaggagttttcctaaagtaattagaatcgaagggtctgtccaagtgttccaggtatccatactatttcactagaatagaggaaagaatgtaaggaaaatggacccaaaacacccacgcctccataatatcgagtctctcatgatcacacagaaacaatgcgatcagatgagcttaagctgcccgacaccacgaggtacaggaataaatctctctgcattttaggagcctgcccttcggctcagaggttcaagagcttcatggaagcatcacgcaaaggggacataggggtccttagctttcctcttaaaaaaactaattcatggcagaagcagcggctcacgcttgtaatcccagctactggggaggctgaggtgggaggatcacttgggaccaggagtctgagaccagcctgggcaacatagaaagtgccccatctctacaaaaatattaaaaattagccgggcatggtggattgcgcctgtaaatctcttatttgggaggctgaggctggagaatcacttgagcccaggaagcagaggctgcagtgagctatgttcgcaccactgcactccagcctggggaactgagcgagaccccgtttcaaaaacaaaaatccacttcaaacaaagcatttccaaccccattaaatgctttttgaaaatgaggcctctctcttcccaacagagtgcgatgacatggatcctgcggacaaaccgccccagggcgtacctagcaccgaagcatcaggcgccactaggtctccagctccttctcggatgacgtccttcagcacgccccggtcccccgagatgtccagcatcctctgacttaaccgctcgtacagggactgatggagaatgaaagccaggcctcagagccgcagacccacccggccacccctcagcgtctacgcccccacgtctgggccctcacctggccgggggcgtcgtccccttccaggactccctggttta

SEQ ID NO: 38372 - DNA, 2300 bp, Homo sapien
gtaaagagcaagagaggactcaagcacagtcgcctcgaggtttctagccccggctgctgtcaccaaccactctcaggaaggtaggcagaaggttacgcaggagaaaccgtaggggtagttctgaggccctggaaggggtagttctgaggcccccgggggtgcggagctgcaggtccagggaggagtggtgaggctggaggaaggtgaggctggaggaggaggttcaggaggctctgaggtaaagatggaggctggggccttgggagtcgaggagtttacccaagacgaagcatctgtgtggaagaaaagataaggctgggcgcagtggctcacgcctgtaaaccaagcgctttgggaggccgaggtgggcggatcatctgtggtcaggagttcgagaccagcctggtcaatatggtgaaaccccttctctactaaaaatacaaatattagccgggtacagtgcacctgtaatcccagctactcgggaggctgaggcacaaggatcacttgaacccgagaggcagaggttacagtgagccgagatcatgccactgcactccagcctgggtgacagagcaagactccatctccaaaagaaaaagaaactataaacatcattgaaagaaactaaagaagacctaaataaatggaaggaaatcatgttcatggattaaaagacttaatattattaaaatttcattacttcagaagtgatctacagattcaacacaatccctatcaaaatcccagctgtggctgggtgtggcggctcacttctgtaatcctggcacttcaagagccaaggtgggaggattgcttgagccgagaaatttgagaccagcctggcaacatgatctctacaaaaaatatagaaattagccaggcgttgtggtgccagcctgtagtcccagctacccaggaggctgaggaaggaggatcgcttgagcccaggagtttgaggctgcagtgggctatgatcacatcactgctctccggcctgcgcaacagtgcaaggtcatgtctcaaaaaaaaaatcccagctggctttttttttttttttgagatggagtcttgctctgttgcccatgctggagtgcagtggcggacgatcagcctcagggcaggccatctagaagaattaccaaaaacaccaacccatttgtctctctataaagtgctgacatttgtgctctgcaacgtacagctgagagagcacaaaacttgtctgactcagcacagtctaggaagtcaagcagctcaatcttgaacaggacagtggtgtttggggggatcaagggaggggagcccagcgttccataggcgtagttcggtttgaacagaaacctggccagctctcctctctgcatgctcagaaggcccagctccatgccccacaatgtaatatctgtaagaagggacaaagaaggtgggtgaagcttgctcagtatcctgcttaatgctatcagtttcttccccctctaagtcagcagtactctggcctccatgtctccctcacacagttccctcttcctgcaatgtcttcctcctgagcctgtgcccagcttctagtgatagaaattttattcaaacttctgggctcagttcaaatgccccctcttccaggaagccttccctgaacttcccagctagaattaatcatgccttcattaagcacacccacaacactgctttcacctcccaggcactcatccgattctaccaagtgagctgagtgcaggtcagtctcctctactacattgtgaggtccttaagggtggagatgttctaatcttctgagtacaacctctcttttcaccatgtattgtgggaagtaagcattcgtcgatttttacttaataaatgaacaaagaaacattcccagtggtgagttaagtcagagtgcaaagattataccttgcccattaagccatctcccaaatgcctaggtctcaaggggagagaacatggctgttttaccaaaacccagcctcagcaaagtcaattcaaagaacctgcgctctgagcagtcttcccagcctgaggcatggtgcctcatctcgctcctaaacaatcccttcttctccagctcctactctgaatttaccctctccaagtttcattagccgaggagttttcctaaagtaattagaatcgaagggtctgtccaagtgttccaggtatccatactatttcactagaatagaggaaagaatgtaaggaaaatggacccaaaacacccacgcctccataatatcgagtctctcatgatcacacagaaacaatgcgatcagatgagctta

SEQ ID NO: 38373 - DNA, 2300 bp, Homo sapien
cagtgatgcctcaagctaagccaatcaaagccttccctgggattgtctcaaggagtccgcagtgagattctgggtctcagtactgggaaagggtgaggctgaggctgcctgctgtcctgggggcctcaccctgccaccaacaggaagccacacagagggaagcagaaatgagacgcagccagtgagggcagggtacaaaggtgagatcccggagagacagatgctgggacatcatccttgggtactggttccaacagtgcctgcagatggagccaccctcggagagtccacaacagcagccaatccattctatgcgtgtctgagctactttaagtcgggtttttgactgtttgaatgagagtctcatcttggctaggcaccatggcgcaacaactggggaggtggaggtaggaagattgcttgaggccaagagtcccagagcagcctgggcaacctatcaagacgctgtctttacgaaaagaaaaaaaactagctaggtgtggtggtgcgtgcctgtggtcccagctactggggaggctgaggtgggaggattgcttgagcccaggaagtggaggctgcagtgacctatgatggcaccactgtactccagcctgggtgacagagcaagaccctgtctaaaaaaaaaaaaaaaaaaagaagtcccaccgaataccttcatgcagtgaaggtcaccccatctgaaaaataaagcctgggcacttgggcttggtattggtggcctttgcaaggtgtaagatgcgttcccctccttgggccccccttaagcttgtcctgtacatttcatttacaaaggactttcacaagcatgaatggaggtgaccccaccacaccccaggtttcggataaggaaaccgaggcttcagtaggaagtactgtaccccacgtcacgcaggcagtgggggatgagaatgaacttgagcccctcatctgactccaccccccactctcaccttcactcccctgctctccctcttcccccgaggactgactgttcctgacctctgcacttgggcatcttcaccgtgcagtgtgactcaaatgcttccttctctcctctgctgattcagaccagctcagtgtgtgccacctcccctaggcgctttctgtagaagccccttctcctgccctggtcctgcacctgcctcaggtgttgacacctgagctcccgatgcttagggctgggtggctgccacccatcttgttacccagtgtgcagaattgggtgctggaggcacgagcctgctctatacctatttttaaaatttttaaattattattattatttgagacggagttttgttcttgttgctcaggctggagtgcaatggcacgatctcggctcaccgcaacctctgcctcccaggttcaagcgattgtcctgcctcagcctcccgagtaacttggattacaggcatgtgccaccacgcctggctaattttgtatttttaatagagacggggtttctccatgttggtcaggctgctctccaactcctgacctcaggtgatctgcccgccttggcctcccaaagtgctgggattacaggcatgagccactgcgcctggccaattattattattttttgagacggagtctcaaatctgttgcccaggctggaatgcagtggcacgatcttggctcactgcaacctctgcctcctgggttcaagcgattctccctgcctcagcctcccgagtagctggggttacaggaatccaccaccacgcctggctaatttttgtattttttagtagagatggggtttcaccatgttggccaggttggtcttgaactcctgacctcaggtgatttgcccgccttgtcctcccaaagtgctggaattacaggcgtgagccaccacgccaggcccctctttagatctgctttttttttttttttaaacaggatcttgctctgttgcccagactggagtgaagtggcacgactatagcccactgcagccttgaactccgggctcaagtgatcctcccgcttcagcctctccagtagctgaaactacaggcacacgccaccacgcccagctaatttttatttttattttgtagagatggggtttcactatgttgccccggctggtctaaaattcctggcctcaagcgatcctcctgcctccgccttccgaagtgctgggattataggcttgagtcaccaccgtgcccagcatacatctgctttctgaatatttgagaggcggaaggcacaaggcgtgacaattgatgggatttgggatgtaaagagcaagagaggactcaagcaca

SEQ ID NO: 38374 - DNA, 2300 bp, Homo sapien
caggtaccagccaccacgcccagctaatttttgtatttttagtagagagggggtttcaccatgttggtcaggctggtctccaattcctgacctcaagtgatccgtccacctcggcctccaaaagtgctggggttacaggcgtgagccactgcgcccagcctcctttcctttttctttcctcccactctgtcatcttttatcaatgacaacttttaaagatcccatgactggtcacagtgagaactctcttttgcagtcatcctttgcaatgataatatatgcctgtaaactaaggctttaattttttttttttttgagatgaggtctcactctgttgcccagtctagagtgcagcagtttagtcatagctcactgcagcccgaacttctgggctcaagcgatcctccttccatgcctgagtagctgggactacaggcatgtgccatcatgcctagctagtttatcgttattattttttgtagagacagggtctcactatgttgcccaggctggtctcagactcttggcctcaagggattctccctcgtcagcctcccaaagtgctgggattacaagcatgagccaccaagccaggcctatttatggtttctgatcatttttatttctttaaaagaagtgtatagctgggcacagtggctcactcctgtaatcccagcactttgggaggccaaggcaggtggatcatttgaggtcaggagtttgagaccagcctgaccaacatggtgaaaccccatctctactaaaaatacaaaaagttagccgagcgtggtggtggacgcctgtaatccctcctgctactcgggaggctgaggcaggagaaccacttgaacctgggtggcagaggtggcagtgagatgagattgtgccactgcactcaagcctgggggacagagccaggctctgtctcaaaaaaaaaaaaaagaaaaagaaaaaagaagtgtacactacagcaaagcatgtctgatgccagtgggctatgttggggtgggggtaagggtgtcaatttgacctgggggttctgaaagtctcaggaaaggcagatgggggagggcccgaggcatccacagctttgagtgtcctggtgtctaagcaggagccatggagaaggtgggaggtgtgagttaggatcagctggagatcggtgctcttttgtccaagagaatgaagttgtcttcaggtatgatttggtttggaaacaagataaaagagattggccgggcacggtggctcaggcccgtaatctgagtactttgggagaccaaggtgggtggatcacgaggtcaagagatcaagaccattctggccaacatggtgaaaccccgtctctactaaaagtacaaaaattagctgagcatggtggcgcatgcctttagtcccagctacttgggaggctgaggcaggagaattgcttgaacctgggaggtggaggttgcagtgagccgagatcgtgccactgtactccagcctggtgacagagcaagactctgtctcaaaaaaaaaaaaaaagaaaaggaaaaaggtggccaggtgcagtggctcacacctgtaatcccagcacgttgggaggccgaggcgggcagatcgccagaggttgggagttcgcaaccagcctgaccaacatggtgaaaccctgtctctactaaaaatacaaaattagtcaggcatggtggcgcatacctgtcatcccagctacttgggaggctgaagcaggagaattgcttgaacccgggaggcagaggttgcggtgactggagattgcgccattgcactccagcctgggcaacaaaagtgaaacttcgtctccaaaaaaaaaaaacaccaaaaaacaaaaattagctgggcgtggtggtgcatgcctgtaatctcagctactcagggaggctgaggcaggagaatcgcctgaacccgggaggtggaggttgcagtgagccgagatcgtgccactgcgctccagcctgggcaacagagcaagactccatttcaaaaacaaacaaacaaacaaaccaacaaacaaaccgaaattttagggacagatggattttttctctggaatattgacttcaacccagccacatatggatatgcttagaacagcagggctcagtctgaagttgggaccatatctgttctcaaaacatgtggatccctgaggccagacaccaggtgcccgccattggtgtcagggccctactcctctccctgcagtgcaaggggccagtcctcaaggcaggggttcctcctctctggacacacagagaaagaggaggcggggaaacagc

SEQ ID NO: 38375 - DNA, 2300 bp, Homo sapien
cttcgagagagcgtttcttttcttaaagcgtgttcttttcttaaaggtatcacaggagtgattatgcctttattgattgatggagcagatgaggagaggcattgcatgacatgggaaggaagcttagatgtgggtggcaccttgttcacccgtgttattttttagctccatcttgacaattatacttaattattttttccctgtttctttttttataattttattgaagttctaatatctgaaagtgtacaaagcgtatatgtagtttaaaaaataaaaatgagatatcacccagatctctagccccagctcaagaaatgaaacattaatagtgctgtagagatcctttgtgtaccttctttctaccctacctcacagtccccttattacccataggtaaacactagggtgaactttgtgttaatctttctcatctttcattatagtgttaccactatgaatgtgttctttaattatgtaaatgaatccattattcaggcttctgtgatttaattatttcagttaagattgtttgagatttatccacattaacatgtagttttatagtttctgggaaaatatttaaaattttcaaacatacagaattttgctagttatattttcgttatttgatttctaactttattgtgttgtagtcagggaatgtggtgtttgaaatttatgtgggggctgggcacagtggctcacatctgtgatcccagcacttggggaggctgaggcaggcagatcacttgaggccaggagttcgagaccagcctggccaacatggcgaaaccccatctctactaaaaatacacaaattagctgcatgtggtggcatttgtctgtaatcccagccacttgggaggctgaggcatgagaattgcttgaacccaggaggtggaggttgcagtgagctgagattgtgccacggcactccagcctgggtgacagagtgatactctgtctcaaaaaaaaaaaaaaaaaaaaaaaaatttatggagacttagccttatggcctagtattgagttggtacaatcattttatcttttctgtttctttttccccctttgcttgctttcctctggatttcttatcttctacaaggacctgagcacattttaattccagttgtcttttccaccttacatgcagttgtacagtgtgttagttttttatttgaaacggagtcttgctctgtcaccaggctggagtgcagtgacgcgatcttggctcactgcacctccgcctcccgggttcaggcgattctcctgcctcagcctgccaagtagctgggactacaggcacccgccaccatgcttggctaatttttggccaccatgcccagcctgaatgaactttcaaaattggtttttaaaagaggtatggaggccgggtgcagtggctcacacctgtaactccagcactttgggaggccaagacgggcagatcacttgaggtcagaagttcgagaccagcctggccaacatggtgaaaccccatctctactaaaaatacaaaaaggtagctgggcgtggtggtgcacctgtaatcccagctactcaggaggctgaagcaggagaatcacttgaacccgagaggtagaggttgcagtgagctgagattgtgccgctgcactccagcctgggcaacaggtggagtggagaattaggctgtacaaggctggtgtttaactattttatggtttggtaacagaaagaaaatatttactaactgggtatggcacatttttgtagtcctagctacttgagaggccaaagtgggaagatgacttgaacccaggagttcaaggccagcttgggcaacacagcaagagaccccatcccttaaaaaaaagagaaaaaatatttacatgtattttactatatatatagtatttacatcgggaggaagaaatgaaaggcatggggtacatggcatttcaagaaaataaattcttccatgagagggagttaactggtaggatggaaagtgagtttggagagagggtggctctaagagtcaacttatctgtctgtgtctagggatgtccttcctgagatccgtgctatctgcattgaggaaattgggtgttggatgcaaagctacagcacgtctttcctcaccgacagctatttaaaatatattggttggactctgcatgataaggtgggattcgagtcagtttccctttccgtttccttcatctttttcctgtcctaggacacttcaccttttcctgggcctgccactgagatattttacctagtgaccaatgattaacccatcaaggcgctga

SEQ ID NO: 38376 - DNA, 2300 bp, Homo sapien
ggtcaacatggcaaaaccccgtctctactaaaaatacaaaaattagccaggtgcagtggacagtgcctgtaatctcagctactcatgaggctgaggcctgagaattgcttgaacccaggaggccaaggtggcagtgagctgagatcatgccactgcactccagcctgggtgacagagtgaaactccgtctgaaaaaaacaaaacaaacaaacaaacaaaaaaccagaccatattgtttagggatacttagctgacaaaataatagagacaagcatgacataattaccataaaaatcaggccctggggtgctggtggggaaggtttaagtggaaagaatggagcggtgacaatgtgtgtcaacctgggaggtggtgaccctggggttcgctttgtaattcctcaaaatgagcatttatgtgctattcacttttcagaggatagaattctgaactaaaatgtttaagcagccatacgcaaaaaaagaaaaaatatggatagatttttattttaattaaaacatttaaaaaatagagacaaggcagctgggcgtggtggctcacgcctgtaatcccagcaatttgggaggccgaggcaggcgaatcacgaggtcaagagatcgagaccatcctggctaacacggtgaaaccaagtctctactaaaaatacaaaataaagttagccaggcgtggtggcgggcgcctgtagtcccagctactggggaggctgaggcaggagaatggcgtgaacccgggaggtggagcttgcagtgagtcgagatcaggccactgcattccagcctgggcgacagagcaagactccaactcaaaaaaaaaaaaaaaacatagagacaagggtcttgctatgttgctcagggtggtctcaaactctccgggctcaagcaatcctcccgcttcggtctcccaaagcgctgagattccaggcgtgaaccaccgcgctcgaccaggaaaaaaatatatatatatataatatacaatatattttataatatattatgtcatatattacacataatatacaatatgtataatacgcataataaaggtatatttaatatatataaagatatatatgtatataataatttttttttttgagacggagtttcactcttgctgcccaggctcgagtgcaatggctcgatctcagctcactgcaagctccgcctccagggttcaaaccattctcctgcctcagcctcccgagtagctgcgattacaggcgcccgacacacgcccggctaatttttgcatttttagtagacacggggtttcaccatgttggccagactggtctcgaactcctgatctcaggtgatccgcccgcctcggcctcccaaagtgccgggattacaggcgtgagccacggcgcccggcctgaataaatcttttaaaacataaaaatctgggtgagcccctggccggccggcacagatgccggggtggggccgcgaatcggttgggacgcactctatccggcctaggggcacccgggccagcacccggccgccgcgcgtgcgcagtgggcggggtgccccgcgctcctacctgcaagtggccagtgccaagtgctgggccgccgctcctgccgtgcatgttggggagccagtacatgcaggtgggctccacacggagaggggcgcagacccggtgatagggctttacctggtacatcggcatggcgcaaccaaagcaagagagggtggcgcgtgccagacaccaacggtcggaaaccgccagacaccaacggtcggaaaccgccaagacaccaacgctcggaaaccgccagacaccaacgctcggaaaccgccagacaccaaggctcggaatacacgccagaccacgacggagggcgaccacctcccttctgaccctgctgcgggcgttcggaaaaaaaacgcagtccggtgtgctctgattggtccaggctctttgacgtcacggactcgacctttgacagagccactaggcgaaaaggagagacgggaagtattttttccgccccgcccggaaagggtggagcacaacgtcgaaagcagccaatgggagcccaggaggcggggcgcctgtgggagccgttgagggcactttcccagtccccgaggcggatccggtgttgcatccttggagagagctgagagctcgaggtgagctgggctcgcggtcgcccctctcgctcgccctctttgagaaccacggcttccgacctccctggaaatggggggaacatggccgaggcgcgtgggaggccgcctcgtggaggccccggagcggcatcctca

SEQ ID NO: 38377 - DNA, 2300 bp, Homo sapien
cactaggattacaggtgtgagccaccgcaactggccgtcccctatattgcagcacagtgaacaactgtttcctgaacatcacaagctctcttagacactacagtgtataagcaggtctctgtctaaactgctctcctcttgcccctctgcccaatgtctgctcatccaaagaatgtatcccgtgtgttcattaacttagcaagttcccagtaaacagtttaattgatcactcgttaagagaaggcgggaaacctacatgaaaagagaaattagtgggtatttcctacagcatttaacacatcgtaggccttcaataaacccttgtgaaataaacaaacctctttactgttcattctatgttgctaagaatctcacctaagtctgtctaccatgtgaaactgcagatgacctcacagaaaatggaaagaagtatctctaaaaataagtttatttggcaacacactacaggctacaggttcacttctgattttttttctttttttttttgagatggagtcttgctgtgtcacccaggctagactgcagtggtgcaatctcagctcactgcaacctctgtctcctgggttccagcgattctcctgcctcagcctcccaagtagctaggattacaggcgcctgccaccacgcccagctaatttttgtatttttagtagaaatgggatttcaccatgttggccaggctggtcgtgaactcctgacctcatgatccacttgccttggcctcccaaagtgatgggattataggtgtgagccaccgcacctggtccacttcagatatttagatacagacggcaagtgtatttaaatgtctcaatacatttaaatgtagttacctaaatatatctaatatatttaaatgcagagagcaaatttgcgtttacaaatctgacatggaattcaactgtgctagccaagattcggtgtagcttaccagccagaaatcacataccctaagaggtaaaaatgcattgcattttttaaaactgagcagctacgcaaattaggatgtgtctggacgctctactgtccccaaaataacctcaatttttttttaaaaggccaggcacagtgcattacgcctgtaattccagagctttggggggccaaggcgggcggactgcttgagctccggagttccagaccagcttgggcaacatagcgaaatccccgtctctacaaaaaaataaaataaaaattaaaaataaaataatataaaaataaaaataaaaggggagagagaacaggtagaaaggaaatgcattcagtctatggggatttcacgttccggcttcaagtccacggccctgtgatgggatgtgggcagggcctgagacaggccgaacccaactcttcacagggccgaattctttgcccgcagcccagcaccccgaaggagcttgcctcggcttcaaggcgcacctaatgggcaccggatcgctggggcgctgaggatgccgctccggggcctccacgaggcggcctcccacgcgcctcggccatgttccccccatttccagggaggtcggaagccgtggttctcaaagagggcgagcgagaggggcgaccgcgagcccagctcacctcgagctctcagctctctccaaggatgcaacaccggatccgcctcggggactgggaaagtgccctcaacggctcccacaggcgccccgcctcctgggctcccattggctgctttcgacgttgtgctccaccctttccgggcggggcggaaaaaatacttcccgtctctccttttcgcctagtggctctgtcaaaggtcgagtccgtgacgtcaaagagcctggaccaatcagagcacaccggactgcgttttttttccgaacgcccgcagcagggtcagaagggaggtggtcgccctccgtcgtggtctggcgtgtattccgagccttggtgtctggcggtttccgagcgttggtgtctggcggtttccgagcgttggtgtcttggcggtttccgaccgttggtgtctggcggtttccgaccgttggtgtctggcacgcgccaccctctcttgctttggttgcgccatgccgatgtaccaggtaaagccctatcaccgggtctgcgcccctctccgtgtggagcccacctgcatgtactggctccccaacatgcacggcaggagcggcggcccagcacttggcactggccacttgcaggtaggagcgcggggcaccccgcccactgcgcacgcgcggcggccgggtgctggcccgggtgcccctaggccggatagagtgcgtcccaaccgattcgcg

SEQ ID NO: 38378 - DNA, 2300 bp, Homo sapien
agtctcaccctgtcacctgggctagagtgcaatggcatgatctcggctcactgcaacctccacctcccaagttcaagtgattctcctgtctcagcctcccaagttgctgggattataggcatccaccattacactcagctaatttttgtgtttttagtagagatggggtttcaccatgttggccaggctggtttctaactcctgacctcaggtgatctgcccgccttggccttccaaagcactaggattacaggtgtgagccaccgcaactggccgtcccctatattgcagcacagtgaacaactgtttcctgaacatcacaagctctcttagacactacagtgtataagcaggtctctgtctaaactgctctcctcttgcccctctgcccaatgtctgctcatccaaagaatgtatcccgtgtgttcattaacttagcaagttcccagtaaacagtttaattgatcactcgttaagagaaggcgggaaacctacatgaaaagagaaattagtgggtatttcctacagcatttaacacatcgtaggccttcaataaacccttgtgaaataaacaaacctctttactgttcattctatgttgctaagaatctcacctaagtctgtctaccatgtgaaactgcagatgacctcacagaaaatggaaagaagtatctctaaaaataagtttatttggcaacacactacaggctacaggttcacttctgattttttttctttttttttttgagatggagtcttgctgtgtcacccaggctagactgcagtggtgcaatctcagctcactgcaacctctgtctcctgggttccagcgattctcctgcctcagcctcccaagtagctaggattacaggcgcctgccaccacgcccagctaatttttgtatttttagtagaaatgggatttcaccatgttggccaggctggtcgtgaactcctgacctcatgatccacttgccttggcctcccaaagtgatgggattataggtgtgagccaccgcacctggtccacttcagatatttagatacagacggcaagtgtatttaaatgtctcaatacatttaaatgtagttacctaaatatatctaatatatttaaatgcagagagcaaatttgcgtttacaaatctgacatggaattcaactgtgctagccaagattcggtgtagcttaccagccagaaatcacataccctaagaggtaaaaatgcattgcattttttaaaactgagcagctacgcaaattaggatgtgtctggacgctctactgtccccaaaataacctcaatttttttttaaaaggccaggcacagtgcattacgcctgtaattccagagctttggggggccaaggcgggcggactgcttgagctccggagttccagaccagcttgggcaacatagcgaaatccccgtctctacaaaaaaataaaataaaaattaaaaataaaataatataaaaataaaaataaaaggggagagagaacaggtagaaaggaaatgcattcagtctatggggatttcacgttccggcttcaagtccacggccctgtgatgggatgtgggcagggcctgagacaggccgaacccaactcttcacagggccgaattctttgcccgcagcccagcaccccgaaggagcttgcctcggcttcaaggcgcacctaatgggcaccggatcgctggggcgctgaggatgccgctccggggcctccacgaggcggcctcccacgcgcctcggccatgttccccccatttccagggaggtcggaagccgtggttctcaaagagggcgagcgagaggggcgaccgcgagcccagctcacctcgagctctcagctctctccaaggatgcaacaccggatccgcctcggggactgggaaagtgccctcaacggctcccacaggcgccccgcctcctgggctcccattggctgctttcgacgttgtgctccaccctttccgggcggggcggaaaaaatacttcccgtctctccttttcgcctagtggctctgtcaaaggtcgagtccgtgacgtcaaagagcctggaccaatcagagcacaccggactgcgttttttttccgaacgcccgcagcagggtcagaagggaggtggtcgccctccgtcgtggtctggcgtgtattccgagccttggtgtctggcggtttccgagcgttggtgtctggcggtttccgagcgttggtgtcttggcggtttccgaccgttggtgtctggcggtttccgaccgttggtgtctggcacgcgccaccctctcttgctttg

SEQ ID NO: 38379 - DNA, 2300 bp, Homo sapien
agatacttctttccattttctgtgaggtcatctgcagtttcacatggtagacagacttaggtgagattcttagcaacatagaatgaacagtaaagaggtttgtttatttcacaagggtttattgaaggcctacgatgtgttaaatgctgtaggaaatacccactaatttctcttttcatgtaggtttcccgccttctcttaacgagtgatcaattaaactgtttactgggaacttgctaagttaatgaacacacgggatacattctttggatgagcagacattgggcagaggggcaagaggagagcagtttagacagagacctgcttatacactgtagtgtctaagagagcttgtgatgttcaggaaacagttgttcactgtgctgcaatataggggacggccagttgcggtggctcacacctgtaatcctagtgctttggaaggccaaggcgggcagatcacctgaggtcaggagttagaaaccagcctggccaacatggtgaaaccccatctctactaaaaacacaaaaattagctgagtgtaatggtggatgcctataatcccagcaacttgggaggctgagacaggagaatcacttgaacttgggaggtggaggttgcagtgagccgagatcatgccattgcactctagcccaggtgacagggtgagactctgtctcaaataataataataataataataataataataataataataataataatgtaggggacttgatgaagggaaaggatcagagagattctgaaaagaaggtagtttggggcccagtgatgactagattttaagtttcatatagtaggaagtggggcactagtaatttttcaagcagaaaaattatttgaccagattcgtgatttcaaaaatagctctggtgatagagtggaggatgggttggagcagggaataaggggaaatgaaactgttataaaactcttaaagtgggctgggcatggtggctcacgcctgtaatcccagcactttgggaggctgaggcgggcggatcacgaagtcaagagatcgagaccatcctggctaaaacggtggaaccctgtctctactaaaaatacaaaaaattagctgggcatggtggtgggcgcctgtagtcccagccactcaggaggctgaggcaggagaatggtgtgaacccgggaggcagagcttgcagtgagctaagatcgtgccactgcactccagcctgggcgacagggcgacagagcaagaatccgtctcaaaaaaaaaaaaaaaaaaaaaaaacctcttaaaacaagtacagcaagaactttgagggtctttgctaagacagcagctggcagcttcaatttggagtagggtatcaaaggcaactgtgtataaggaatagttatataactggtatccaatttctgagatgattttgacttaaacattgtgtatttcccagcatactgttggtttttctaattatgtgggaaattatgttgcttttacttttttttttgctcattgcccagcctagggtgcaatgctgcaatctcagctcactgcaacctccgcctcccaggtttaagtgattcttctgcctcagcctcccaagtagctgggattacaggcgcccaccaccatgcctggctaattttttgtatttttggtagagacagggtttcacgacgttggccaggctggtctcaaactcctgatctcaagtgatccacctgcctctgtgtcccaaattgctgggattacaggcatgagccaccgcaccggccatgctttcagttttcaagaaagaagacaccattattgccaaagattttggtaatttgagagatacaatgtatgttttctccatgtggatactagatagtaaggatgtgttgaatttgaagtgtctatccagaagtattttgggtacttgtttaaggattgtaaaacaatgtttccatttctggatataataaatgtatttgttaatataataaatgaatagattagacccataaactatttgcagtgttgagtcatttcccacagttaaaatcaggatgaaaatatatagctgaatacttgctttgtttcttgtaactgatttctttagtacagaacctgctaaggccatcaaacctattgatcggaagtcagtccatcagatttgctctgggccggtggtactgagtctaagcactgcggtgaagaagatagtaggaaacagtctggatgctggtgccactaatattggtaagtttgggagagttttaagccacaagaaatgatcagtgaatgttgttgtagtcaaga

SEQ ID NO: 38380 - DNA, 2300 bp, Homo sapien
ataaggaatttcaaaggaatattaagaaggtacagtaaattaatcctggttttcaagagtattggttaatgcacatgagcaaaagatttactaaagatgtttattcttcagttgattctcttcccataatttattgagaaatgctttatttgcatttctcattaaagacttaacttcaggatgatttacttttttctttttatcacataatgtttattaggactgggaaacatagtgagactctgtctctatgaaaaattaaaaaaaaaattgactgggcatggtggcatgcacctgtagttccagctacttgggaggctgaagtgggaggatcacctgagcccaggaacttgagactgcagtgagctatgattgcgtcactacacttcagactgtgagacagagtaagaccctgtctggaaaaatatatatacatatatatacattttttttattttttatttttatctttttttgagatggagtctcactttggcaccctggctgcagtgcagtggcgcgatctcagttcactgcaacctccacctgccaagttcaagcgattctcctgcttcagccttctgagtagctaccattacaggcgcgcgccaccacgcccggctaatttttgtattttcagtggagacggggttccaccatgttgtccaggctggccaggctggtcttgaattcctgccctcaggtgatccgcccacctcggcctctcaaagtgctgggattacaggcgtgagccaccatgcctgaccttatgtacttatatttttatgagaatatttctcttggttttctgataaatgagttactggaacccttatgaatttgaatgcaaatgaaacagctaaatgttatataattgttgtgtttaaaaagcagattataaaactgtctgtattatatgattacagttttataaaaacaaaacaggcctaaatgtgtatagtataaagactgaagagtcagcacttccatgttctcagcggttatccttggatgtgagatctcatgcactttttgctctcttctttgtgcctttccattttgcatgcgtatttcttataatctaaaaagttacttaaacatatgcagctaaaaactttttttacttgtaaagcgtttggtgctaattttaacttttttttttagacggagtcttctcactctgtcgcccaggctggagtgcagtggtgtgatcttggctcactgcaacctccgcctcctgggttcaagtgattctcctacctcagcctcccaagtagctgggattataggtgtgtgtcaccacacccagctaatttttgtatttttagtagagatggggtttcaccatgttggccaggctggtcttgcacccctgacctcaagtgatctgcccacctcagcctcccaaagtgctgggattacaggcgtgagccaccacgcctggctttttttttttaaagcttttttgtaagtcagccagcaagaacacaggaggaagtactcaaatctcccttacacagctgggggctgtgtcaggttttataagcatagggtaatgaggtgtgatttgattggatcttgcaataaagtaatgctgggaggtgtgatctgactggatcctgccatggggtgacaccaaaactcaatctgattggatcctggctcctgcctgggggtgtctggttcttaaatcggtccgggctcttcaggctgagctcttaggttccactccacggtggcacgcgtggttaacctgggcatgcacagggtacatgaccttcaacctgcaggtcgatggcaattggaaaacaactgacaacttcattacataaaagttgaactgattcgggtgcggtgactcacgcctgtaatcccagcactttgggaggccaaggcaggtggatcacctgaggtcgaggagttcaagaccagcctggccaaaatggtgaaaccccgtctctactaaaaatataaatattagccaggcgtggtggcgcacccttgtaatcccagctaccccagaggctgaggcagcagaatgcttgaacctaggacgtggaggttgcagtgagctgagatcgtgccattgcactccagcctgggtgacaagagtgaaactccatcaaaaaaaaaaaaagttgaactagatttggtctgatgcagttacagatttacaaaccgcgtcccaccctcctgccaacaccttccactcctcattcttgagggattagggatggaggtcatgcttctgtatcgacttcatgctgaccaggggcacttagtcccctaaagtgagagga

SEQ ID NO: 38381 - DNA, 2300 bp, Homo sapien
tgaaaacagactaatggacccttctggttgaaggaatgtagccattctgcttgtttaagtatttcctttctattcatctctatttcccgggaggtgtttatccaagtgcaataggagatattggtgactgcagagtcccctcagtgttctgctagtaaatagttgaaggttgatcagtgatctccagcattttcagtctggcatggaaaagcccccatgtaactggtaaaggtatcagtaagcaccaggaggtatctaaatccaccaggagccataggcatcatgttgatgtccatttaccagtcttccctggcaagattctctgaattgtactgccttggccaaaagaggtatgggaggggctgggcacagtggctcacgcctgtaatcccagcattttgggagaccaattcgggtagatcattagaggtcaggggttcaagaccatcctggccaacatggtgacattccatctctactaaaaatacaaaaagtcagcggggtttggtgttgggtgcctgtaatcccagctactcgggaggctgaggcaggataatcacttgaacctgggaggaggaggaggtggcagtgagctgagatctcgccattgcactccagcctgggcaacaagagcgaaacttcatctcaaaaaataaaaaaagaagtctgggtgtggtggctcgtgcctgtaatcccaggactttgggaggccaagatgggtggatcatgaggtcaggagttcaagaccagcctggcctagatggtgaaaccctgtctcgagtgaaaatacaaatattagctgggcatggtggcacacacctgtaatctcagctactcagaagtctgagacagaagaattgccaaaacccgggagggagaggttgcagtgagccgagatcgcgccactgcactctagcctgggcgacagagcaagactccgtctcgaaagaaagaaagagaaaggaaattccccagggaagtacctcggcttatttcatgaagaggtactgaaggaagcagaggcatgtggaggacttccccacctcgtgcagctatttgggccgtggcgtctgaaatttcttatttcagagtcacccctttgatgaccttggcagtggactgcagtcatctgtttaggcctctccatggcccgtgtcaatgccgatatttctgtctgttgcacatttgatttccttgttgttggcatttagaaggccccctgtttcccagatcacaccacgggcatggaccgcagagattgcatcttgtgagtctgtagaaacagtcaaggccttgtcctctcttaggtccagagctcaggtgaatgcagattttcccggccatctgtgctgaagtccctgtggggaggctcctggctggtttcctgtaggtagacagctacacatcctgcccttcattggcttcttttcatgaagctcctgctgtctacaaaacatgtctcccttttcttcttgaaccacatctctgttattgaaactctagaagtcagccaggcacagtggctatgcctgtaatcccagcactttgggaggccaaggtgggtggatcacctgaggtcaggagttcaagaccagcctggccaacatggcgaaaccctgtctctaatacaaatactaaaattagccaagcatggtggccactgcactccagcctgggtgacagagcaagactctgtctcaaataaagaaagagaaagtatcatgcttttcagagttctgtgggttgttatggtgaattatcaaacctgaggacgtggtgggaacctccaaatttgcagccagttggtgagaagtacatgcggtctgtggacacccaagcttgcagctgcatctgaagcgagggcagcctagcgggggctggtggccttaacctgtggcatttgatgtaacatcagggagttgacatcagaattacgtcacacaggccaggtgcagtggctcatgcttataatcccagcaattagaaaggcaagataagaagattgcttgagcttgagtctgagcccacagtgagctatgaccgcaccactgcaccccagtctgggtgacagcacaagaccccgactccaaaaataaaaaagaaaaatcacaaagaattgcatggcagagtgcctgtctttcacagcttgaactgttgcaggaactttctttttttttttttcttttgtgatggagtctcgcgctttcacccaggctggagtgcagtggcgcgatctctgctcactgcaggctccgcctcctgggttcacaccattctcctgcctcagcctccggagtagc

SEQ ID NO: 38382 - DNA, 2300 bp, Homo sapien
gcagccccaggaagagcggagcccccagcggagcacctcagggtaccccctccaggaggtggtggatgatgaagtgtcgggaccatcaggtgaggggactggaggaagaagaggtggcataggattgactaagatgaaggaagggggccaggcgtggtggctcacccctgtaaccccaacactttgggaggctgaggcgggcagatcacctgaggtcaggagttcaagaccagcctggccaacatggtgaaaccccatctctactaaaagtacaaaaattagccaggcggtagtggtgtgtgcctataatcccagctacttgggaggctaagacaggagaatcacttgagcctgggaggaagaggttgcagtgagccgagatcgtgctactgcactccagtctgggtgacagagtgagatgctatctcaaaaaaaaaaaaaaaaaaaaaaaaaaaaaaaaaagaagaaaaaaaagaagggtcagaggtcaggaaggagaacctggggagggtgtgtgggaagaatggagaaattcaggctgggtgcagtggctcacacttgtaatcccagcactttgggaagccaaggcaggcggatcacttgaggccaggagtttgagaccagcctggccaacatggtgaaaccctgtctctattaaaagtacaaaatggagctgggcattatggcaggcacctgtaatcccagctacctgagaggctgaggcaggagaataactggaatccgggagatgcatgttgcagtgagctgagattgcaccactacactccagcctgggtgacaaagcaagattctgtctcgaaacaaaaaaaaaaaaaaaaaaagagggactcagagagccagggaccagggaaggatatgaggcagtgttctgaggacagagagagggaagaatggggaggggaaggagtggcacatggggttgagcagaggagaaagtcagaaaggtggcttggagaagccagcagtctgcgaggctggggaggatggagagtggtttggggtttggggtcggggtctaacgtgatcagttgcagaagcattacacggtggcctggtttctttactcagcccctggggtagatcccagccccccacgtaggtcccttggctggaaaaggaagagggaatgtttggatgaatctgatgatgagccagagaaggagctcgcccctgagcctgaggagacctgggtggcggagacgctgtgtggcctcaagatgaaggcgaagcgacggcgagtgtcgctcgtgctccctgagtactacgaggccttcaacaggctgcttggtaggaggacaccccagagagcacctccaatcctgttctttctaaagaggaaacttccaataaccacacttttccaatgggaaaaatatgccccagtgggtgagctctccatgcgggaggactctgaagtgatcactcatgagggacacttaaggagacaacagaggattaggtagacttgataaaggtcggtgcttgggataagaaagcttggttttgggccaggcgctgtggctcccgcctgagatcccagcacgttgggaggctgaggcaagaggattgcttgaactcaggactttgaggctgcagtgagctatgactgcaccactgcactccagcctgggtgacagagcaaaactctgcgtcaaaagaaaaaccaaggctgggcacagtagctcatccctgtagttccagctactcgggaggctgagacaggagaactgcttaaacccaggaggcagaggttgcagtgagccaagatcaggccaatgcattccagcctggcccacagagcaagactctgtctcaaaataaattaataaataaataaaaataaaaatcaaataaagaaaaacaaaatcaaaaatcaaaaaagtggtttcagctgtgccctctgaaacttaatgtttcttactgactttgctaaacctaagtgtctccatccatagtgggggatcccaaggccatggtcacaccctgatgtgtgactgtctcatgaggaaatgatgggaattcctttatgactctgcagtggtccctccgtgtctgctggagggggtcctggctgattcccagctctacatcctgtagattctcacacccagggcctccttcggcctcttctcaggggagtctcagagcaggagcctctctcccttgcccagtgaaagtcattctcccctctctcatccacctcacccgcggccacaatcctgagactttcccccgggaggcacacttctcctcgctgccctgctgctctcacggaaacc

SEQ ID NO: 38383 - DNA, 2300 bp, Homo sapien
ccaaccaaagtgttgggattgcaggagtgaccactgtgtccagccaggaaagcccttctgtttcacttgaatgatatttctgccgcagacctacagccattgttgtattaaacggcatcattgcaggaaaagaaaaggtgagaggtgactgttttgcttttttctgaacatatcagaccaaacctgggctgtctggcactttttttttttttttttttgagtcggagtctcactctgtcgcccaggctggagtgtagtgtcgtgatctcggctcactggaacctccaccttcccggttcaagtgattctcctgcctcagccccacaagtagctgggattacagaagtgcactcccacgcccagctcattgtttctgtatttttacagaaaaacagacaggtttcaccatgttggccaggctgatctcaacctcctcacctctggttatctgtcggcatcagcttccaaaagtgctgggattacaagtgtgagccgccgcacctggtttgcccattttttgacaatgtatcaacatcatctaagatgggcactgcctcagtgtagtgtgtctagacaaggtggccggaacagagaggaatatgcataccaggcttaaagacgggttaaatcagagcttttcattccacaaaagagcaattttaatgaggtcagaacatggatgttctaatatttgaaagcctgttaaccaggagagagagtaaagtgatttgttgtaggaggacacacccagctctgacggtttaaagcgtcatgaatgcaaatttgaactccagaaaagcagagcttcctaacaatgggacttccacagcaatgggatttccttccgcattcagtttgtgcctttcccatgagcgagagactcctaggagagccgcagcccgttaggaagccatgtgggaactcatccacaggttctttttgttttttttgttttttttttttttttgagatgtagttttgctcttgttgcccaggctggagtgcaatggtgtgaccttggctcactgcaacctccgcctcccaagtttaagccattctgctgtccccgcctcctgagtggctgggattacaggcacccaccaccatgcctgactaattttttgtatttttagaagagatggggtttcaccatgttggccaggctgctcttaaactcctgacctcaagcgatccacctgctatggcctcccaaagcgctgggattacaggcgtgagccactgtgcctggccggaacccacaggttctttggatggtctctgaatgtcatgaaactcttttatatttaattaaaaaaatttttttgacacaaggtcttgctgtgttgcccagactggagtgcggtgtcacgatcacagctcactgcagcccctaactcctaggctcaagcaatcctcctgccacctcagtctctcaagttgttggaacacaggtgccagccacgacacctggctaattttgttttgttttgttttgttttgttttagagatgggctcttgctatgttgcctatactggtcttgaactgctggcctcaggcagtcttcctcccttggccacccaaagagatgggattacaagcatgagccactgtgcacagctgagatttttcgacttagtctttttgtacacccagtatcttatagaatatccataatatagattcataaataaaccatttccttcaatggtataaataaataaaccactgctataaatggtggaattttctgagttaagagcaatacatatgatacaaaacttgatatatagagtttcttagccaaactggaggggctggctttaggtgatccgtggactccctgaaattggggacaccattggaaatatgtgtgaactcatgggcagtttcctatgatttccagtcctcaaaatatctcttggactcaaagatgccttagggcagaggacgcgtgtacccccagtacagaatctcggacagtgaatgtcagtagacactcggcagaaaacctctgccaaattgagtgctctgatgtgactttttcatcaagtcaatgttcctgggatctcttgtacatgataatctcactcttgtaaggtttcatcgtttctgcttaccctacttttctttcccatcctgatccctctcccaccagactggactctgaaacgggcatgtacagagaagaggagaccccaacacgcttcaagctttgagtggagaggacacagcctctgctgggacagggaacagagggatgcggagaccctgaagatgcttttggacagtggtctgagg

SEQ ID NO: 38384 - DNA, 2300 bp, Homo sapien
atcgcttgtgaccaagagttcaagaccagtctgggcaacagagcaagatgctatatctactacaggcatgcacctgtagtctcagctacttgggaggctgagagaagaggattgcttgagcccaggaggcaacagagagctgattgtaccactgcaccccagccgaggcaacagagagctgattgtaccactgcaccccagccaaggcaacagagaccttgtctctaaaaaacaaaaacaggccgggtgcagtgtcttatgcctgtattcccagcactttgagaggcagaggcgggtggatcatttgaagtcaggtgttcaagaccagcctggcaaacatgacgaaaccctaaaatacaaaaattagccgggagtggtggtgggtgcctgtaatctcagctactcgggaggctgaggcaggagaatcgcttgaacctgggaggcagaggttgcagtgagccgagatggagccactgcactgcagcctgggtgacaagagcgaaactctgtctcaaaatattaggaaaaaaaaagagagagagcctcttttccatctccccgccacagagttgtcttcagtaatttcattcccttttttcctgaggattcactgggtttctgggtcccagaggggaagttctcttcaaggtacagaaaccacgactccgcagagaaccgcagagaaccgcagagatggcagcatgaccagaccacggacaggtgtgtagaagctgctgggctgaaacttgggctgaacttccgctgcaggttgacttattcccatcagcaccaaagccgctggagggggtcatccactagcaaatgaagtgggggcacggattggaggctgtttcagaaggtcccactgagccacggactcaaggcctggccacagccctcccaagcgaggcccagatcatatttcaccacgctcagaaaaccttgccagctcatttcagtccacagtgactttgctttctttaggatctctcttgcactgtccaactcagagaatttcaaatctgaatggattccaatgatggagctaaatcaggcctcacctcagttttttaattacaatcaatagggctgggtcccagcatctgtgtcttaatgttcctccatgtgatcctcatgctgaaaggctggtatttgaaaatccctttttttggggagtgaagggtttttttagagacaggcctcactctgatgcccagcctggaatgcagtggtggatcacagctcactgcagcctcgaactcctggccgcaagaaatcctcccaccttagccaaccaaagtgttgggattgcaggagtgaccactgtgtccagccaggaaagcccttctgtttcacttgaatgatatttctgccgcagacctacagccattgttgtattaaacggcatcattgcaggaaaagaaaaggtgagaggtgactgttttgcttttttctgaacatatcagaccaaacctgggctgtctggcactttttttttttttttttttgagtcggagtctcactctgtcgcccaggctggagtgtagtgtcgtgatctcggctcactggaacctccaccttcccggttcaagtgattctcctgcctcagccccacaagtagctgggattacagaagtgcactcccacgcccagctcattgtttctgtatttttacagaaaaacagacaggtttcaccatgttggccaggctgatctcaacctcctcacctctggttatctgtcggcatcagcttccaaaagtgctgggattacaagtgtgagccgccgcacctggtttgcccattttttgacaatgtatcaacatcatctaagatgggcactgcctcagtgtagtgtgtctagacaaggtggccggaacagagaggaatatgcataccaggcttaaagacgggttaaatcagagcttttcattccacaaaagagcaattttaatgaggtcagaacatggatgttctaatatttgaaagcctgttaaccaggagagagagtaaagtgatttgttgtaggaggacacacccagctctgacggtttaaagcgtcatgaatgcaaatttgaactccagaaaagcagagcttcctaacaatgggacttccacagcaatgggatttccttccgcattcagtttgtgcctttcccatgagcgagagactcctaggagagccgcagcccgttaggaagccatgtgggaactcatccacaggttctttttgttttttttgttttttttttttttttgagatgtagttttgctcttgttgcccaggctggagtgcaatgg

SEQ ID NO: 38385 - DNA, 2300 bp, Homo sapien
cataaggaatttcaaaggaatattaagaaggtacagtaaattaatcctggttttcaagagtattggttaatgcacgtgagcaaaagatttactaaagatgtttattcttcagttgattctcttcccataatttattgagaaatgctttatttgcatttctcattaaagacttaacttcaggatgatttacttttttctttttatcacataatgtttattaggactgggaaacatagtgagactctgtctctatgaaaaattaaaaaaaaaattgactgggcatggtggcatgcacctgtagttccagctacttgggaggctgaagtgggaggatcacctgagcccaggaacttgagactgcagtgagctatgattgcgtcactacacttcagactgtgagacagagtaagaccctgtctggaaaaatatatatacatatatatacattttttttattttttatttttatctttttttgagatggagtctcactttggcgccctggctgcagtgcagtggcgcgatctcagttcactgcaacctccacctgccaagttcaagcgattctcctgcttcagccttctgagtagctaccattacaggcgcgcgccaccacgcccggctaatttttgtattttcagtggagacggggttccaccatgttgtccaggctggccaggctggtcttgaattcctgccctcaggtgatccgcccacctcggcctctcaaagtgctgggattacaggcgtgagccaccatgcctgaccttatgtacttatatttttatgagaatatttctcttggttttctgataaatgagttactggaacccttatgaatttgaatgcaaatgaaacagctaaatgttatataattgttgtgtttaaaaagcagattataaaactgtctgtattatatgattacagttttataaaaacaaaacaggcctaaatgtgtatagtataaagactgaagagtcagcacttccatgttctcagcggttatccttggatgtgagatctcatgcactttttgctctcttctttgtgcctttccattttgcatgcgtatttcttataatctaaaaagttacttaaacatatgcagctaaaaactttttttacttgtaaagcgtttggtgctaattttaacttttttttttagacggagtcttctcactctgtcgcccaggctggagtgcagtggtgtgatcttggctcactgcaacctccgcctcctgggttcaagtgattctcctacctcagcctcccaagtagctgggattataggtgtgtgtcaccacacccagctaatttttgtatttttagtagagatggggtttcaccatgttggccaggctggtcttgcacccctgacctcaagtgatctgcccacctcagcctcccaaagtgctgggattacaggcgtgagccaccacgcctggcttttttttttaaagcttttttgtaagtcagccagcaagaacacaggaggaagtactcaaatctcccttacacagctgggggctgtgtcaggttttataagcatagggtaatgaggtgtgatttgattggatcttgcaataaagtaatgctgggaggtgtgatctgactggatcctgccatggggtgacaccaaaactcaatctgattggatcctggctcctgcctgggggtgtctggttcttaaatcggtccgagctcttcaggctgagctcttaggttccactccacggtggcacgcgtggttaacctgggcatgcacagggtacatgaccttcaacctgcaggtcgatggcaattggaaaacaactgacaacttcattacataaaagttgaactgattcgggtgcggtgactcacgcctgtaatcccagcactttgggaggccaaggcaggtggatcacctgaggtcgaggagttcaagaccagcctggccaaaatggtgaaaccccgtctctactaaaaatataaatattagccaggcgtggtggcgcacccttgtaatcccagctaccccagaggctgaggcagcagaatgcttgaacctaggacgtggaggttgcagtgagctgagatcgtgccattgcactccagcctgggtgacaagagtgaaactccatcaaaaaaaaaaaaagttgaactagatttggtctgatgcagttacagatttacaaaccgcgtcccaccctcctgccaacaccttccactcctcattcttgagggattagggatggaggtcatgcttctgtatcgacttcatgctgaccaggggcacttagtcccctaaagtgagagga

SEQ ID NO: 38386 - DNA, 2300 bp, Homo sapien
gcagccccaggaagagcggagcccccagcggagcacctcagggtaccccctccaggaggtggtggatgatgaagtgtcgggaccatcaggtgaggggactggaggaagaagaggtggcataggattgactaagatgaaggaagggggccaggcgtggtggctcacccctgtaaccccaacactttgggaggctgaggcgggcagatcacctgaggtcaggagttcaagaccagcctggccaacatggtgaaaccccatctctactaaaagtacaaaaattagccaggcggtagtggtgtgtgcctataatcccagctacttgggaggctaagacaggagaatcacttgagcctgggaggaagaggttgcagtgagccgagatcgtgctactgcactccagtctgggtgacagagtgagatgctatctcaaaaaaaaaaaaaaaaaaaaaaaaaaaaaaaaaagaagaaaaaaaagaagggtcagaggtcaggaaggagaacctggggagggtgtgtgggaagaatggagaaattcaggctgggtgcagtggctcacacttgtaatcccagcactttgggaagccaaggcaggcggatcacttgaggccaggagtttgagaccagcctggccaacatggtgaaaccctgtctctattaaaagtacaaaatggagctgggcattatggcaggcacctgtaatcccagctacctgagaggctgaggcaggagaataactggaatccgggagatgcatgttgcagtgagctgagattgcaccactacactccagcctgggtgacaaagcaagattctgtctcgaaacaaaaaaaaaaaaaaaaaaagagggactcagagagccagggaccagggaaggatatgaggcagtgttctgaggacagagagagggaagaatggggaggggaaggagtggcacatggggttgagcagaggagaaagtcagaaaggtggcttggagaagccagcagtctgcgaggctggggaggatggagagtggtttggggtttggggtcggggtctaacgtgatcagttgcagaagcattacacggtggcctggtttctttactcagcccctggggtagatcccagccccccacgtaggtcccttggctggaaaaggaagagggaatgtttggatgaatctgatgatgagccagagaaggagctcgcccctgagcctgaggagacctgggtggcggagacgctgtgtggcctcaagatgaaggcgaagcgacggcgagtgtcgctcgtgctccctgagtactacgaggccttcaacaggctgcttggtaggaggacaccccagagagcacctccaatcctgttctttctaaagaggaaacttccaataaccacacttttccaatgggaaaaatatgccccagtgggtgagctctccatgcgggaggactctgaagtgatcactcatgagggacacttaaggagacaacagaggattaggtagacttgataaaggtcggtgcttgggataagaaagcttggttttgggccaggcgctgtggctcccgcctgagatcccagcacgttgggaggctgaggcaagaggattgcttgaactcaggactttgaggctgcagtgagctatgactgcaccactgcactccagcctgggtgacagagcaaaactctgcgtcaaaagaaaaaccaaggctgggcacagtagctcatccctgtagttccagctactcgggaggctgagacaggagaactgcttaaacccaggaggcagaggttgcagtgagccaagatcaggccaatgcattccagcctggcccacagagcaagactctgtctcaaaataaattaataaataaataaaaataaaaatcaaataaagaaaaacaaaatcaaaaatcaaaaaagtggtttcagctgtgccctctgaaacttaatgtttcttactgacttttctaaacctaagtgtctccatccatagtgagggatcccaaggccatggtcacaccctgatgtgtgactgtctcatgaggaaatgatgggaattcctttatgactctgcagtggtccctccgtgtctgctggagggggtcctggctgattcccagctctacatcctgtagattctcacacccagggcctccttcggcctcttctcaggggagtctcagagcaggagcctctctcccttgcccagtgaaagtcattctcccctctctcatccacctcacccgcggccacaatcctgagactttcccccgggaggcacacttctcctcgctgccctgctgctctcacggaaacc

SEQ ID NO: 38387 - DNA, 2300 bp, Homo sapien
cgggtggttcatctgaggtcaggagttcaagaccagcttggtcaacatggtgaaaccccatctctacaaaaatacagaaattagtcatacgtggtggtgggtgcctgtaatcccagctactcgggaggctgaggtgggggaatcgcttgaacccgggaggcggaggttgcagtgagcccagtgcactccagcctggatgacagagcgagactccgtctcaaaaaaaaaaaaaaaaaaaaaatcagatgacccgctgtggagctgactctgttcccaaaccaggattttcatcaagctaaaaatctaggctgggctgggtggctccaacctgtaaccccagcactttgggaggccgaggtgggcagactgtttgagcttgggagttcaagaccatcctggacgacagggtgaaacatcgtctctaccaaaaatacaaaaaattagacacccgtggtggcgtgcgccaatagtcccagatacttgggaggctgagatcagagaatcgctcgaacccgggaggcggaggttgcagtgagccgagatcatgccactgtactctagcctgggtgacagagtgagactctgtttccaaaaaaaaaaaaaaaaaaatagggcttaaatcgggagagtgacatgatctgatttacacttgcaaaaagatcagtgtcatgaatactcggtgttggcagagatttgaaacaaagtattctctcatatgtgctggtgggaatgcaaggtgtacaaacaccaaggaaaccccagcaccagcaatggactcacccacaccccatgacccagcagctccgctcctggtgactgttctagagaggtgtgtgtgcaggaacgttcatcacaatgttcacagtggtgctggaaggacccaagtgtccaccagcaggagaaatgaacaaatgcactgcggcatattctttttttttctttttctttcttttgagacagagtctcactctgtcacccaggctggagtgcgatggcgcgatctcggctcactgcaacctccgcctcctggattcaagcgattctctcacctcagcctcccgagtagctgagactacaggtgcgtgccaccacacccagctatttttttttttttttgagacggagtctcactcttgtagcccaggctacagtgcaaatggtatgatcttggctcactgcaagtgccgcctcctgggttcacgccattctcctgcctcagcctcctgagtagctgggaatacaggtgcccgcaaccatgcctggctactttttgtatttttagcagagatggggtgttagccaggatggtctcgatctcctgatctcgtgatccaccctccttggcctcccaaagtgctgggattacaggcatgagccatggcacctggccccgtctaattttttgtatttttagtagagatgcggtttcaccatgttggccaggctgctcttaaactcctgacctcaagcgatccacctgctatggcctcccaaagcgctgggattacaggcgtgagccactgtgcctggccggaacccacaggttctttggatggtctctgaatgtcatgaaactcttttatatttaattaaaaaaatttttttgacacaaggtcttgctgtgttgcccagactggagtgcggtgtcacgatcacagctcactgcagcccctaactcctaggctcaagcaatcctcctgccacctcagtctctcaagttgttggaacacaggtgccagccacgacacctggctaattttgttttgttttgttttgttttgttttagagatgggctcttgctatgttgcctatactggtcttgaactgctggcctcaggcagtcttcctcccttggccacccaaagagatgggattacaagcatgagccactgtgcacagctgagatttttcgacttagtctttttgtacacccagtatcttatagaatatccataatatagattcataaataaaccatttccttcaatggtataaataaataaaccactgctataaatggtggaattttctgagttaagagcaatacatatgatacaaaacttgatatatagagtttcttagccaaactggaggtgctggctttaggtgatccgtggactccctgaaattggggacaccattggaaatatgtgtgaactcatgggcagtttcctatgatttccagtcctcaaaatatctcttggactcaaagatgccttagggcagaggacgcgtgtacccccagtacagaatctcggacagtgaatgtcagtagacactcggcagaaaacctctgcca

SEQ ID NO: 38388 - DNA, 2300 bp, Homo sapien
ctggagtacagtggcaagcctcatagctcactgcagcctcaacctcccaggctcaagtaatccccccaaggagctgggactacaggcatgcaccaccatgcctggcttttttttttttttttttttagaggtggagtctcactatgttgcccaggctggtctcaaactcctgttctcaagcgatcctcctgcctcagcctcccaaagtgctgaggttacaggcgtgagccactgcacctggctaggaaactgagttttttcagtggtagaggctcctagccagtggccaagggaaagagagagttctgggttcaggggctggcaggaagttagcaagacaccagggactcagctacactggctggatctcagagaagagcaactgccacagtggggacctggagcacaaggggaaactggggcagcagctgcaccacagggttggcggtacctgataagggaagaggatgacttccataagtaggcccacaggtgcccagggctccccatacccactgggtgccaggtctaaaaccatgagaccagtaccagcaccaaccactcaaggagctgagacggctgacccactctctgccctggctaggactggccccagcacccccagtggggaggcctcaatgatcccagctgccaggggcccaggaacactagcaacagaagaatggccaaagtgacagggaacccttgagaccctagagcagcaatgcctgggccgggcctgatccttcccaccagcccccagccattcctggccttctgccatgcttcctggttggtctgcaaagtgcctggggcaaataccttctgggagaagagtagagagggtatccaggctccatgggcctcaggattcctgaagtaggaggctctgatggggccaccctgctctggacagaaattccctagcctcagggacatgttgaatcttgtcacccagaggaaccaagtggctgggtggtagcccagtgcagtggctcatgcctgtaacctcaacactttgggaggccaagacaggcagatcacgaggtcaagagattgagaccatcctggctaatatggtgaaaccccgtctctactaaaaatacaaaaattagctgggtgtggtggtggcaggcacctgtaatcccagctactcgggaggctgaggcaggagaatcgcttgaacctgggaggcacaggttgcagtgagctgagatagcgccactgcactccagcccgggcaacagagtgagactccatctgaaaaaaaagaaaaagaaaaaaaaaagaaagaggctggacagcaaaataaaatggttccccagttcagcctttggaggtaccaaccgtctgttagcagagctctaagaccaaatgggctcccactccaggaacgtcccccttcccacaggggctggggagatggagtccggggctgtgctgccctctggagcagcaggtggaggccaaggcagcctcactgttctccggggccctgggaagccatgcagagaggcagaggtcctttatgtgccagatgaggctgctgtcaagggactgcaaatctgcttgaggtgtgacatatctgtttttagaacaagaacatcacatcaggaggagccggtggccagagcttggggaaaggggggatccaggtccaattcccatgtatctagggcacatgtgcacagcactgagggccactccagcccctccccagctctcagaggaccctgctcccacctgccttttgctctgctatcgggcagatggcattgtctctgctttgcaactgatgaaataggaactctggcttctgggctaggctgagagggtgcttgctgctgccattcctggcccaggtgagacattcggtcatgagcatctgtagctcttgcctgagcctctgagcctgccagggcagagcagaagcaaatgcatgaaggcccctcccccaggggctgctcttagccagtgactgatgaaaatgggtgtgtaaacagcttagccacatgaccccacacaggtgggacaaccatgggtttccacattctgtactgcctcccagaggtccccaccaggtttaagctcaattgcccacactggtaactggtaacttccttgatagcactcatttcttttttcattcttttggtgtttttttagatggagttttgctcttgtcgcccaagctggagtgcagtggtgtgatctcagctcactgcaacctccgcctcccagattcaagcaattctcctgcctcaccctcctgggattacaggcatgtgccaccacacctg

SEQ ID NO: 38389 - DNA, 2300 bp, Homo sapien
tgacaatgggaacacagcggagaacagacaaaaatcactgcctttgtggagttgagattgtgtaggggagagacagataagctttaaaaaaaaaatgctgaggctggaggatcacttgaggctgggagttcgagactagcctgaacaacatagtgagacacccctctctacaaaaagtaaaaaaaaaggccgggtgtggtggctcacgcctgtaatcccagcaatttgggaggccgaggcgggcggatcatgaggtcaggagatcgagaccatcctggctaacacagtgaaaccctgtctctattaaaaatacaaaaaaattagccgggtgtggtggcgggcacctgtagtcccagctactcgagaggctgaggcaggagaatggcgtgaacctcggagggggaggttgcagtgagccgagatcgtgccactgcacttcagcctgggtgatggagcaagattccgactcaaaaaaaaaaaaaaaaaaaaaaaaggccaggcatggtggcttatgcctgtaatcccagcagtttgggaggccgaagtgggtggatcacctgaggtcaggagttcaagaccagcctaggcaacattgcgaaaaatacaaatattagccagccgtggtggccagcacctgtaatcccagctagctgggaggccaaggcacgagaatcgctgaaccaagggggaggaggttgcagtaagccaagatcgcgccatggcactctagcctgggcgacagagcaagactccatctcgggggggaaaaaagaaagttaaaaaaaaaaaaaaattagccaggcataactgtagtcccaactgctggggaagctggggtgggaggatcttttaagcccaggagttcgaggctgtagtgagctatgattgcgcccctgcactccatcctggccaacagagcaagaccctgtctctaaaaaataaataaataaaagaaaaagagtaaaagaaaataaagtgggagggggatatgcatgctctaagatctatctaccacagattacaggcttttcacccttttgtggaaatgacaaaacctagtatgttcctacctaacagaggagggctgagggaaggtgagggagcacaactgcaattttcccctgaaaaagagttctcagcctgccctggcagatagatctcacccatcgcgtccccagattactctgccaaaggtggaagcaccaatcactttaacccagaacatttcaaaaccagacagccatgaaggaggaacctctgtggtccgggcgcgtgggccctggggttggaagtgcctcagacgcactttacattttccccgaattcacccttcgcagtccccatcaccccctctccagtgggataaatggccacctcattagctctgcacacatgaccctcccgacctgactcctggtgactatgcctgccttatctcttttctctcctccctcacattttccgctgcaacaaagccaaacacagcaccgtgggggctttcacgcttctgtgccctaggacacgctgttcctgcagcttggaaggcctctgtcctccatccgcgcgccctcactctcttgctaggaactcccattcatccttcaaaacccagcctgagtgtcccctcccccgggtcaccccctttgacctgtcaatcccctccctccgggtccccagcaagcttttcggtttggcttctccgcactctcatgaccgattgccctacatcttggcgctcccagactcgggccttctccagcaccggagtcgtctggtttgctcgctttacactccaagcacctagtaccgagcctgactgggtgccagagggcgcgcctaggctcaggctggctccacccgccccgtgcctcccctcggccttccccttagtcctgagggtgcccgcgctcctgcatttcccgtgcaccgggctgccggtagctccggccgcccagcccccgcggcagcaacagcagcaacagcagcagcagcagcagcaccgggggagcccccccaggcggactacaagtcccggcaggccgcgcgcgggccgcgcatgcgcagcggggaccggcgtttgagtggcaagttgtttgttacagcgaacaccagctgctccccccgcgccgggcgccgcgcgccgctgctccgccgctcggcccctcggctgctgctctgccggcgctgcctccctcgccccgcggctcccccttgcaacttggcgggcctcctcccttttgtccggcccggcccggccgccgccgccccccgcgcccggcgccgagctcccgggtctccgg

SEQ ID NO: 38390 - DNA, 2300 bp, Homo sapien
gagaaaccagcccagttgcatccgttctgggccagtgggattctgggtgtccaaggtccctgtgggccatctacggtgctaaattgaaactttttgaaaagcattttttttttgagatggagtctggctctgtcacccaggctggagtggagtggtgagatcttggctcactgcaaactctgcctcccgggttcacgccattctcctgcctcagcctcccgagtagctgggactacaggcacctgccaccacgcctggctaatttttttgtatttttagtagagacagagtttcactgtgtgagccaggatggtctcgatctcctgaccttgtgatctacccgcctcagcttcccgaagtgctaggattacaggcatgagccaccgcacctggcctgaaaaaaattcttgagacagggtctcactgtgtcacccaagctggagtgcagtgatgcaatctcagctcactccagcctcgatttctcaggctccagcaatcctccctgcctcagccccactgagtagctgggactgcaagcactcgccactacacccagataatttttgttttttttgtagagatggggtctcgctatgttgcccaggctggtctcgaactcccgggcccaagtaatcctcctgcctcagccttccaaagtgctgggattacaggtgtgagctacagcgcctggcctaaatggaaaactggtgtctaggtgccatattctcaggcttgccctcaccataacacattgaacatactccaacctctgagctagatctctgcatctctgcttaaaagcctgaggttttgcttgcacaccccaatttttttttttttttttggagacagggtcttgctgtcacccaggctggagtgcaatggtgcgatcttggctcattgcaacttccatctcctgggttcaagcaattctggtccctcagcctcccgagtagctgggattacaggtgcacgccaccacgcctggctaatttttgcatttttagtagagacggggtttcatcatgttgcccaggctggtcttgaactcctgacctcaagtgatccaccagcctcggcctcccagagtgctgggataacaggcatgagccaccgcgcctggccatgcacccacatttacagcaaccttattcactaaggcctaaagatggaagtgacccaggtgtctactgatggatgaacagatcaacaaagtgggatgtattcacacaaaggaatattattcaggggggaaaaggaaggaaattctgacacatgctacaacatgaatgaaccttgaagacatcatgctgagtgaaataaactagtcacaaaagaacaaatactgcatgagatcccacttgtatgaaatacctggtgtagccggagtcatagagacagaaagaatggtggttgccaagagctggggagttggtgtttagtgggtatggagttcctgttgggtaagatgaagagttctagagatggatggtggcaattgctgtccgtattgaaaatgtgcttaacacgattgaattgcacacttaaagatagttaagatggtaggttttgttgtgtgtattttaccacaattaataaaatttgaggccaggtgtggtggctcatgcctgtaatcccagcactttgggaggctgaggtgagtagattggttgagctcacaagtcggagaccagcctgggcaacatggtgaaacctcatctctacaaaatatacaaaatgtagctgggcttagtggcgtgcacctgtggtcttagctactcaggaggctgaggtggaaggatcgcttgaccccgggaggtagaggctgcagtgagccgagattgtgccactgtactccagccaggcagtagagccagaccttgtctcaaaaaaataaaaataaaaattaatgtttaagattttattttattttagattcaagaggtacatgtggatgtttgttacatggatatatggcatactggtagggactgggcctctagtacgcccattacccaaatagtgaacattgtacccgataagtaatttttttaaccttcctccccttcccaacctcccctctattggaatccccagtgtctgatgttcccatattttttttttttttgagacggagtcttactctattgcccaggctggagtgcagtgcaatctcggctcagtacagcctctgccacctgggttcaagtgatcctcctgcctcagcctcccgagtagctgggactacaggcatgtgccaccacacccagctaatttttgtattttttagtagagatggg

SEQ ID NO: 38391 - DNA, 2300 bp, Homo sapien
ctcaagtgctcctgttttcacagcccatcttgtgtttccatgctgcgtttgtggggcgttttctctttccatcctcaattctggcgctgattcttttcaggatacattctaaccttggaaagaagatgccaataaaaccagtgtaggggaagggcagccaatgagaggcagcaatggatgttaaatttacaattgtggtttgtctttttggctgtggttctttagataagcatgtgatttctgttcttcatgactaagaattgaatttagactttacagagttactggtttgtaaatctttgagttgtttaaattttaatgttagagttttactgtttgatcagcacattttttttctcttttgtctataggcccgaaatgtttgagacggcgattaaggagagcacctcctctaagagccctcccagtgagtgtattttctgtattttcattgctatagaacacacgctcttaggcatgcattgtgcagctgtggtttacaaacattgtttaaagaatagccattgaggccaggcatggtggttcacgcctgtaatcccagcactttgggaggctgaggtgggtggatcacctgaggtcaggagtttgagaccagcctggccaacacggcaaaaccctgtctctactaaaaatataaaaaattagccaggcgtggtggcaggcgcctataatcccagctactcaggaggctgagacagcagaatcacttgaacccgggaggcggaagttgcagtgagccgagatcgcaccactgcactccagcctggacaacagagcaagactcatctcaaaaagaaaaaagaaaacccattcaaagttgtagttcaggctatttcacaatttttagttatttaataattgggtggctctgtgagtgtgtgatgatctcctaagtacccccaggaagagaaaaacagtgaaaggcagcccttcagggggcatcatgtcttcttgaaatgatctaccatggaaagaaagaaccttgaacaggactgagataaaacagtctcagacagcatgattattagagatgttgaccgtgttttctacaaattctgattttaaatgtatattttcaggaaaaataaattcatcacccaatgttaatactactgcatcaggtgttgaagaccttaacatcattcaggtgacaattccaggtatgatttctctgcttccatcagagtttttgggggtctcttcagggcctcttggactttcccaactagagaggtttgctcagctcatccggggactcggatacattacacgttgcctggtgctcctcccagactcctacagcagttgccttccaaatacagttgctctccaaacagcaacggcaagttttggcacttggcatgagctaaatcctgttaaccacccaaatgtctagtctgttccttaaaaaaagtctatatgagaccgggcacggtggctcacgcctgtaatcccagcactttgggaggctgaggcaggaggatcgcttgaggtcaggaattcaaaaccagcctagccaacgtggtgaaaccctgactctactaaacatacaagaaaaattagccaggcctggttgtgtgtggctgtaatcccagctacttgggaggctgaggcaggagaagtgcttgaacccgggaggtggaggtcgcagtgagccgagatggggccagtgcactccagccttggtgacagagccatactccatctgggaaaaaaaaaaaatctatataaaacagcaggtaaaggtctttataacaagaataaatttgtagcatttttagttaggcattattttaaacaatttcaaatttaattagctcaaagtgctcaaatacttaaatcattaaaaaatggaaaatgcttgaaaacattacacagagctcctaaaaattgggattaaaagtgcatcattgagcagcggcttgtacctgtagtctcggctacttgggaggcttaggcaggaggatcgcttgagcccaagagttcaaggccagtctgggcaacatcgtgagataccatctctttaccataaaaaaaaaaaaagtagtatttaagttttgggttttctctgaactgtttcagatgatgataatgaaagactctcgaaagttgaaaaagctagacagctaagagaacaagtgaatgacctctttagtcggaaatttggtaagttttgcatttgcaaagtacagttgctataagcaaagagatttgttttaataagatcttttcagcagatgatggttagatggttgtaatcctatataaaaggagttaaa

SEQ ID NO: 38392 - DNA, 2300 bp, Homo sapien
aacaggactgagataaaacagtctcagacagcatgattattagagatgttgaccgtgttttctacaaattctgattttaaatgtatattttcaggaaaaataaattcatcacccaatgttaatactactgcatcaggtgttgaagaccttaacatcattcaggtgacaattccaggtatgatttctctgcttccatcagagtttttgggggtctcttcagggcctcttggactttcccaactagagaggtttgctcagctcatccggggactcggatacattacacgttgcctggtgctcctcccagactcctacagcagttgccttccaaatacagttgctctccaaacagcaacggcaagttttggcacttggcatgagctaaatcctgttaaccacccaaatgtctagtctgttccttaaaaaaagtctatatgagaccgggcacggtggctcacgcctgtaatcccagcactttgggaggctgaggcaggaggatcgcttgaggtcaggaattcaaaaccagcctagccaacgtggtgaaaccctgactctactaaacatacaagaaaaattagccaggcctggttgtgtgtggctgtaatcccagctacttgggaggctgaggcaggagaagtgcttgaacccgggaggtggaggtcgcagtgagccgagatggggccagtgcactccagccttggtgacagagccatactccatctgggaaaaaaaaaaaatctatataaaacagcaggtaaaggtctttataacaagaataaatttgtagcatttttagttaggcattattttaaacaatttcaaatttaattagctcaaagtgctcaaatacttaaatcattaaaaaatggaaaatgcttgaaaacattacacagagctcctaaaaattgggattaaaagtgcatcattgagcagcggcttgtacctgtagtctcggctacttgggaggcttaggcaggaggatcgcttgagcccaagagttcaaggccagtctgggcaacatcgtgagataccatctctttaccataaaaaaaaaaaaagtagtatttaagttttgggttttctctgaactgtttcagatgatgataatgaaagactctcgaaagttgaaaaagctagacagctaagagaacaagtgaatgacctctttagtcggaaatttggtaagttttgcatttgcaaagtacagttgctataagcaaagagatttgttttaataagatcttttcagcagatgatggttagatggttgtaatcctatataaaaggagttaaaatttaaaagtgagttgtttgtgctaaatttatttaataagataccattagtgttacactattgattgtcagtatgaaagttaatgaatttaaggttcaccatctggcagtgtggctcacacttgtaatcccagcattttgggagcccgaggcaggtggatcagttgaggccaggagttcgagaccagcctggccaacatagtgaaaccctgtctctactaaaaaattcaaaaaattagccgggtatggtggtgcacacctgtaatcccagctactcaggaggctgtggcacgagaattgcttgaacctgggaggcagagattgcagtgagctgagatcaagccaccacactccaacctgggtgacagagcaagactctgtctcaaaaaaaaaaaaaaatttaaggttcatatttaaatttgtttgaagtgtacaaagaccttagttaacagcagagacagtctttaaaataaatgttgatcttgtgcttttgacaggctgtttaaggcggtgggttaatctgtgctgttgtgctgtttgtctcactgtccctgtaggtgaagctattggtatgggttttcctgtgaaagttccctacaggaaaatcacaattaaccctggctgtgtggtggttgatggcatgcccccgggggtgtccttcaaagcccccagctacctggaaatcagctccatgagaaggatcttagactctgccgagtttatcaaattcacggtcattaggtaagtgagagtttcctgcttagtcacaggagcgaatctggagctcatgaggctgactcttctaaaatgcagccacaggtagtcatcgaatccggcttcctatgctgtgcaatcaacaaatcaaaataacttgtgtcatcattagaatgtcagatgtgcttctacgaactaagctgactcttttaattctttggcaaagggttggcaaactaggactgtttgccaaattcaggctgcctcctatttttagagtcttcctgaaacac

SEQ ID NO: 38393 - DNA, 2300 bp, Homo sapien
agagaacaagtgaatgacctctttagtcggaaatttggtaagttttgcatttgcaaagtacagttgctataagcaaagagatttgttttaataagatcttttcagcagatgatggttagatggttgtaatcctatataaaaggagttaaaatttaaaagtgagttgtttgtgctaaatttatttaataagataccattagtgttacactattgattgtcagtatgaaagttaatgaatttaaggttcaccatctggcagtgtggctcacacttgtaatcccagcattttgggagcccgaggcaggtggatcagttgaggccaggagttcgagaccagcctggccaacatagtgaaaccctgtctctactaaaaaattcaaaaaattagccgggtatggtggtgcacacctgtaatcccagctactcaggaggctgtggcacgagaattgcttgaacctgggaggcagagattgcagtgagctgagatcaagccaccacactccaacctgggtgacagagcaagactctgtctcaaaaaaaaaaaaaaatttaaggttcatatttaaatttgtttgaagtgtacaaagaccttagttaacagcagagacagtctttaaaataaatgttgatcttgtgcttttgacaggctgtttaaggcggtgggttaatctgtgctgttgtgctgtttgtctcactgtccctgtaggtgaagctattggtatgggttttcctgtgaaagttccctacaggaaaatcacaattaaccctggctgtgtggtggttgatggcatgcccccgggggtgtccttcaaagcccccagctacctggaaatcagctccatgagaaggatcttagactctgccgagtttatcaaattcacggtcattaggtaagtgagagtttcctgcttagtcacaggagcgaatctggagctcatgaggctgactcttctaaaatgcagccacaggtagtcatcgaatccggcttcctatgctgtgcaatcaacaaatcaaaataacttgtgtcatcattagaatgtcagatgtgcttctacgaactaagctgactcttttaattctttggcaaagggttggcaaactaggactgtttgccaaattcaggctgcctcctatttttagagtcttcctgaaacacagctacacccgtattatccatggctgctttcctgtcacagtgagtaagtagctgggactgagaaggcatggcctccaaagtctaaaatatttactctctagcactttgtagaaaaaccttagctaggcacagtggctaacgcctgtaatcccagcattttgggaggccaaggcaggcagatcacctgaggtcaggagttccagaccagcctggccaacatggtgaaatcccatctctacaaaaataaaacagttagctgggcatgatggcgggtgcctgtaatcccagctactcgggaggctgaggcaggatagtcgcttgaacccaggaggtggaggttgcaatgagccaagatcatgccactgcactccagcctggacgacagagtgagactccatcacaagaaaaaaagaactttgtcaacctctgtcttagggcgccttgtcacaggcttcgggtcagacggattcaacctcgcatcagccatttgttagccaggtcactctgttctttgtctgtaaatgagattgatcgttgttcccactgagagtgtcagctccttcccatagagcaggcatgatgattgtactcacctctgacaccattgtgagtgccacattccttcccacgtccttgtcaccgtaagagatgcccacctgagcaccaaccccaggttatcttcccctttgtcttccagccccccagaaacagctacgactcaacctacccaatcatttcatcatcagattgccactgtctctagttcaggtctcttgggactggcactcagaaatctcataataaatcctcttgaggcttctcatacactcgtcttcttccaatcttctttccctcaaaatctcatattttggttccacttcacccacggtcattctccatatcactcccaggagttaggcaaaaagccccttccgttcttccgtatgttaaacttagaatcactctgttccctgctctgcgtttctattttttgtttttcctccatttactagtagcttaacactttctaacagtgttcttattattgatacgtatctatctcttccataagcttataaggtcatggataatacttctcattgtagtacgtaaatgacgtgggctagatatgagttgaataaac

SEQ ID NO: 38394 - DNA, 2300 bp, Homo sapien
aaaaaaaaaaaaaaaagggccaggcacagtggctcatgcctgtaatcccaacactttgggaggctgaggcgggtggatctcctgagctcaggagttcaagaccagcctggccaacagggtgataccccttctctactaaaaatacaaaattagccaggcgtggtggcgcacacctataatcccagctacttgggaagctgaggcaggagaatcgcttgaacctggaaggcagaggttgcagtgagccgagattgtgccactgcactccagcctgggcaacaagagcgaaacttcgcttcaaacaaataaattaacgcccagcatgtcttggctttcatctgccagacctcaaccctcacccccaggagatcaggtccggaccacgagctgaccctggactcaggcaagggtgagttggtgcagccctggcctgctgggaggcacaggctgcagcaggctgcctggggctgaggcccaccactcatgaactcatgaccttgaatgagctccaaaagctctgggcctcccaggctctagggggagtgggagagagaggcctcagcctgtccctgggcatgctgccccctcctcacctctttgtcccaaatccccttcctggcaaagctgacagtcttaatatcactctggagaaaactgagtcagccctaaggaacaattcaatgaaccatttgcttacttgaggattggaactcaagtctcactcaaagtctgtgccattttcgtcccagctgtcactggccctcatccacacacacccaaggatgagcatctaacgcttgcatgcacactcccatgcccgcgttcattcactcattcattcattcattcactcattcattgactcattcattcattcactcactcattcattcactcagtgaatgttgcagtcacgatccaaatatttatggcctctgtgtgccaggcactagctggaggggctggggctagagcccctgataacccggtcatgccctagctttcctgggacacacattgtggtaaggggagactaaaaaaattaagtcaggccaggcacggtggctcatgcctgaatcccagcactttgggaggccgaggcgagtgaattacctgaggtcaggagttcaagaccagcctggccaacatggagaaacccagtctctaattaaaaaaaaaaaaaaaattagccaggtgtggtggcacatgcctgtaatcccagctactcaggagactaacgcaagagaattgcttgaacccaggaggcagaggttgcggtgagccgagatcgcgccattgcactccagcctgggaaacaagagcgagactccatctcaaaaaaaaaaaaagtgggaggcagaggcaggaggatcactagaggccagtagtttgagaccatcctgggcaacatagcaggaccctgtctgtacaaaaaaattaaaaaaaatttaaccgggcatggtggcacacacccgtagtcccagctactccagaggctgaggcaggaggatcgctggagcccaggagttggaggctgcagtgaactgtgatcccaccactgcgcttaagcctggataacaaagcaagaccctgtctcaaataacaatagcaataataataaagaaaaattaaatgcaatttgcgatgcatcagtgataagtgctctgcagaaaaaggaggcaggaagaggctgagaaaggtatgaggtttgctatgcaatgtgaagttatcaaggaaggcttctcggaagaggtgacatttgagcagagaaatggaggagagttatggagggaagatggtgaatggggggaacatggtcaagaccaggaatatggtcaaggggggaaagatggtcaaggggacgcagcaaatgcaaaggccctgaggcaggagcagcttgattcacccccaaaacccgtggggcccgtgcaggcgacgggaaggacaagtgtaaacccttttccttgtccctgcaggtgtgtgtgaacatgagtctgcccatgtttacaccctgcaagcctgaagagtccccagaaactgaaagaagaagcaaagccctttctgtaccctccctgccccctgtcccgaccgcgacaaaagcgacttcctctttccagtgcatttaaggcgcagcctggaagtgccagggagcactggaggccacccagtcatgggggacaccttcatccgtcacatcgccctgctgggctttgagaagcgcttcgtacccagccagcactatgtgagtagctggtggagggcatcccgtggggggaatacgggagggacagcacggccac

SEQ ID NO: 38395 - DNA, 2300 bp, Homo sapien
tattggggttttttagagacaaggtctcactctgtcacccaggctggagtgcagtggcatgatcatagctcactgcagcctggaactcctgccctcaggtgattctcccaccttcacctcccgagtagctgggacagcactgccatgcccagataattttttttttttttttgtagagacagggtctcactatgtttcccaggctggccttgagcttctggcttcaagcgatcctcctgcctcagcctcccaaagtgctgggactataggcatgagccgctgtacatggcctacattttcttaaggtgcacttttatgtgtgtgtactctggaaataccttgattacctgcagcgtggccaggttctttaaatctaaaacactagcccctgtacactcgaacacacttatatgaatgagttttgtgtggatctgtggccgtcacccttgtcatttgagactcacagtaggtaaaaatcatatgcctttctgtgctcattcccatctctgttattacaaagttttcttgggaatcaaatgagaaaatatattaaaatgctcacacgtataatcccaggacttttggaggccaaggcaagaggattgcttgaggccaggagtttgagaccagcctgggcaacatagcaagaccccatctctacaaaaaatttaaaaattagctggacacagtggctcacacctgtagccccagctacttggcaggctaaagcaggaggatcacttaaacccaggagtttgagacagcagagaaccataattgcaatactacactccagcctgggtgacagaacaagaccctgtctctaaaaagaaaatgcaaacatattatcaaataattcctgtttaaactggacataacaagcacagctacatgctgaacctcatcaaaggtgtcttttgtttggctcatgtacttttgaaaataaggatgaggcctggcacagtggctcctataatcccagcactttgggaggccaaggcgggtggatcgcttgagcctggggtttcagaccagcctaggcaacaaggtaagactccagctctacaaaaaaagaaaaaaaaaaaaagaaaaagaaaaaaagaaaagaaagaaagaaagaaaagatagctcagtgtggtgcatgcctgtagtcccagcaactgggagctgaagtgggaggatcacctgagcccagggagttccaggctgcagtgagccattatcaccacaaaccaggcactctttcataaaagtcaatcttcaggttttctttagaaaacctgaagatctggctgggtgcagtggctcatgcctgtaatcccagcactttgggaggctgaggtgggcggatcacctgaggtcaggagttcgagaccagcctggacaacatggtgaaatctcatctctactaaaaatacaaaaattagctgggcgtggtggcaggcacctgtcataacagctactcaggaggctgaggcagaagaatcgcttgaacccaggaggcagaagttgcagtgagccgagattgcgccactgcactgcagcctgggtgacagagcaaaactccgtctcaacaacaacgacaacaaaaattcagtcttcaggttttctttagaaaacttgaagatctggccacagctggcgtcctggcagcggtttgctggagttgatggtcagccgtccctctgcagggtgggtcaccctcctgttaaccacgccctgccccgccccgcttcctccctctcgtgcgtcatcaagcatttgctgttgttttcctcatagtagtgataagagaaaagtgaaatatctttgtctccctgtctctgtcaaaagtgggaaaatgcaagatagaccaggagggccgtgtgtttcaagaaaagtgggagagagcatttttcttcgtggaagtacagaatattccaacatgtctcatatgcaaacaaagcatgtctgtgtccaaagaatataacctaagacgccactatcaaaccaatcacagcaagcattatgaccagtatacggaaagaatgcgtgacgagaagcttcacgagctgaaaaaagggctcaggaagtatctcttaggctcgtcagacaccgagtgtcccgagcaaaaacaagtgtttgcaaacccaagtccaacccagaaatcccccgtgcagcctgtagaggacctagctgggaacttatgggagaagttacgtgaaaaaatcaggtcttttgtggcatattctatcgcaatcgatgagatcaccgatataaataataccacccagttggccatattcatccgtggtgtcgat

SEQ ID NO: 38396 - DNA, 2300 bp, Homo sapien
aagatgggaattaaaaaaaaaaaaatacgctgggcatggtggcttgagcctgtaatcccagctacttgggaggctaaggtgggaggatcatttgagcccaggagtttgagaccagactgagcaacatagtaagaccctgtctctacaaaataaaataaaaataattttcaaaaatcctttgcagtgttttaaaaagctagataacaggctgggcacggtgactcacaccagctacttgggaggctgaggtgggtggatcacctgagatcaagagttcgagaccagcctggccaacatagtgaaactccgtctctactaaaaatacaaaaattagtcgggcatggtggcagacggctgtaatgccagctactcaggaggcagaggcaggagaattgcttgaacccaggaggcagaggttgcagtgagcccagtcgagaccctgtctcttaattaaaaacaaaaacaaaaacaaaaaaaactaggctgggctcagtggctcgcctgttatcctagcactttggcaggctaaggtgggtagatcgcctgagctcagccgttcgagaccagtctgggcaacatggtgaaacctcatctctactaaaatacaaaagaaattagctgggcatggtggtgtgtgcctgtagtcccagctactcgggaggctgaggcaggagaattgtttgaacccaggaggtggaggttgcagcgagccgagatcttgccattgcactccagcctgggtggcagagcgagactctgtttctacaaaacaaaaaacaaaaaacaaacaaaaaaaaactggtagaacgttaggttcacaccatccaaagacgtttgcatcttcttgtaggtaaagccttagggacaacagtgatggtgtctgttccctatgagaagatgctgcgagaccagtcggctgtggtagtgcaggggcttccggaaggcgttgcctttcaacaccctgagaattacgaccttgcaaccctgaaatggattttggagaacaaagcagggatttcattcatcataaataggtgacacactctgcacccccgccccttcagttcatttaaagatgaaaccaatagcctaattttaattcactcgtgcatcccgcctgctgcgtttcagagctgactgttcagatgtgtcatgcttttttcattggtccgtgctgggtaatggtgttgcttttcttgcagacccttcctaggaccagagagtcagctgggtaagtgacagcttctcaggtttggtggctcttctgagctgctgaaccacttcttcttcattaaaacttgaattgggggccgggcgtgatggctcacacctgtaatcccagcactttgggaggctgaggcaggtggatcacaaggtcaggagatcgcgaccatcctggctaacacagtgaagcccagtctgtactaaaaatacaaaaaaaaattagccgggcatggtggcgggtgcctatagtcccagctactcgggagtctgaggcaggagaatggcgtgaacccgggaggtggagcttgcagtgagcggagatcgcgccactgcactccagcctgggcgactgagcaagactccgtctcaaaaaaaaaacaaaacttgaatttgggtgaggggagggaacttagaggacaggccaataggtgcagcaagccatcgtggcacacatgtgcctaggaaacaaacctgcacattctgcagatgtatcccccccttttttttttttagaagaaataaagaatattttttaaaaaaagaaaaatacatttgtagctattaaaaaaaaattggccggacgcagtggctcacacctgtaatcccagcactttgggaggcagaggtgggcagatcacttgaggtcaggagttcgagaccagtctagtcaacatggtgaaaccccatccctactaaaaataccaaagttagccaggcatggtggcgggtgcctgtaatcccagttactcgggaggctgaggcaggagaatcacttgaacccgagatgtagagtttgcagtgagccaagattgtgccactgcactccagcctgggtgacaaaatgagactgtgcctcaaaaataaataaataaagaagaataaaagaagatgtcttgctgagactgcctaagtggagtaaggagacggcaggggtggggggtggcacagttcacaaggcacctgctgggtgtatgacatgcttcagttcttcttagccggggactaaacacagtggaaagtctgtttcgggagggttggtgagttcctgtcatcctctaactcacattaaaggacaa

SEQ ID NO: 38397 - DNA, 2300 bp, Homo sapien
cacctgccttgaacgtttatcacagcactattcacaatagcaaagatgtgcaaatcaagctaagcatccatcaccagatgacgggacaaagaaaatgtggtacgtacactatgggatactattcagccataaaaaagaatgaaatggccgggcatggtagtgcacgcctataatccaagcactttgggaggctgaggcgatggatcacttgagatcagtagttctagaccagcctggccaacatggcgaaacctcgtctctactaaaaatataaaagttagccgggggtggtggtgcatgcctgtaatcccagctactcaggtggctgaggcacaagaattgcttgaacccgggaggcagaggttgcagtgagccgagatcatgccattgcactccagcttaggcgacagagtaagactctctcaaaaaaaaaaaaaaaaaaaaaaaaagaatgaaatgatgtcttttgcagcaacatggatgggattgggggctattgtctttatcatttgacgtaaaaaggcaaatgcggcatgtcctaacttacaagaggggctaaataataggtacacatggacatagaatgtgaggctaggtgcagtggctcactcctataatcccagcactttggaaggccgaggtgggcagatcacttgaggccaggagttcgagaccagcctggtcaacatggtgaaaccctgtctctactaaaaatacaaaaatgagcctggtgtagtggcgggtgcctgtaatcccagttactagggaggctgaggcacgaaaatctcctgaacccaggaggcagagattactgtgagctgagattgcgccactgcactccagcctagacgacagagtgagactctgtctcaaaacaaacaaacaaaaacatggtcatagagtgtgaaataacagacactggagactcaggggtgggaggcaggaggtgggtaagggatgataaattacttcatgggtacaatgtacattatttgggtgatgagtacactaaaaccccagacttcaccaacaacaccgtatatccatgcaagaaaactatacttggcggggtgtggtggctcacgcctgtaatcccagcactttgggaggccgaggcgggcggatcacgaggtcaggagatcgagaccatcctggctaacgtggtgaaaccccatctctactaaaaaatacaaaaaaattagccgggcgtggtggcaggcacctgtagtcccagctactcaggaggctgaggcaggagaatggcgtgaacccgggaggcagaactcgcagtgagtggagaacatgccactgcactccagcctgggtgacacagcgagactctgtctcaaaaaaaaaagaagaaagaaataaaactatacttgtgccccttacattgatacaaaaaaaaaaaacctttctgtgttcaaattactatgtggtttctctcttctgactagactgatgaaaacaatcagttttaaaacttttggaggagcaattgattctggggctggtcttgaatgggttcaggggtatagtcttcctatacaattattgccacgtttcaactgtatagcaaatcaaatttctgttataaagataatttctggatgggtgcagtgcctcacatctgtaatcccaacactttgggaggctaagatgggaggatcacttgaggccaggagttagaggccagcctgggcaacatagtgagatcccatctctaaaaaaaatttaaaagttagccaggtgtgatggggcactcctggaggctgaggtgggaggaccgcttaagcccagaaatttgaggctgccgggaacttcgatcatcccactgcactccagcctgggcagcagagtgaaaccgtctctaaaaataataatttccttaaactactactatttctttatatgttgatttttttatagttcattaacctgtttatcataaatacaattttttcttgtttttctttaaaagatcttgttttatatttatccacttttttccccttttttctttcaataccagaaacaaagtacggaagtgtacagcacaaatgcttagaaactgacctaatgccaatcatccatttgcaggcgttgcagagggactgtgtgaggtgaaacctccctgccctgtgaacgggatgcaggtccactcgggcgaaacggaaatactcaggaaggcagtggaggactatttctgcttttgtcatggtaacgttcactttaagcattaattctattttttttttttttttttttttgagatggagtcttgctctgccacccaggct

SEQ ID NO: 38398 - DNA, 2300 bp, Homo sapien
atttgctctttttcaagattatttctgttattcagagtcccttggtgttccatatgaatttttttttttttttttttgagacagaatctctctctatcgcccaggctggagggcagtggagagatctcggctgaccacaacctctgcctcctcggttcaagccattctcctgcctcagcatcccgagtagctgggattacaggcacatgccaccatgcccagctaattttttttttttttgtattttgagatagggtttcaccatgttggccaggatggtcttgaattcctgacctcgtgatccaccctcctcagcctcccaaaagtgctgggattacagggtgagccaccgcgcccagccccatgtgaattttagagtggatttcttaatttgtacgagaaatgcacttgagattttgatggggattgcaataattctgtagatggcttttggtagtacaggtatcttagcaatattaagcctgccaatccatgaacatgagatgtctttccatttgtttgtgtcttctttaatttcttttctttcttttttttttttttttttttgagagacggagtcttgctctgttgcccaggctggagtgcagtggcttgatctcagatcactgcaacctctgcctcccaggttcaagcgattctactgcctcagcttcccaagtagctgggactacaggcatgcaccaccacacccagctaatttttgtatttttagtagagacagggcttcgccatgttgcccaggctgatcttgaacacctaacctcaagtgatctgcctgccttggcctcccaaagtgctgggattataggattataggcgtgagccaccacgcccagcctgtcttctttaatttttttcagcagtgttttattgttttagtatacagatttttcccttccttgattaggtctatccctaaggattttattctttttgatgctattgtaaatggaattgttttatttcctttgcagattgttcattgttactgtatagaaatgcagttgatttgctgtgttgatgtagtatcctgcaactttgctgaatatgttggagttcgaatagatttttgtgtggaatttttaggattttctacatacaaaatcatgtatcatctatgaacagagataattttacttctttctttcaaatttggaggcctttttttttcttacctaatttaattgctctggctaggacttccaaaactgtgttgaacagaagtggggagagagggcatctttgccatttcttttttttttttttctttgagatggagtcttgctctgttgcccaggctggagtgcactggcttgatctctgctcactgcaacctccggatcccaggttcaagtgattctcgtgcctcagcctcctgagtaactgggattacaggtgcgtgccaccacacctggctaatttttgtatttttttagtagaggtggggtttcaccacattggccagcatggtctcaaactcctgacctcaagtgatctgcctgcctccgcctcccaaagtgctgggattacaggggtgagccaccgcacctggcccatctttgctatttctgatcttagctatcagtctttcattgttgagtgatattagccatggactttttataaatggcctttattacattggtcatttcctaccacttctagttggtagagtgcttttatcatgaaaggatgttcaatcttgtcaaatgtttttctgtggcaattgagatgatcatgtggcttttgtcctttattctgtcaatgtggtatgttacattgattgatgtaaatatgttgaaccatccttgtatttgaggaataaattccacttggggccaggcacgcctgtaatcccagcattttgggaggccaaggcgggcagatcacttgaggttgggagttcgagaccagcctggtcaacatgggaaaaccccgtctctactaaaaatacaaaaattagccaggtgtgtggtagcaggagcctgtaatcccagctactcgggagggagaggcaggagaatcgctcgaacccgggaggcggaggttgcagtgagctctcacctgcctgtgatgaccaacagcatttgggatacccagtgtggcactcattccagtgagttttagtgacaccctcaccacacacagcttcccagtcacttccactaatactccagctggcttcccagcaagtcttatcgaagtcccagagaattccagaaggggccaggtgcagtggctcacatatgtaatcccagcactttgggtggctgaggtgg

SEQ ID NO: 38399 - DNA, 2300 bp, Homo sapien
gaccaaagatgagtttctgtgtactgctatggaatgacctcaactatctattatgtgaaaaagcaaggttcaaatctgtatatactgtctactaccttaaatgttagaaggtggcggttttcagatacactgatatgcatatcgtttaaaaaacaataaaggataatcaaaaaataaaaatggagaggaaggaaaaatgtagagtggaaagggatggaaactgaatttttgagtgtatcttgttttagtgtattttttttgaaacaacttattgtttcaaagattttacataatttaaaacagaactatttcaaaaaggaaaacacagaaatccctgtaactttcaaacatactgaacaaacgaacctcactgtatataaagttggtgtacccaaaggacaattaacattactttaaaacacgatatattgattacatgtccctagcattcacacagggatataaagacaaatgaatcacaattcttaaactgacttcagccgtcttaataatgacagtgttaacaatgacactgatactgctttttttaatagcatcccgctcttatttcagaataaaaaaatttttaaggtatgttgagtaagaatctatagagcaatgaaaatgcaagagcaatagctatgggcaccaaatggtcaatcttcttatcataatgttgagtggaagaagccaggtccaccagacacatgctgctcatttatgcaaagtttggacacaggcaaaacaaaactagtttgatcgtgatgggaaacattagagaaatgcaaagacatgaccatcataattgtcaggagaaggcattggttaggattgggaagcggcaagcagaagcatttagggattggctggcaatgttttacttctcggctgagtgagggttgcatcggtgtttatttgataacacgttctaggggctgggcaagatggctcatgtttgtagtctcagtactttgggaggccaaagatgggaggattgcttgagcccgtgagtttgagaccagcctgggtgacatagcgagaccctgtctctacaaaaaattaaaaaaaaaaaaaacaaaaaaaaccagctgcgtgtggtggcacagcctcaaactcctgggctcaagcgatcctcccttggccttccagccactcaggaggctggggtgggaggatcgcttgaacccaggagtttgaggctgcagtgagctatgaatgagccactgcactccagcctgggcaacagggcaagaccctgtctcaaaaaaaaaaaaaatttaatttgaacacttctgttttgtgcagttttctctgttatattttactttttaaaaagaaaaagcaggctgctcacctcctgctgtgcagcctggttcctaatgggccacagatggtactggtccatggttcaggggttggggaccccaatgtatagtattattcttactttgtaaaataaaatgcatgtgtattaatttatgaaaaataagcatgaagaatgaatctgtaaaatgatataccaaattattagcaatgtcatctggaaccatatgattctccttttattttcatttataaaaatatctgggtggtgcattggtgagactgcaactttaagaagtgtgacttttccctctccctctccctctccctctccctctccctctcgctctgtctccccacggtctccctctcatgcggagccgaagctggactgtactgctgccatctcggctcactgcaacctccctgcctgattctcctgcctcagcctgccgagtgcctgcgattgcaggcacgcgccgccatgcctgactggttttggtggagacggggtttcgctgtgttggccgggccggtctccagcccctaaccgcgagtgatcccgccaacctcggcctcccgaggtgccgggattgcagacggagtctcgttcactcagtgctcaatggtgcccaggctggagtgcagtggcgtgatctcggctcactacaacctacacctcccagccgcctgccttggcctcccaaagtgccgagattgcagcctctgcccggccgccaccccgtctgggaagtgaggagtgtctctgcctggccgcccatcgtctgggatgtgaggagcccctctgcctggctgcccagtctggaaagtgaggagcatctccgcccggccgccatcccatctaggaagtgaggagcgcctcttcccagccgccatcacatctaggaagtgaggagcgtctctgcccggccgcccatcgtctgagatgtggggagcgcctctgctccgccgcccca

SEQ ID NO: 38400 - DNA, 2300 bp, Homo sapien
cacccaactgatttttcaattttttgtagagacgggggtctcgctatgttacccaggctggtctcaaactcctgggctcaagcaatcctcccaccttggcctcccagcatgctgggattacaggcatgactaaccatttaaccataaaaaatatttttttagtcacttaaaaagagactttgtcatgttgagggtcagatgctaagttatcagcaggctcagtcatgtccctcttgatttttagctgtggaagagaaatggccccagttcatcacccttctctagcccagcctcatcccgctcccagacaccggagaggccagcaaagaaaataaggtattcggcattctcctgcagttttcatttgctacgtggacagaagggggtgaggaaaggtgggaaacgaacctggctcttaggctttgtgctgctgtgacttggagaatcaaagaaactaagtccctgagagggacaatgcagcacccacctgaacaactatcatccctacagtcttggatactgactccagtggcctctggctgtcgcctcccactccagcatgagggatcgggtgcaagcacagaggccatgcagagtggagagcagagagagtcaagtcagcgggcagtcaccttcaggttcttgactcgagctgatcccctaggtgcttgcagttggctggaatgccactccctcagggatcacatctgtgtctagaactcccagggacttggtaggttgtaagtaaggtttgaagattattgttttgtgcttgttttaagacaaaaactgtcttcatggcctctgtgaacagtctcccttcattctgttggaatttcctgttgactttttttatcctggcatactgagatcttaaatgatggttgttttagatgttggccacttggtagttaggagggtgtgagaaattatttaatacttcagccaagaagtctttctagactaaattgttccttttttcccaacagagaagaagagatgtgtcatcattccagttcttcaactccattggcagcagacaaggagtcccagggagaaaagggtaggttgctgagccaggaggaggggctgctgttggtggtggaggtatttgtggaggatgtagagattaatacctattgaaaaaaggtcttgagcattgctatgtctaaggcatgttagatacaaagagagagatttcctctccttcagaagtttatagtctgatgagggagaaaggctacagacgggggctaacgattggatagaggtaagctcagtttgagtcacctgtgggtgatcccagtaattactgcacagtaagcggtttgtgtgcgcgccttaatcttacaaacaccatccaagcaaccaaaccatagaagattgaatcttttcagagataccatcattgaaaactcagtgtgaaatgcgaagtgggtagacacaaccatccatttctggaagagggaaggaagcaaacgagtcttgatttctttctttagctgcagatacaaccccaaggaagaaacaaaactcgaattctcagtctacacctggcagctctgggcagcgtaagcggaaagttcagctgctgccttctcggcgaggggaacagctgaccttggtatggtcttgtccatctactcctgccctccccggcttagctctcctaagtcttaggaacgctaaggacaagtttcttctgattttttttctaatttatttttgtttttgttttttgagacaacatccctctgtcacccaggctggagtgcagtggctcgattttggctaaccgtaacctctgcctcctgagttcaagcaattctcctgcctcagcctcccaagtagctgggattacaggtgcttgctaccacgcctggctgattttttgtgtttttagtagagatggggtttcaccatgttggccaggccggcctcaaactcctgacctcaagtgatccagctggcttggcctcccaaagtgctgagattaccggtgtgagccaccatgcctagccttcccgttttttctgattggcctgacttcttctttttcactttggtagcctccacctccccagcttggctattcgatcactgccgaggacctagacttagagaagaaggcttcattacagtggttcaaccaggccttggaggacaagagcggtaaggagcacagattgttgcacactggagaggtttcaggtgtctgttttctttggttttattttggtgtttgaaaaaatgggtttctctgggaaaatcccaagtagggttccatgttttcttgtggt

SEQ ID NO: 38401 - DNA, 2300 bp, Homo sapien
gcagaaacatgtttggtatgttgaagagcagaacaaagacaagcatggcaggagggcaggagctaaagcagtggtgtggaaggaggccaagaggcaaggattgtttgtggccagggttgggtgtttgggtcttaagtgttcaggaaaaccattgcagaatcaggcagaaggatgcagtgatggttcctcccatgtggaagatgaatgtagatcccatggcttctgtttgcttcgtgaagtagagaaaatctgggagagagagggtcaggataaagtgtataaaaaaaggggtcttttgaaatagtcattttggacagtgggggaaaggaacatcatattaaaaagtgtgatcagtttccaggcagtttgtgggctggaaaattgtgattgtgaagttaaagtgaggccagttagcatggcatgtgtttcccagcgacactgtgggtgtagacctaaggtcagcggacagctggtgccacccggccatggagaccccagcaagcacagcaggaggggcagcgtgtcagtgccccgatgcagctcagggggtgcaggagtggagagcgggtgaagtcagctgcaggaggggtggtgcctacaggagattcgggagccggagcagttgtggtgacagtgtggctgcaggagtggtggcaggggtcggggagaggaggtcatgggggtggcagggtcgaggggctgagaggaccatcagtcagcctcacagggcgaagtcaccgtgagtggtgatggggaggaagccagtgagccaagggtcctctgtgaatcagggagtgacctggcagttgacaggtgacatgaggacatggcagattaaagtgatctgaacttgagttacggtatttagggaaggaagagaaacagtgtggaagcagcgtgggagcacagggagcttcctcttgtccgggccggaggccaagccctgagagcagccatccctgcagaggggctgccagagagggcctcgggcaggcagccagagccagtcagggcaaggccggggaagggagggtaccacggggcatcacaaaagacgcgggacggacaaaccaggcttcagaggggaggggacggtggctaggggaaaaaggcctgaacagaggaggtagccaacccaggtacgctaggaggcgggggccccagagtactcccctctgcagcgatggtcaggaggcccacgaggtggctgcggggcaggggggctttttctctgccctggcgtggccattagcgggtgggagaagcaggctgagctggggcaccaggcatgaagactcggttgtctggctcagctgctgatggaggagtgccccagaagcagaagtggggctgagggtcccgtgggaagtgccctgtggagcacaggctcctgcccggctcctcgcttgcctccgccctctgctcactggctagctctctgttctcttcattccaggcaccgccacccccacctttggtctgaacacccctgcgcctggagtgggcacatcaggcagcagcctctcctttggggcatcctcagcacccgcccaaggctttgttggtgttgcacctttcggtaagcagcaagccaccctgtggccctgctcgtctgtctgaggagaggttgggcggggtggcaggctcctggccctctgaggccccgtgaagatcaggttcagcacaggaaagacatttcgggttaggagtacagcacagcccagggatgggagttggatggcagagatcagagaggagctgtccggggtggaagtttgcctcccatgggaagccaggtaaaaatggattcttgggcctcgctctgagactctctgggagtttgcatttcgggaggcttctcccgtacagtgtttctgatgcagcggggaaagccctattgaggcaccctgtgttttattactggcctggccttccagagatttgggcacccagagccagagtctcaggtagcagctgccctgatgaggtcttgttgaatctttccaggatcggcggccccttcattttccattggtgcgggatccaagaccctaggggctcgacagcgactgcaggcccgaaggcagcacacccgcaaaaagtagcctttgtcccctgtccctgttccccccaccccttccctaaatctggaccttggcacgtgctagaaagagccttggacccttccagctgcgtaaagcaaacctaccccggatctctggcttcagccgccagggggcagtggcagccctggggccctttcccttctggaggaagcacaagcctcagggaaggggaag

SEQ ID NO: 38402 - DNA, 2300 bp, Homo sapien
agatggggtttcaccatgttggccaggctggttgcgaactcctgggctcaagggatctgccagcctcggcctcccaaagtgctgggattacaggtgtgagtcactgcgcttgtccttcctctgcctctctcttatagggatactggtgatgccatgcaggacctgcccagataatcgaggataaccttctctccaaatccttcccctgatcattcctacagatctcttccatagaaggtgacatttccaggctctaggaattaggacctgctctctctgggtggccgttgttcactccatcaccccacgtttccccatcctaccaaaagacacagcagcattgtgtgaactgcccaaactgaaaacctacgagttattctcgacctgtcctttttcctgagcaagttctgtggatttaacttagcggtcacactgccaatttcaacctaactccactgccaccaactcagtccaggccaccagttcttgtttaggtgactcccatgacccccattggtctctccctgcctcaactctgccccctccatcctatatccccacactgtaaccagactgattatttattttttggggaaagaatcttgctctatccccctggctggagtgcagtggcacaatctcagcttactgcaaccccagcctcccaggttcaaatggttctcctgcttcagcctcccaagtagctgagattacaggtgtctaccaccatgcctggctaatctttgtatttttagtagagacggggttttgtcatgttggccaggctggtcttgaactcctgacctcaagtgatctgcctgcattggcctcccaaagtgctaggattacaggtgtgagccaccacacctggccagactgatcttttaaagaagtatatgttagcacagcactccatgacttaaaaaccttaagaggactaccatttctttcaagataaaagaataaaatcctcgctgggcacagtggttcatgcctgtaatcactgctttgggaagccgaggtgggaagatcactttaggccaggagttcgagaccatccatgggcaacatggtgagaccacatctctacaaaagataaaattagctaggagtggtggtgcatgcctgtagtcccagctacttggagagtgaagtgggaggatcgcttgagccctggagtttgaggctgcagtgagctatgacggtgccactgcactccagcctgggtgacggagtgggacctcatcaaaaacaaaaacaaaaccgttattgtggctttgaggcctggatcatacctacatcacttaatttggccaaaccggcccatttcaggtacccaaataccccacgtgctttcttgcttggctctgggactaatgtggttactggtgcagggtgaatggcaggtattgtaaaccacattgtggacctagagttgctaggaccttttttgccattacacagaagcctccctgagaacacagccattggatgacacatggcagaggaagataagacaataaacggagacacaaaattatggccagcgcgggggctcatgcctgtaatcccagaactttgggaggccagggtgggcagatcacctaaggtcaggagttcaaggccaacctggcaaacatagtgaaaccccatctctactaaaaatacaaaaattagccaggtgtggtggcgtgggcctgtagtcccagctactcgggaggctgaggcaggagaattgcttgaacccgggaggcggaggttgcagtgtgccgcgattgcgacactgcgcgacagagtgagactctgtgtcaaaaaaaaattatatatatatatatatatataatgactaatacacatgtgaagatatttaacctcagtaacttcagttaaacagcagtaaaatcccattatttgcccatcagattggcaaaaacttaagaaccagagaagaagtggcgaaacgggctgcagcgtcgcactccctaccccggcaggtgcgcgatcacacacacgccttgcagggcgacttcgaccggcacttccggtcccggaaggtcgtgctttttgaccccggaagtccgggcgggcgccgagccgggtgcgttttgccacagagccgtaaaggcgcgcgggaacatggggctgtatgctgcagctgcaggcgtgttggccggcgtggagagccgccagggctctatcaaggggttggtgtactccagcaacttccaggtagcggacctgggcgcgagtagtaggggtggggagtgaggaacccggggtggggtcggacgggcccgggt

SEQ ID NO: 38403 - DNA, 2300 bp, Homo sapien
cattttattgttttatttattttagtagagacaggggtctcgctttgttgcctgggctggttttgaactcccggcctcaagcaatcctcctacctcagcctcccaaagtgctgggattataggtgtgagccaccaagcctggcctctttttttttttttttaagatattcaaaggtatccttatttacttagattttttaaatcaaggtataacatatacaagtgtgcaaatcttaaccacacagcttgataaacacttgatgtatatacacccactctcaagaacaagatgtagagtgtttccagaaagctccctcctgcctcctcccagtcataactcctaacaaggacagccactgtccttattaccatgttgtcatgtggactgtttttgaatttcacataaacagcatcatatagaatgtactcttttgtgtctggttactttcactcaataatattgaattgtgagttttttttttaatgtgaagtctttcaacgtttagaaattcaatgacactctgttatacaggttttgtttgttttctgagacagagttttgctcttgttacccaggctggagtgcagtggcgcaatctggctcattgcaacctccgcctcccgggttcaagtgattctcctgcctcagcctcccaagtagctggggttacaggcgcctgccaccatgcccggctaattctttgtaattttagtagagatggggtttcatcatgtggggcaggctggtctcaaactcctgacctggagcgatccaccggctttggcctcccaaagtgctgggattacaggtgtgagccaccgcgcctgtcctgttatacagttaatgaatattatggtcataatatactgctgtggtttgaatgtatcctcctaatttcatgtgttggaaacttaacccccaatggggcagtattgaaagttggctgtagcttacgcctataatcccagcactttgggaggccaagactggaggatcacttgaagccaggagttcaagaccagcctagcaacaaagctacaaaccatctttccagcaaattaaaaactaaaaaataaattagctgggcctggtggtgcagttctgtaatcccagctactcgggaggctgaggcaagaggatctcttgagcccagggagtggcggctgcagtgagctgagatccatcactgaactccagcctgggctcagaacgagcctctgtcaatcaatcaatcaatcaatcaatcagtgtcttgtctgggcctaaattctctagaacacaatggaagagagaaagtgaaagaaggtggaagtaacccacagctgggagccctgaaccctgctggtggcaggtggctctcgtgtcctcaccaggttgccctgcaatcacatgctgcatcctttttcctgaacctgccccacgtgccccaccacgcagccactccgagggctccttcaagggcggcagccctgtcactcacgtgttccaaaagtgcttcccctgtgccctgatggcctcgccatgtgtctcatcatgccccacgcgctcccactgtgcgccccacctcgcacccgtgccccatcatgctctgcgtgctcgttaggtgccccatcatttcccgctcgctctcgttacgtacccagcctccggcccctgtaagtgccccatcgtgctctctgtcgctccagttagatgccccatcctgccccgcgagctccaattacgtgccccacctaaccccccacgtccgtgcctcatcatgacccgcacgctatggttacatgccccgcctcgcgctaccgcgcgtgccccatcatgctctgcgcgctcccattacgtgccgccacctcgcgcccctgcacgtacccaacgtgccctgcgtggtcccgttacgtgtcccatcatgtttcgtgcgcttccattacggatcatacctcgcacctcaccgcgtggcctctgtagttccagagctcgcgagggccagggccgttggcggcggttggaacgaaacgatgagtgcctcctcgtggccccagaatggaatgccgccgtcggtaggggtctgccgggcataaaggggccttcggaaccccaccagagtcacagccagggagggcagcggggcgcaccaggccgaaggctcacgccacagggagggcagctaggacatggggggaagcgcgttaaaccagggagtcctggaaggggacgacgcccccggccaggtgagggcccagacgtttcgggggcgtagacgctgaggggtggccgggtgggtctgcggctctgaggcctggct

SEQ ID NO: 38404 - DNA, 2300 bp, Homo sapien
gaaggcccagctccatgccccacagtgtaatatctgtaagaatggacaaagaaggtgggtgaagcttgctcagtatcctgctcagtgctatcagtttcttccccctctaagtcagcagtactctggcctccatgtctccctcacacagttccctcttcctgcaatgtcttcctcctgagcctgtgcccagcttctactgatagaaattttattcaaacttccaggctcagttcaaatgcccccacttccaggaagccttccctgaacctcccagctagaattaatcatgccttcattaagcacacccacaacactgctttcacctcccaggcactcatccgattctaccaagtgagctgagtgcaggtcagtctcctccactacattgtgaggtccttaagggtggagatgttctaatcttctgagtacatcctctcttttcaccatgtattgtgggaagtaagtattcgattgagttttacttaataaatgaacaaagaaacattcccagtggttagttaagtcagagtgcaaagattataccttgcccgttaagccatctcccaaatgcctaggtctcaaggggagagaacatggctgtgttaccaaaacccagcctcagcaaagccaactcaaagaacctgcgctctgagcagtcttcccagcctgaggcatcgtgcctcatctagcccctaaacaattccttcttctccagctcccactctgaacctaccctctccaagtttcattagccgaggagttttcctaaagtaattagaatcgaagggtctgtccatgtgttccaggtatcccgagtatttcactaggatagaagaaagaatgtaaggaaaatggaccaaaaacacccacgccaccataatatcgagtctctcatgatcacacagaaacaatgtgaacagatgagcttaagctgcccgacaccccgaggtacaggaataaatcttctctctgcattttgggtgccggccctttggctcagaggttcaagagctttgcggaagcatcacacaaaggggacataggagtccctagctttcgtcttaaaaaaactaattcaggccggaagcagcggctcatgcttgtaatcccagctactggggaggctgaggtgggaggctcacttgggtccaggagtctgagaccagcctgggcaacatagagtcccccatatctacaaaaatattaaaaattagccgggcatggtggatcgcgcctgtaaatcccttatttgggaggctgaggcaggagaatcacgagcccaggaggtggaggctgcagtgagctatgatcgcaccactgcactccagcctgggcaactgagcaagaccccgtttcaaaaacaaaaaacaaaaatccacttcaaacaaagcatttccaaccccattaagtgctttttgaaaatgaggcctctctcttcccaacagagtgcgatgacatggatcctgaggacaaaccgccccagggcgtacctagcaccgaagcatcaggcgccactaggtctccagctccttctcggatgacgtccttcagcacgccccggtcccccgagatgtccagcatcctctgacttaaccgctcgtacagggactgatggagaatgaaagccaggcctcagagccgcagacccacccggccacccctcagcgtctacgcccccgaaacgtctgggccctcacctggccgggggcgtcgtccccttccaggactccctggtttaacgcgcttccccccatgtcctagctgccctccctgtggcgtgagccttcggcctggtgcgccccgctgccctccctggctgtgactctggtggggttccgaaggcccctttatgcccggcagacccctaccgacggcggcattccattctggggccacgaggaggcactcatcgtttcgttccaaccgccgccaacggccctggccctcgcgagctctggaactacagaggccacgcggtgaggtgcgaggtatgatccgtaatggaagcgcacgaaacatgatgggacacgtaacgggaccacgcagggcacgttgggtacgtgcaggggcgcgaggtggcggcacgtaatgggagcgcgcagagcatgatggggcacgcgcggtagcgcgaggcggggcatgtaaccatagcgtgcgggtcatgatgaggcacggacgtggggggttaggtggggcacgtaattggagctcgcggggcaggatggggcatctaactggagcgacagagagcacgatggggcacttacaggggccggaggctgggtacgtaacgagagcga

SEQ ID NO: 38405 - DNA, 2300 bp, Homo sapien
aaacgatgctaagtgctcacgtgaaatgatgctaagtgctcacgtgaaacagtactaagtgctcacatgaaacgatgctaagtgctcacatgaaacagtactaagtgctcatgtgaaacattctgagtcctccaggtgtttccaggccaagagaataggaacagttgggtgaaagggggatggccttctctaaagagtcccagatcagggccccttgccccttgtgtggcctgccggtggcacttggatttcacccacagagctacccaggaaccatggcagtttctaagcgggtcccaggagtctcaagggggcagcctagagagaggtgagagggtgatggcgacactccccagaggagcacggtggccttgtgaaatgggtatgggttccggaacagacaatcacaaatggaacacttagtagctctatgcccttgggtatgtcattcctctctgagactcagtttccccacctgggaaataaggataacgtagcattcttggattgctgagaagatacaataagggcaagtatgaagtgtgatcgatcagattcaggtgcccaacacgtgttgttgattttctttttttttttttcttttttttttttttcaggccaggcaccgtggctcatgcctgtaatcccaacactttgggaggccgaggtggatggatcacctgaggtcaggagttcgagaccagcctggccaacatggtgaaacccctgtctctactaaaagtacaaaaattacccgggagtgatggtgggcgcctgtaatcccagctacttggaaggttgaggcaggagaattgcttgaacccgggaggcggaggttgcagtgagccaagatcgcaccattgcactcctgggcgatgagatgagcctgggcgacaagagcgaaactccatctcaaaaaaaaaaaagctatttttttttctttattagagacgaggtctcactatgttgcccaggctgatggggcaagatgggggtgggggtgagccactgcgcctggcagaactgttgattttaacagtaggattatctgcctgcattacagaaaagcaagctgaggctcagagaggagccccaagtcacatacactgaggggagaggcagacgctgtatttgagctgccactgggtacaaggcagacttccacacgtgggaagccttagaaatggtctcccctggccgggcacggtggagcacgcctgtaatcccggcactttgggaggcagaagcgggagcatcccttgagcccaggagttcaagaccagcctgggtaacatagtgagaccctgtctctacaaaaacattttaaaattagccgggagtggtggtgcccacctgtaatcccagctactctggtggctgaggcgggaaggtcgcttgagcccgggagatggaggctgcagtgaactatggtcgttccactggactccagcctgggcgacacagagagaccctgtctctaaaaagaaataacaattaaaaataaaaataaaaagtcttccagctgggcgcggtggctcaagcctctaatcccagcactttgggaggccgaggcaggtgaatcacctgaggtcaggagttcgagaccagcctggccaaaatggtgaaaccccgtctttactaaaaatacaaaaaattagaggggcgtggtggcaggagcctgtaatcccagctactcgggaggctgaggcaggataatcgctggaacccgggaggcggaggttgcagtgagccgatatcgcgccactgcactccagcctgggcgacaagagcaaaactccgtctcaaaaaaaaaaaaaaaaaaaaaaaagtctccctcctagagtaaaatgaggcgacccagtctgagagtgtgggtacggggacttcccgcagcctctcccaggcagcaagggaagggaagaaaccgagtgtaagcggagggcaagcgggcggacacccaccaggcccggccccaccccgtgctccgcgtggccgggagacgcggcgcctttaaagcccagtgggaggcgtgtccctgggcgtgtcctcccggagccccgccccgggggctggtagcctcggccccgggaggttgcgccggctctggctcagcggcggctccggtggcagcggcggtggcggctaggcgggctcggcggctcctgtccctcgggcggctgcccgctcgctgcccagggcgcccggacacacgtgggcggctcagcgatggcccgcgccccgcgacgtggcgggcaggcaccggggcgcgggaccgctgagcccgagtgagccggggccgc

SEQ ID NO: 38406 - DNA, 2300 bp, Homo sapien
acaaactcggctcaccgcaaccaccccctctcggattcaagcgattctcctgcctcagcctctcgaatagctgggattacaggcatgcgccaccacgcccggctaattttgtatttttagtagagacagggtttctccatggtgctcaggctggtttcgaactcccgagctcaggtgaggcgcccgcctcagcctcccaaaatgctgggattacaggcgtgagccatcgtgcccgaccaaacgtacctatttcccccccccccccgcctccctgagacggagtctcgctctgtcgcccaggctggagtgcagtggcacgatctccgctcactccaagctccacctcccgggttcacgccattctgcctcagcttcccagtagctgggactacaggcacccgccaccacgcctggctaattttttgtatttttagtagagacggggtttcaccgtgttagccaggatggtctccatctcctgaccccgtgatccgcccgcctcggcctcccaaagtgctgggattacaggggtgagccactgcgcccggcccagacgtacctattaaagagacatcctggctgggcacagtgggtcacgcctaatctcagcactttgggaggcagaggcgggacaattgcttgaggccaagagttcgagaccagtctgggcaacaaagtaagaccctgtctctacaaaaaaaataaaaaataaaaggtagatccaattcattcaaatagtattcactagcacctacaatgttccgagccaggtgctgagtatcatgggagaaaaaaaaaaaaagccagagtcacagctctggcagggcgtggtggctcacgcctgtaatcccaacactttgggaggccgaggcgggtggatcacctgagatcaggagtccgagaccagcctgaccaacatggtgaaaccccgtctctacaaaatacaaaaaatagccgggtgtggtggcgcgcacctgtagtcccagctactcgggaggccgaggcaagagaatagcttgaacccgggagggagaggttgcagtgagccgagactgcaccactgcactccagcctgggcaacaagagtgaaactccgtctcaaaaaaaaaaataatgataattttgggaggcctaggcggtcggatcacctgaagtcgggagtttgagaccagcctgaccaacatggagaagccccgtctctactaataatacaaaattggccgggcgtggtggtgcacgccagtaattccagctacttgggaggctgaggcaggagaatctcttgaacccgggaggcggaggttgcggtgagccgatatcgcgccattgccctccagcctgggcgacagagcgagactccgtctcaaaaaaaacaaaaaccaaaaaccaaaaaactaagtacgtcttttaatctatttctccaaagaagcttctatattctactttccagccagcccctagaaacaagcagtatacttctacccagatctcaaccacactcccgcccagaagttaactctggggtgagcaaagctggcccccacgttgtccttccgcagaacctttggtagggtaagctcccggggccacttcccgccaacccctccctgcagcccagccccacccgcgcatccccgggcgtggccgagcacggcgcctttaagaagggggaggcgcccaagaggaaagacaaagcccctggccgcgcgctcaccctccccctccggcgcaccacacggacagtggtgcccggatgtcggtgtcgccgtcggtgacagatggcgcagtatctgtatatgcgaggggcttctccggcttgacctctttgagttctcgtcctctccatcccccgctgtcccccacttttaactctgccgtcggaggcccgcacgcctatcacgggcgcttacataacgtgacctttcacctcttcagactgccctctagtgcgctgcaacccaactacgcgacaggggcaggggggcgggacccaggcgcggagcggcagctcctccgagccaataggctgtgagcgctgaccagctctccgcctattggagcattcgccaccggcgccacgggggagcaagttagtgtgtgcgttggccgggcccgggggaggaggggaatctcccgccatttttcaataatttcctccggtgctgctgaggaggagtcgtgactgccggccgccgggacccgaagcggaggtcggcggggggctgctgggaggcgcggcggtgtgcgcgggagctctgcgccgtggcgttccgctccatgactgtcgcgcggccgcgccg

SEQ ID NO: 38407 - DNA, 2300 bp, Homo sapien
tttacacctacctgctaggtactgtctacgaagcacttttactttactttctcatttttacccatgtatcagcctgtgatataaaccaggcagttattatcatccctatttaaggaaactgatgctcagggaggaacagtgttttgtctaagctcaaaagtgacagttttattcatttggtgacaaaatgctacttccattttagtgtgggtattaaaggtctttataggagtcaagactagcatgagtttatgactttctcttcaaaaccagattggagctaacccagcgtgtagttattccttccccacctctttcccaggccccaccaaggtcaaccatgtgctgttggaaagggaacaccaacgtgtgttcagtagtcagaaggctctgggagacatatgaggctccatttcctcagtctggccaccatctcctccttttcatttagtaaacacttaatgaactcccactgtatgcaggtaccgtgcgttgcactggggagtcaaggacaagtgagccacagagcctgtccacagaggctcatgggaggaagcacgtgtgcgaaatgataaatgcaggcgtgcacaggctatcacaggagagtaagagagggtgggcatttccacctatgcgagccagggaggtagggctccgcggaagaagtgatgtcggggctgtgttgggaggtctgaggctttccaggacaagagaaggcagcctagccaaggaacagctgggcagaagcacccatgcatgacgaagctcttgggttagggtccagtctgcctggagctgaggatgcttgtaggagaacagtaggcactgaggccagagatcagaaaggacttcctatgttgcgataaggccagctcctgcctctcctaagaagtactgggtatggctgggcgtggtggctcatgcctgtaatcccagcactttgggaggctgaggcaggtggattacctgaggtcaggagttcgagaccagcctgaccaacatggtgaaaccccgtctctaataaaaatacaaaattacccaggcgtggtggcgcaagcctgtaatcccagctactcaagaggctgaggcaggagaatcagttgaacccaggaggcagaggttgtggtgagctgagatagcaccattgcactccagcctgggcaacaagagcgaaactcggtctcaaaaaaaaaaaaaaaaaaagtactgggtatgacatttctcccttaggcagcagtggagcgtcgaagggtttagaaaggtctctctggcagtggtttgcagttcagtttaaggtacgtgagactggaggcagggcagtgaggtatgtggctgttgcaggaggccaggctggagatgatgaggcttgaactgaagcagtaggagaggaaggaatgagcacaaatgataccagagcaggagggggaaacactttggtgactggctactgtaggtgcagcggaggaatgcattggtgactcttactttttttctttttttttaattttaatttttattttttgagacggagtctcgccatgtcacccaggctacagtgcaatggcacgatctcagctcactgcaacctccacctcccgggttcaagcgattttcctgcctcagcctcccaagtaactgggattacaggcgcgtgctatcatgcccggctaatttttgtattttcagtagagacggggtttcaccatgttggccaggctggtctcaaacttctgacctcaagtgatccgcccaccttggcctcccaaagtgctgggattacaggcgtgagccactgcactcggcctggtaactcttttttttttttttttttttttttttgagacagagtctcgctctgttgctcaggctggagtgcaatggcgcgatctcggctcactgcaagctctgccttctaggttcatgccattcttctgcctcagcctcctgagtagctggaactacaggtgcccaccaccacagccggctaattttttgtaattttagtagagacggggtttcaccgtgttagccaggatggtctcgatgtcctgaccttgtgatctgcccacctcggcctcccaaagtgctgggattacaggcgtgagccaccgtgcctggcctcggcctggtaactcttaagttttgcaccttgatggtgactttaagccttcaggcagaactcccaggtgctaatccgtcagtccggcagccgaagcctgagctcaccaccttcagacaccaccagcctccttcagatgcccaaggatgcctgacaaatgtcattttctacacatcttatg

SEQ ID NO: 38408 - DNA, 2300 bp, Homo sapien
accaacctgggcaacataggaagaccctgtctctaccaaaaaaaaaaaaaaaaaaatgtcagcgaggcatggtggccctcgcctgtggtctcagctacacaggaggctgaggcagaaggatcacttgagcaaggccctgtaccaaaaaataagtaaaagtaaaaaataaatatttttttttcgtctgaatgttctactaaactggaagctcagccagtcacagtggctcatgcctgtaatcccagcactttgtgaggatcccttgagaccaggagttcaagaccagcctggacaacatagtgagatcccctctccacatgaataaataaactgggccgggtgcggtggctcacgcctgtaatcccagtactttgggaggccgaggcaggtggatcacgaggtcaggagttcaagaccagcctgaccaacatggtgaaaccccatctccactaaaaataaaaaaattagctgggtgtgatggcggacgactataatcccagctactcggaaggctgagacagaaaattgcttgaacccgggaggcggagattgtagtgagccgagatcacaccactgtactccagcctgggcaaaagagcgagactccgtctcaaaaaaaaaaaggccaggcgtggtggctcacgcctgtaatcccagcactttgagaggccaaggcgggcagatcacgaggtcaggagttccagaccagcctgaccaacatgataaaaccccgtctctactaaaattacaaaaattagctgggcgtggtggcacccgcctgtaatcccagctactcaggaggctgaggcagaagaaccgcttgaacccgggaggcggaggttgcagtgagcggagatcacaccactgcactccagcctgagtcacagagcgagactccgtctcaataaataaacaaactggaagctctttgaaaccaaaaccacgtatgtcttcagctttaggtacagagtcttgcacaaaatagacatctttttatttatttactttagagacggggtctcgtttagacatggggtctccatatgttgcccaggctggagtgcagtggctattcacaggtgcgatcatatcatagctgacggcagcctcaaattcctggggtcaagtgatcctcccgcttcagcctcccaaatacttgggactactagatactcgagaaaaggcaagaatgtggtctgaatgctgggaaagcagttcatctggtaaagagaggaggggattccaggtgaggaacaggtgtgtgcaaagaccggaagccatccttaagaaaggcgtggttggagcacagcgtaggagccagagggcaaaggtgctgggcaggagaggcgggaggacagagatggcgcaggagtgcggttccacagggtcaggttcctaacacgctggccagagcagggagccgacctccaaactctcagggaagagaaccaggttgcccaccggcggcacctcgcacctcgccctgaccacaagcacgtgcgcccaacccgcctcgcaccccggcccgggtagggggctcaggggactcccggggcactcaggagggacgccccgggcggggcgcgcaggcgcgctgaggccgtgagccccaaggggcgggcgggtgcgcgcgctttctcgcgcacgcgcgcacggagggggcgacggccgctgtgacgctgcggcggcggcgggcgggcggcggcgcgtgaggcgcgcgatccccggtgtcttgggagcagtgccccggcccccgccgctcccgccgccgccatgtcgggccggtcggtccgggcggagacccgcagccgggccaaggacgacatcaagaaggtgatggcggccatcgagaaagtgcggaaatggtgaggggccggagcttagggggctggcgggggtcgcggatccaggccctgaggagcgtgggactggcgggtcaggtgggagccgaccggccggcgctgggggaggggggtgcgggagaaggcgggaggagggcgccgctggcgtcggcgtgaggtcagagggcgcgccggccgcggccaatcagcggtcctcccggctcgcgggcccgcccacctgctgcggctgctgccgcgcgccgcctgggaggggattccggcttccggcccggactggagctgcctggcgtcggtgcccgcgcccggcccagcccggggcccgccctcccctcttcctgggcagtggccccgcctgcgtttccaggcttcctcttgataatagcgagtagccctggagtggtgtcagcccgccaggctgagcgctctgcgtattcaggc

SEQ ID NO: 38409 - DNA, 2300 bp, Homo sapien
tcccctacttaagctggcatttatcaaatagcattttacttatttgtttaattaatttattttttccaagatggagttttgttcttgttgcccgggctggagtgcaatggtgcgatcttggctcactgcaacctccacctcctgggttcaagcgattctcctgcctcagctttccaagcagctaattctgtatgtttagtagagatggggttttgccacgttggacaggctgatctcaaactcctgacctcaaatgatccacccaccttggcctcccaaagtgctgggattacaggcgtgagccaccatgctccgcctaggctagcatttatcaaatagcattttaaatatgctttgggaagctggacccagtgactcacgtctgcaatcccagcactgtgggaggccgaggaaggaggatcaattgagtccaggtgttcaagaccaacctgggcaacataggaagaccctgtctctaccaaaaaaaaaaaaaaaaaaatgtcagcgaggcatggtggccctcgcctgtggtctcagctacacaggaggctgaggcagaaggatcacttgagcaaggccctgtaccaaaaaataagtaaaagtaaaaaataaatatttttttttcgtctgaatgttctactaaactggaagctcagccagtcacagtggctcatgcctgtaatcccagcactttgtgaggatcccttgagaccaggagttcaagaccagcctggacaacatagtgagatcccctctccacatgaataaataaactgggccgggtgcggtggctcacgcctgtaatcccagtactttgggaggccgaggcaggtggatcacgaggtcaggagttcaagaccagcctgaccaacatggtgaaaccccatctccactaaaaataaaaaaattagctgggtgtgatggcggacgactataatcccagctactcggaaggctgagacagaaaattgcttgaacccgggaggcggagattgtagtgagccgagatcacaccactgtactccagcctgggcaaaagagcgagactccgtctcaaaaaaaaaaaggccaggcgtggtggctcacgcctgtaatcccagcactttgagaggccaaggcgggcagatcacgaggtcaggagttccagaccagcctgaccaacatgataaaaccccgtctctactaaaattacaaaaattagctgggcgtggtggcacccgcctgtaatcccagctactcaggaggctgaggcagaagaaccgcttgaacccgggaggcggaggttgcagtgagcggagatcacaccactgcactccagcctgagtcacagagcgagactccgtctcaataaataaacaaactggaagctctttgaaaccaaaaccacgtatgtcttcagctttaggtacagagtcttgcacaaaatagacatctttttatttatttactttagagacggggtctcgtttagacatggggtctccatatgttgcccaggctggagtgcagtggctattcacaggtgcgatcatatcatagctgacggcagcctcaaattcctggggtcaagtgatcctcccgcttcagcctcccaaatacttgggactactagatactcgagaaaaggcaagaatgtggtctgaatgctgggaaagcagttcatctggtaaagagaggaggggattccaggtgaggaacaggtgtgtgcaaagaccggaagccatccttaagaaaggcgtggttggagcacagcgtaggagccagagggcaaaggtgctgggcaggagaggcgggaggacagagatggcgcaggagtgcggttccacagggtcaggttcctaacacgctggccagagcagggagccgacctccaaactctcagggaagagaaccaggttgcccaccggcggcacctcgcacctcgccctgaccacaagcacgtgcgcccaacccgcctcgcaccccggcccgggtagggggctcaggggactcccggggcactcaggagggacgccccgggcggggcgcgcaggcgcgctgaggccgtgagccccaaggggcgggcgggtgcgcgcgctttctcgcgcacgcgcgcacggagggggcgacggccgctgtgacgctgcggcggcggcgggcgggcggcggcgcgtgaggcgcgcgatccccggtgtcttgggagcagtgccccggcccccgccgctcccgccgccgccatgtcgggccggtcggtccgggcggagacccgcagccgggccaaggacgacatcaagaaggtgatggcggccatcgagaaagtg

SEQ ID NO: 38410 - DNA, 2300 bp, Homo sapien
aggtcactgcccgtgacccacatcactcccttcccgctcagggaagtttatcatgactgcctccagtgacaccactgtcctcatctggagcctgaagggtcaagtgctgtctaccatcaacaccaaccagatgaacaacacacacgctgctgtatctccctgtggcaggtgggcaaggaggggtattggcgtctgggaccacgagaggctggggctggggagcaggcacagaacagagagccagcttcatcgcgtgggaagagcatacggggtggggtcaggaacccgagcttcaagtctcagctctccccacttgcagtagtgggatttcatgcaggtcgccccatgtccttagtcgctatttcttcatcttcagtgtttttgttttttagaaaattagtctcactctgtcacccaggctggagcacagtggtgcgatcatagctcactgcagcctcaaactcctgggttgtagctattctcccagctcagcctcctgagtagtcaggactataggcatgtgccactgtactcagctaatttttgttttttgtttgtttgtttgttgagacggtttcaccctcgcccaggcaggagtgcagtggcgcaatcacagctcactgtagccttgacttcccaggctcagaccatcctcccaccttagcctcccgagtagctgggactacaggcgtgcactaccacacctggctaatttttgtattttttgttgagatggggtcttactatgttgcccaggctggtcctgaactcctggcctcaagtgatcctcttgcctcgacctcccaaagtggtagaattacaggcgtgagccactgtgccaagccacctttgggcggggatgttacatatcttagaacaaggctagaagataaactgaggtcacatacataaaagaacttttttgttgtggttgtttgtttgttttttgagatggagtttcgctcttgttgcttaggttggagtgcaatggcaggatcttggctcaccacaacctccgtctcccgggttcaagcgattctcctgcctcagcctcccccaagtagctgggattacaggcatgcaccaccatgcccagctaattttttatttttagtagaggtgaggtttctccatgttggtcaggctggtctcaaactgtcggaccttaggtgagctgcccgcctgggcctcccaaagtgctgggattacaggtatgagccaccacacccggcctttttttttttttttttctgagacagtctcactctgttgcccaggctggagtgcagtggtgcaatctcaatctcagctcactgcaacctccacctaccaggttcaagtgattctcccacctcagccttcccagtaggtgggactacaggcatgcgccaccacgcctggctaattttgtatttttagtagagatgaggtttcaccatgttggccaggctggtctcgaactcctgacctcaggtgatccacccacctcggcctcccaaagtgctgggatgacaggcgtgagccaccgcgcccggccaaaataactctttaaaggtttatattatccagatatgaggattatcaactttctcaggaaagagattgaggggttttacaggaacaacatgctccgaaaatgaagttttaaaggcttctgggttgtatggcagatttgtagcctcgtgtggcttcaccccagatgtgaaggtttgggaagtctgctttggaaagaagggggagttccaggaggtggtgcgagccttcgaactaaagggccactccgcggctgtgcactcgtttgctttctccaacgactcacggaggtgagtgaatccgctctgatgtctgaccagtggctcttggcccctcttgacaaccagggtccttctgtctgtttgtgccatggctctgaagagggtggggtgcctggccctcggcaggaagctgacttagcttcctagctggagctgctcaagttgggccagtgcttaccctgccagggtgtgttggggcttgagctgtgattttctgtgttgcaggatggcttctgtctccaaggatggtacatggaaactgtgggacacagatgtggaatacaagaagaagcaggacccctacttgctgaagacaggccgctttgaagaggcggcgggtgccgcgccgtgccgcctggccctctcccccaacgcccaggtcttggccttggccagtggcagtagtattcatctctacaatacccggcggggcgagaaggaggagtgctttgagcgggtccatggcgagtgtatcgccaacttgtc

SEQ ID NO: 38411 - DNA, 2300 bp, Homo sapien
cctctgcctcccaggttcaagtgattctcctgcctcagcctcccgagtagctgggattagaggcgtgggacaccacgcccagctaatttttgtacttttggtagagacggggtttcgccatgttggccagagacggggtttcaccatgttggccaggctggtctcgaagtcctgacctcaggtgatcctcccgcctcggcctcccaaagtgctgggattacaggcatgggccaccgcacccggccttaaaagaagttttctggccgggcgcggtggctcaagcctgtaatcccccaagcactttgggaggccgaggcgggcagatcatgaggtcaggagatcgagaccatcctggctaacacggtgaaatcccgtctctactaaaaatatttttaaaaaattagccgggcgtggtggcgggcgcctgtaatcccagctactcgggaggctgaggcaggagaatggcataaacccaggaggcggaggttgcagtgagccgagatcgcgccactgcgctccaacctgggcaatagagcaagactctgtctcaaaaaaaaaaataagttttctatgaaaaaatttcctggtctgggccagtcgcggtggctcacacctgtaatcccagcactttgagaggctgaggcgggcggatcacgaggtcaggagttcaagaccagcctgaccaatatagcgaaaccccgtctctactaaaaaatacaaaaaattagcggggcatgctagcgggcacccgtaatcccagctactcgggaggctgaggcaagcgaatcgcttgaacccgggaggcagaggttgcagtgagcagagatggcgccattgcactccagcctgggcgacagtgcaacgagactccatctcaaaaaataaaaaataaaaataatctcccagctcggcatggtggctcacgcctgtaatcccagcactttgggaggccgaagcaggtggatcacctgaggtcaggagttcgagaccagcctggccaacatggcaaaacccccgtctctataaaaaacacaaaaagtagcagggcatggtggcacgcgcctgtaatcccagctactctggaggctgaggcaggagaatctcttgcacccgggagacggaggttgcagtgagccgagacgcgtcactgcactccaacctgggcaaccgtctcaaaagtaaatacataaataaataaataaaataagttttctattaaaaattctcccttttaactttcgacttgccaggccagccccaaatccaggccctcgtcacctccctctcggatccttgaagccactgccggttttctgattttggtcttttcacacaaaggtccatccagggaatcctcagacacagcttttgccccacctctccctgtaatgagcagcttgttggatggagccagcgctcaacgtcccccagacctttccgcccctctagccatttcccacatcccagcttctcaggtctttgcggaggctgttccactccacgcgcctggcctactcttccttaaaagcccatctgaactttcgctgatgctgagtttcctatccgttaaatggtaataataatccccgccccgcttccttgaaaggatccagtgtggtgatggctggaataatgcctttaataaacaattatcagtgagttcttcaggaggaggcgtgagcagtgatcgcaaatcccgccttcctccgccctccgcagccctgcaatctcaaccgccaggcgacccgcccctcgaaacgcaccaagggtcgagccctgcccctcgagatgttctacttccaggccccgcccctcgagacactctacctccgggttctgcccctcgagacgctctaacaacccagccccgcccctcgagacgcgctaactccagactctgcctctcgaggcgctctaataactaggctcggcgggtggagatgctctaactccaggccccgcccctcgagcgccacaacagccgggccccaccccttgaggtgctttaacggccaggccccgccctgaaggcgttgtaacaaccaggctccgcccccaggcgctctaacggccaggcccagccgcttgaggctccccaacggccaggccgcgcccccgcgtgcgtgcgcggcccggcagagccgtgcgggcgcccgcgtactcactagctgaggtggcagtggttccaccaacatggagctctcgcagatgtcggagctcatggggctgtcggtgttgcttgggctgctggccctgatggcgacggcggcggtagcgcgggggtggctgcgcgcggggga

SEQ ID NO: 38412 - DNA, 2300 bp, Homo sapien
agcccaggaggtcaaggcttcagtgagctatgattgcgccactgcactctggcctgggcaacagagcaagaacctgtttcaaaacaacaacaaaaacaaaaaagagcctggagtgtgtgttggggccaagggcaagagcctggggagaggtcagaattagagactgggaggggaggtggaggcctggaagaggacacatgttggtggtcagaagtgaaccaagggtggttctctgcaatgaaagtgggtagtgcctagccttctgaggcagaggacccaaggctctaggcccctggcctgccagtctaaccaggactttctttttttcttttttttttttctttgagatggattcttgctctgtcaccaggctggaatgcagtggcgtgatctcactgcaacctccacctcccaggttcaagcgattctcctgcctcagcctcccaaggagctgggactataggcatgtgccgccatgctcggctaatttttgtatttttagtggagacggggtttcaccatgttggcaggctggtcttgatctcctggcctcgttattcacccacctaggcctcccaaagtgctgggattacaggtgtgagccaccgcacccagccctaaccaggactttctggaggcagctcactctctgtggcctatggccccacaatccattcagcagtctttgcaagtgtacctatggggctccagaggaacccagagaaggtgtgggaggttggattcacagtgccctgtagaggaagatcaggctgggtgaggtggctcaagcctgtaatcccagcactttggaagcccgaggcaggtggatcacctgaggtcagcagttcgagaccagcctggccaacatggtgaaaccccgtctctactaaaaacacaaaaattagctgggcctggtcgtgggcgcctgtaatcccagctactcaggaggctgaggcaggagaatcgcttgaacccaggaggtggaggttgcagtgagccaagatcacgccattgcactccagcctgggcaacaagagtgaaaccctatctccaaaaaaaaaaaaaaaaaaaggaagatctaggaggctagagcatcatccgagaagacttcctggaggaggcagcatgggcacttaatctgaacgtcaaaggccaagcaggatttcgcagggtgtcacttgagtcccagtcccctggggtgaggtgggggatgaggaagctgggtgcccctgacctggcccccttctctcagatgtgaagcggaggaagagccccgtgtgtggcttcgtgacccccctgcaggggcctgaggctgatgcgcaccggaagccggaggtagctgggttctggaccgcctgcccacctgcccacctgcccacccaccaagaccagcccctgcctcctgtagccttgcgctgagcagacagggatggggtgaagggtgggagatgggtgtgcggtgctcccctctctactgatccccctcccccggcccctaccccaggccgtggtcctggaggggaactactggaagcggcgcatcgaggtggtgatgcgggaataccacaagtggcgcatctactacaagaagcgggtcagtgggggagggccagggaggccccagagctttcctcctgcggctgccggctaccgcccgcctcggaagatccctggaaaggggatcctgacccccgagcttgcgcccctcgggccctccattcagtcccgggccgacagcgccaccgtgtggccacagcgtctcctagcggcctccttacctaggggtcgggtgagctcctgatgggaaatgggggatctcatcgcttgtgagtagaggagactttggggggaaagtgatggaggatggggcaagggatccggtgtccaactctgtgtgtccctgcagctccgtaagcccagcagggaagatgacctcctggcccctaagcaggtgggtgctctgtaagtccagcaggcaagggcatccctttgccccccaagtagatgggaggcagagttgacagtttccgcctcagtgggcaagacagtggctgggcatgagggtggaatgtgggatgttactgccatcctgtggttcatttgttgagctcttctcttcttggggggtgagggtgaggtggtgagaagaccccaggtcattgagcaagtggtgggaggcatgggagaacagagggaccaggccgggcgtggtggctcacgcctgtcatcccagcactttgggaggccgaggcgggtgggtcatctgaggtcaggagttcgagaccagcctggccaacatg

SEQ ID NO: 38413 - DNA, 2300 bp, Homo sapien
ttagttaaacgctccagtgaggtgtcaggtgtgaatgcctcagtctggtttctgtcctcaaggtgagaaaagaggcttcagaagcagaaaggccatgtacagtggctcacacttgtaatcccaaaactttgggaggctgaagcagatttcatctctacaaaaaaaaaaaaattagccaggtttggtggcatgagcctgtagtcccagctactagggaggctgaggtgggaggatcgctttggcccaggagtttgaggctgcagtgagctatgaccgtgcctctgcactccagcctgggtgacagagcgagaccctgtctctaaaaatatataaataggctgggcacggtggcgcatgcctggaatcccagcactttgagaggctgaggtgggcaaatcgctttaaggtcaggagtttgagaccagcctggccagcatggagaaacctcgtctctactaaaaatacaaaaattagctgggcatggtggcgggcacttgtaatcccggctactcaggaggctaaggcaggagaatcgcttgaaccagggaggcagaggttgcagtgagccgagatcgtgccattgcactccagcctgggtgacagagtgagcctccgtctcaaaacaataaataaatagaagtatatagataaataaaaatacaaagaagcaggaacaaaagctggacctcagtgtcagtgagagaaggggctcagagctcctgggtagatgcctgcctaggggatgtccaccttccagtgagccacccatccctaccagtaacagtccctcgaggctccccttgggcctctctgtgcaggtgaagtaatgatcacaatttttttaatatatattttttcttaagtattttattttgtttttgaaacaggatttcactgttgcccagggtggagtgcagtagggcgcgatctcggctcactgcaacctccacctcttgggctcatgtgattcttccacctcagcctcccgagtagctgggattataagccaagcacgcatcgtcacatccggtaatttttgtatttttagtagagaaggggtttctccatgttagccaggctggtttcgaactcctggcctcaagtgacccacccaccatggcctcccaaagtgctaggattgaaggcgagagccaccgcgcccggccaccgtgttggccaccatgttaactagaggtgttagcaacctcctgtgggccaggcccttcaggggcattaccttgggcttaccacatcaggcccctgagagttgggggcttctacctatgtggaggacccagaagagctaatatggggggcgggggttggaggtgaagggcaggagttaggtgaggggagatggtgatctctggcctcacaggagggtgcccctgaaagaacaaaccccaggtcctgaggcgctttcaggctcaggtgtgataggggacccttttgttgtggagacagggtctcactctgtcatccaggctggagtgcagtggcgcgatctccgctcactgcagcctcaacctcttggtctcaagcgattctcccacttcagccttcggagtagctaggactacatgcacacgccaccatgcctggataatttttgtatgtttggtagagacagggttttgccatattgtcgaactcctgggctcaaggaatcctcccacctcagcctccccagtagctggtattacaggctttctccactatgtccggctaatttttgcatttttttggtagagatgggggtcttgccatattgctcaggctggtctcgaactcctgacctcaagccatcctcccgccttggcctcctaaagtgctaggattacaggcaagagcccctggcgtccggcctgacctttcttaatatccctttggagcaaagtaggggcggctctatcaggactccaaggaaagacgggaagggagatggggccaacccgccagagctccagagcaccgggttctcacctggcgtaaggattatgctaatacaagccccgccccgtcccaggccccgcccacccgatcggcctatggtgtgggggcggggctatgttaatgaggcccggctggccaagagctgttccccgcgctgcgcggagcagggaccaggcggttgcggcggcgacagccatggccggcgcgctggcaggtctggccgcgggcttgcaggtcccgcgggtcgcgcccagcccagactcggactcggacacagactcggaggacccgagtctccggcgcagcgcgggcggcttgctccgctcgcaggtcatccacagcggtca

SEQ ID NO: 38414 - DNA, 2300 bp, Homo sapien
ctcctattcaacctctgaaacccagctcaaatgccacctcctctggtaagccttcctaattgctctttgtacttttgtagcagtgtattaaggtggaacaagctcagttgtcgttgttgttttttgagacggggtcttgctccatttcccaggctggagtacagtggcaaaatcataggtcactgcagcctcaacctcctgggctcaagtgatcctcccacctcagcctcctgagcagctggggctacaggcacgaaccaccacggccggctactttattttttatgtttggcagagatgggggtctcattgtgttgcccaggctgggtcactcattgtctgacttaatttctgagtgtctatttcctgagatggggacaatggcttaacctatttgtaaagacaaggtacaggacatatcggggatcacatgggaatcacaaagccatcatgaggtgacacctgccatttgtcttatactagaattagttgagtgggaatgggactctgccttaatccatgaactccctgagggcagggacagtgtccccacagggcctaacccagtgttcagcgcagagcggcatcgtatgctctgtggacactgtacaaatgagaagaaacgggactgtatcatttacctgtaatgtgactttggggaggcgacatcatctcttttttttcttttttttctttgtttgagacggagcacggagtctctgtcgcccaggctggagtggagtggtgctatctcggctcactacaacctccgcctcccaggttcaagcgattctcctgcctcagccacctgagtagctggaattacaggcgcccaccaccacgcccggctaatttttgttggtcaggttggtctcaaacttctgacctcaaatgattcacccaccttggactcccaaagtgctgggattacaggcatgggctaccgtgcccggcctctgtgatgcttctgcatgtctaaaataacaagtgggtattgacctactatgtgtattcattataacattgctagccatatcactatccctcagcattttaattttacttttatagagatggggtcttgctgtgttgcccaggctggtctcaaaactgagctcaagcaatctcccacctctgcctcctgagtagctaggactacagacgcatgccaccatgtccggatactttttaaaagcatttaaatacttttaaaaattgttcttttcactctttttttttttttttttgagacggagtctcgctctgtcacccagcctggagtgcagtggcgcgatctccgctcactgcaagctccgcctcccgggttcacgccattctcctgcctcagcctcgcgagtagctgggactacaggcgcccgccaccacgcccggctaattttttttgtatttttagtagagacggggtttcaccatgttagccaggatggtctcgatctcctgacctcgtgatccgcccgcctcggcctcccaaagtgctgggattacaggcgtgagccaccgcgcccggcctcttttcacccttttgacaatttttaaatttttttaaatagagacgggggtcttgttatgttgcccaggctggtctcaaactcctggcctcaagcgatcctcccttctcggtctcccaaatcgctggaattacaggagagagccaccgcgcccggccagcaagtcagcgctcaccatctccaaccccattttacagaagagaaaactgaggcttggggagggctgcaaggcaggagccctcggcgcccggccaaagtcagaaatttgttgttgccatccgaggggaaaacgtgcacgggctctgcaaattgtaaccgcccggggtgggagagtccgtgcctgggggcgtggtgagccagggccggtgctggggcgcagagcagggcggctcagattccgggaggggcggggagatcgggttgctgggcgatcctggggtgctggaggcggcgcggcgcggccggggcggggaggggtgcggcccgcctcctccctgccccacccccagccccggcgccgcggctcctttaagagcgggaggggcgccccctggcggcggagcggtgcgtgcggccggagccggagcggatcctggagccggagcggagcggagcggagcggagccggggcggagcgggccgagcgggccgagccagcagccgagctgggggcgcgggcgggcggcatgtaccgggcccgggcggcgcgggcggggccggagcccggcagcccggggcgctttgggatcctcagcaccgggcagctccggg

SEQ ID NO: 38415 - DNA, 2300 bp, Homo sapien
taagcactgcaagttaaacagaaacaggggacttaagtgcagagtttgtcactctatttctgggaggggatgggctgcacagtgtgcaatggggctggctggtaaagggaggaccaggtgacagccagccacactgtctcaaggatgaacctggccctgctagcattatgctgtaatccctgtggattagaactatggataatagggccgggagcagtggctcatgcctgcaatcccagcactttgggaggctggacgggcagacagcctgaggtcggcagttcgagacctcagtctggccagcatggtgaaaccccgtatctactaaaaatacaaaacactagccaggtgtggtgggagcctgtaatcccagttacacaggaggctgaggcaggagaatcgcttgaacccgggaggtggaggttgcagtgagctaagatcgcaccactgcactccagcctgggcaacagagcgcaagactccatctcaaaaacaaaacaaaacaaaaaaccccccaaaaactatggataataaagcatgacagacctcaagatgccaaatgattttctcctctgctgtcatgcctacagagtaacttctccaaggtcacacattaaatatgggcacaggaacactcattccttatgctcaatgactttttctcactcctacatgctatcaacataaggaggagtgccccagggggctgaccttagcgggaggaacgacaggctctccaccgatcccattcttaccctggaccaggtctcacctgcggcttggggaagtcacagaaagacaagtttcgtacaaccccagaccttttcttttggtagtcaacaattggtcacattgcacatttcaaggttacagaggcccaccatacacatgcggggcaggaggagataaatcttgcttggggctaaacaataaagctacagcgagtgttccagaagttgaccacatctggaagcaagaagacagactctggaagaagcaccctagagactccaggaacccccttcactcctgggctttcgggactctacagcgtggggcctctttctcagacatcgaaaggcctccttttctggaccacagtggagcgatgtgcaggtcatcggctaagctgggcgggtcggggagggcagggggagtacagttccttcggatcccagcaaaggtagactatcaatggccaagggttcagaggcaggaaaaaaggccgtttctggggggttggctggggacactccccttcccttctctctccgattaaatataaaagccgatgatgatgaagattgaaaagatgaggaaaatggcagccgtgtctcgggtatcctcccagcggaggcctttcatggaccgatactcctgccgtttgcgaagggcctcccgccgggccctcaggcgccgttcccgctccagttgttccccgtagtgggcctggtagaaggcgtcaaagttgaacatcgtgcggttggcgccgggggaggcccgagaaccgtcgtgggtccgagaggtgggcggcggggtacgcggcgagccggggtcgggtgcgggcgtcctggagggccggacgccaggtccgcgcaggtcctcgtcgctgagtaggccgcgatcatacttgcgacggagggtggcactgcccagcaccacgtaggcctgggagatgcgcgtgaagcgctcggcggcctccgcgctcccggagttgcggtccgggtggtagagaaagcactgacggtagtaagccgccttgatttgggcctgcgtggctgtggaggggacgccgagcagatcatacagcgccgtgcgcgaatacgagcagtcgccctgggaataagtcctcgctcctaggcccaggctgggtgcagaattttgtggaaagccacgggcctgcagcaacctccaaggtaacagccgctgccaccatcgccagcgcatggctgccatgttgaattgattcggcaggcggtgcaagagaaaccggccaatgagaggagtcggttggtcgccctgtggccagtcacgtaaaggggggggcggggcggtcgtgggggtggaacatgcgtattactaagcggtcgccgggctgatgacataaaaaccgggtgccggcaggcgccagtcgcaggtgtgctgctgaggcgtgagaatggcgtcccgcggccggcgtccggagcatggcggacccccagagctggtaagtcccggggcccgcggacacccctctccccacttctgcggccaccgcgtctgaattattcctctacatgccattttctctttttcgcagt

SEQ ID NO: 38416 - DNA, 2300 bp, Homo sapien
cgcctgtagttccaactacccgggaggcgaggttgcagccactgcagcacttcggcctgggcgatagaatgagagcctgtctcacacgcacaaaaaattatcaagctatttcagccggtgtggtggcgagtgcctctagttccggctgctggggaggatggcttgaggctgcagtcggcagggatcatgccatggcactccagcctgggcaatagagagaccctgtccctaaaaaaaagaaacagtatccaatagctatttatttatttattgagtcagggtctcactctgtcgccaaggctggagtgcagtggtgcgatcgcagctcactgcaacctctgcctctcaggttcaagtgattctcctgcctcagcctcccgtaggcccggctaatatctgtattttcagtagagacgggatttcaccatgctggccaggttggtctcggaattcctgacctcaggtgatccgtccacctccgcctcccacagggctgggattactggtatgagccatagcgcccggccagtaaccatttactgaaatagggctagtctctcagtgagagagcacggaaaaaccacaaagtatcttttttttttttttttttttttttttttttttttttgaaacaaagtcttgctctgtcgcccaggctggagtgcagtgccgtgatgtcggctcactgcaacctccccctcccgggttcaagctattctcctgcctcagcctcccgagtagctggggttacagaaacccgccatcgcgcccggctaattttttccatttttagtagagctggagtttcgccatgttggccaggctggtctcgaactcctgacctcaggtgatccgtctgcctcagcctcccaaagtgttgcgattacaggcgtgagacaccgcgccagcttccccccgcccccatcccccccccttttttttttttttaacgactcgaggtgcgctggctcacgcctgcaatcccaacagttcgggagacgaaggcgggaggatcgcttgagccctgggcttgggccaccttgggcaacacagcgagaccccatcgcaacaaaaatttacaaaaaaaagccaggcgtagtggcgcgcgcctgtggtcccaactactggagaggcagaggggagccaccacacccggctaatttttttattacttgcggagacgggggctcgctacgttgcccaggctggtctcgaacccctgagctcaagcgatcctcccgcctcagcctcccaaagtgctgcgattgctgagattacacgcgtgagccactcccacctggctacaactcagtagttatacaaactaccctctatgaaattcagacaataatacaccaactgctgtcttggagatttattggcaacaaggcgccacgataagcatcctacggccattacttccttccccccaccaggactgacccctcgcccgtacccaccgcccagcgcctcttttaccacatgtttaggacaaattgtcacattcgactttgaaaaccacccacggaaagcaagcgcgatcacccctacctcaacgctgaggtaccgaggcccagagaggtcggcaacttaaagttgatttaccagagacagaaatcggcacccacccgggtccttcccttcccgcacccccaaattctacggcctttccgggcaacgccagcaacaggggcaacttgccgcttcccgacccccggacgccccgcagtattcaggctcccctcacttgcgaacgtatttccgggcttctgtctcgtcataaaactgcgaaaaagagaaaatggcatgtagaggaataattcagacgcggtggccgcagaagtggggagaggggtgtccgcgggccccgggacttaccagctctgggggtccgccatgctccggacgccggccgcgggacgccattctcacgcctcagcagcacacctgcgactggcgcctgccggcacccggtttttatgtcatcagcccggcgaccgcttagtaatacgcatgttccacccccacgaccgccccgcccccccctttacgtgactggccacagggcgaccaaccgactcctctcattggccggtttctcttgcaccgcctgccgaatcaattcaacatggcagccatgcgctggcgatggtggcagcggctgttaccttggaggttgctgcaggcccgtggctttccacaaaattctgcacccagcctgggcctaggagcgaggacttattcccagggcgactgctcgtattcgcgcacggcgctgtatgatctgctcggcgtcccct

SEQ ID NO: 38417 - DNA, 2300 bp, Homo sapien
cttgcctggcagccagctaacctgtgcccatagtctgggagaggtgccaggcccagacacactgggcagcagggggctggattggctccagagctccaatgctttggcagtcctggggaagggaagggatgtgcttggcttcaggtcaagagggtgtgggccacagaagtgacagctgggggtggtggagggcacagcgggcttatgggggtgtgtgcgagaccactgttgcaacaagatgctggcagggaccttcaaaagaacatctgctgttgactggcctccccactcccactcctccacaggttttcccatgagtcctagaggaagccaggccccaggcttctagatagaaaatagaacctacattggccaagtgtaatcccagtgctttggaagcccaagccaggaggatcgcttgaggctaggactttgagaccagcctgggcaacatgaggagaccccgtctttacaaaaacgaaaaaagagaaaatagaacctcaggcctagagccagagttcaggattggggatgcagggaaaggaggagaggggggccataactcaaatctctttcccaaagatagagtagttcctggctgggtgcagtggctcacacctgtaatcccagcactttgggaggctgaggcaggcagatcacttgaggtcaggagttcgaaaccagcctggacaacatggtgaaaccccttctctactaaaaatacaaaaaaattagccaggcgtggttgtgggtgcctgtaatctcaagctacttgggaggctgaggcaggagaattgcttgaactcgggaggtggaggttgcagtgagccaagatcgtgctactgcactccagactgggcaacagagtgagactccgtctcaaaaaaaaaaaaaaaaaataggccgggcacggtggctcacgcctataagcccagcactttgggaggccgaggcgggagaatcaagaggtcaagagtttgagaccagcctgctcaacatggtgaaaccctgtctctactaaaaaatacaaaaaattagccgggcgtggtggtgggcacctgtaatcccagctacttgggaggatgaggcaggagactcgcttgaacccaggaggcagagctgagatagcgccactgcactccagcctgggcgacaagagtgaaactccatctcataaataaataatcaaacaaacaaacaaacataaaaagatagaggagttccttcatcctgcaggaaaaaggggtgggtcacgcagcatcagagctgtgaactgagaaatcctagggaaagaagaggccagtgcctgagtccctactggatgatgggagcaagggggaagggtggaggctcccagactggaactctccaggaggtttttggctggggaacagaagggagagcaggaggtcccaaggtaatgaaatgaaggagggagttacaaccttcagcaaattctggggaagtgaagggatctgaggatgaggaccggattctgggacagggatgctgagctgctaagtcgggaagaggctggaagccaggcacggtggctcacgcctgtaatcgcagagctttgggaggagggaggatcgcttgaggacaggagttcaagaccagcctgagtaacatagcaagaccctgtctctacaaaatatttgaaaattattcaggagtagtggcgagcaactctagtcccagccacccaggagactgaggcgggaggattgcctgagctcaggagctcaaggctgcagtgagctatgattgcaccacagcactccagcctgggcgacagagcgagaccctgtctccaaaaataataaataaaaaacgagacagggctggggcagaggaggcagcagggtctctggggacccatccccgggagcgatcacgcgtgcggaacgtccaggacgagaccccagggcttcgatccccacggggctgctcgtgcggggtggggcggggtctgggcggggtctgggcggggcccgggcggggtggggcggggccggggtcccgggggccggggcggggccgggctggcgctgcgcagccgcggggcggccgtcgcgcatgcggggctcacacggctgcagccggcgccgctgccactcccgggagcatgaaggaccgaacccaggagctccgcacggtgagtccggccccagcgcgcggccgcccgccgcccgccgccagcgccaacgcgccggacacttcccgcccggctcccgcggccaggatggtggccgctcctgcgcccccagccagggctgaagggagcggggcgagccagg

SEQ ID NO: 38418 - DNA, 2300 bp, Homo sapien
acaagacatagctcccgctgtggacacacagggagggctgcctctataatactacacagtagcctctgagaaatgcttccagaacattccatgaaagagattagttttaactcagaaagtctgcgaaggcttgaggaggaggcagcagttatacaatgccttaaaaggcctatagctgaggccaggcatggtggagcacacctgtaattccagctactcagggggctgaggcaggaggatcagttgagtctgggagttccagaccagcctgaaactgtccccttgctatgcctagaacatagtaagactctatctctacaaaacagaaaaaaattagccagacatggtggtgcacatctgtggtcccagctactcgggagggtgaggcaggaagattgcctgggcccagggggaagaggttgcagtgagccgtgattgtgccactgcagtccagcctgggtgacgcagtgaaaccctgtctcagaaaaaataaaataaaagccatatacctgagacaggaaggtcgcttgaggccaggagctggagaccagcttgggcaaggtagcaagaccccttctctaaaaaaaattttgttgggccaggtgtggtggctcatgcctgtaatctcagcactttgagcccaggagttcgagaccagcctgggcaacatagcaagcccccgcttctattttttaaaaaaaaaattttttttttgagatggagtctcgctctgtcactgaggctggaatgcagtggcaagatctcggctcactgcaacctccatctcccaagttcacacgattctcctgcctcagcctccccagtagctgggattacagggccgtgccaccacccacggcaattttttttttttttaaacggagtctgtctccgtccggtaggctggtgtgcagtggcatgatttccgcccattgcaacctccgcctcctgagttcaagcgactctcctgccttagcctcccgagtagctgggattacaggcacccgccaccacgcccagctaatttttgtatttttagtaaagacggggttccaccatattggccagggtggtctccaactcctggcctcaggtgatctgcccacctcagcctcccaaagtgccgggattacaggcgtgagccaccgcacccggcctaaaaaaaaaaattgtaaccatgattcagtaaaaaaaaaaaaaaaaaaaaaaatgttaaaattagtctgcgcctgtagtcccagattctcgggaggcaaaggcgggaggatcgcttgagcccaggaggtcgaggctgcagtgagctacggtcgcgtcactgcactccggcctgggcgagggtaagacccccaccaaaaaaaagtataggactcgggcaactggctatctggaagacagacagcaccccagcaggaggtggggtgtggagaagaccttgaaaggcagggtgcctgataggggagtatgagaatggggagtatgggcagaaaagcaggtgggatcagactgggggagccttccccaaacgtaaaagggacgaaggggcttggggaagagctctagagtgcccccgagctccttctagatcgacgactccaggatgggtgggtgtccgtgctccgcccaacctgcccgggcccccggcagtggagcacggcgccaccacactggcactccgccgcccagagccaccctggcgccgctcgcccccgccggcggcacagaaacgatggcagccacccaggtcagtgagcgatggcaggtgcggggcgggaaccgagccctaagctgcaaccagaaccgagcacgcacagagcggcgcagaccgaattcccagattctacgcaccgcggcgcttcgcgaggggaggggcaagcaccgcgggttgcccagcctagggcgaggccaggtgcggcgctcagggcgacccgcgcaaagcctgcggggattacgtaatggcgtaaggggcggggatggaggcggggccggactgttctcggggatacgtaaggaaacgggaccaagggcggagaatcccgcgatgggggcggggagagggcggggctcaagtcggaactgggcggggcggctgaagacggaaatgggcggggctgcgagctagggcgggagaaggagcgcggggaggacgtaccttgtgagatgcgagccggccaacagcttgcaagcatgctccgctggacccgagcctggaggctcccgcgtgagggactcggcccccacggccctagcttcgcgagggtgcctgtcgcacccagcagcagcagcggcggccgagggggcgc

SEQ ID NO: 38419 - DNA, 2300 bp, Homo sapien
agcaagacactgtctctaaaataaataaataaataagttattgaacgttcccagcacaaagaaataaaagtttgagatgatgaatatgccaattaccctgatatgattactatacattctatgtattaaaacatcactgggtgtgccacgcgtaggtacgatcattgccaatttaaaatttttttaagtacaatgaaacataaataagaaaaatatagaatattgtccgatggtgttacatgctaagcagaatataaagtattaaaggggggcaggcattgtggggtaagaaactgcaattttattttattttattttatttattttattttgagacaaagagtctcgctttgtcacccaggttggagtgcaggggtgtgatctcagctcactgcaacctccacctcctgggttcaagcaattctcttgcctcagcctcccgagtagctggtattacaggcgtgtaccaccacgcctggctaatttttgcatttttagtagagacgggatttcgccacgttggccaggctggtctggaactccttacctcaagtgatccacccgcctcagcctcccaaagtgctgggattacaggcgtgagccaccgtacccagccagaagctgcagttttaaatagggtggtcagggaaagactcactgagagcaaaaagctgaaggcagttaggagtaagctatgtggatgtctgcaggcatgttccatgtacaggggacagtaagtgcagggactctgaggcaggggcatgtggtatgcaagggctgctctgaggggaagagaggggatggggttaggaacagcccaggctgaacctccaaggccaaatctgaagggctctgagcttggtgaagaagggggaacgatcgtccaggtgtgacagccagggctttgagtgtagcatttctgacttcccaacctttttttttttttttttttttttttttaaacagggtctgctctgatgcccaggctggagtgcagtggtgcgatcatagctcactgcagcctcgaactcctgggctcaagtaatttcctgcctgagcctccggagtagttgggactataggcacacgccaccacacctggctagttttttaattttttgtagagacggggtctcactattttgcccaggctggtgtcgaactcctggtctcaagcaatcctcccttctcagcctcccaaagtgcgaggattacaggagtcagccaccacggtgctcggtcctgcccgatttcccacttttgcggagatcgaacctctttcaccaccatttcattaaggtgggcctcagccctgactcaggctcaaagggagggaggacagggctcggagaggggaggggactcaatgggaggagggggacttctgggaggggagagcagcttagctaaaggcatgcaggctcacggccagcgatgggaactggagggagagctggagaggaatttgagcttagttaggcttaagggcatcttttgggtacctttgcgcaggcagtccctggcttctgggcccagcaattcctgggctggacaaccccaccgcccggactcaggctgagcctgtgcgacgtgtgtacgggaggggcagagcagcaggtgcgcggctcctgcaaacagccgcggccacgcccaccctggtcctccccgccccgccgttccggggtaattggcagcgcccccatccccacgcggcacgtgccaaaagcgcccaaagtggtgaggagagagaagccgtgtcaaattctttgggatttgcaccccaagcccctgacgcatcccgtcctcggttttgccccggagaattcattcccgagcagagagggacaaggaccgaggggcgggggctgggtcaggtcccgcccttccttggcaacccccctaccccggcgttgtgggccgcgcagggccaagtccttcctcccaggacgctcggtgaaggtgggaggcaggggccacgtcactgtccttaggccctggagagcgcggctccgcccctaccgcccccaccggagcgctgggcacttagctaagacgcaccggccccagcccagggccagcccagtcgccgccgcccgcccacaaagccacaggcaggtgcaggcgcagccgcggcgagagcgtatggagccgagccgttagcgcgcgccgtcggtgagtcagtccgtccgtccgtccgtccgtcggggcgccgcagctcccgccaggcccagcggccccggcccctcgtctccccgcacccggagccacccggtggagcgggccttgccgcggcagccatg

SEQ ID NO: 38420 - DNA, 2300 bp, Homo sapien
tgggattacaggcgtgagccaccgtgcccggcctactgttttttattttttaagagacaggatcttggtctgtcgctcaggctggagtgcagtggtgtgatctcagctcactgcaacctctgcctcctgggttcaagcgattctcccacctcagtctcccgagcagctcccgaccacaggcacacgccaccatgcccagctaatttttagtatagacggggtttcaccatgttggccaggctggtctagaactcttggcccaagtgatccttccacctcagcttcctaaagtgctgggattacaggtgtgagccactgtgtccgccctaggaatcaatttaatatacactggcttccctggctttagtcttcctgttcccagaagacgtggagtacgggctctgggagctagactgctcagctcacagagatctttttggctgcaggacagtggtccatcactggccctggggctcagatgccagcgggagcttggggttagaagggagactttgtttttgcccctttgctagggactcccagggagctgaactcagggcaagctgcatgtgtgtgtgttacaactggggacttggggccaggcggggtagctcacgcctgcaatcccagcattttgggaggctgaggagggcagatcacttgaggctagaagttcgggaccagcctggccaacatgctgaaaccctgtctctactaaaactacaaaaattagctgggcgtagtggcgagcacctgtagttccagctactcgggaggctgaggcaggagaatcgcttgaacctgggaggcagaggttgcagtgaaccgagattgcaccactgcactatagcctgggtgacagcgacattccgtctcaaaaaaagagaacaaaacaaaacaaaacaaaacaactggggacttggccaagcccctggaactctggggacaggggtctgaaaagtcctagctcccacctgttatgatcaggatccgaactgcgcagcagctgctttgcgtacggaactttgctccctcctcttgttattaaactttttggctcacaaagcatttttacttccttctctcatttcatgtgtatctcagactggggagtgggccccagtgttctcattgtacaaaggaggaagttggggctcagagatggaattggcttctccaaggtcacagggctggtaggatggcttatggatacacagcttcccagcttttgtcctgagctttttggctcatgaagcattttcacatccccatctcatttcacgtctgtttttgtttttgatcctggagggggtgcaacatcctcatttttacaaaggaggaagctgtggctcagagatggttcctgggctggaaagatggtttatggggtgggcagagatgggtgagctgatctggtggtttttatccttgatagaaaccagcaggtgtggccaggcgcagtggctcacgcctgcaatcccagcactttgggaggccgaggcgggcagatcatctgaggctggaagtttgagaccagcctggccaacatgctgaaaccctgtctctactaaaactacaaaaattagctgggcgtagtggtgtgcgcctgtactcccagctactcgggaggttaagccatgagaattgcttgaacccgggaagtggagactgcagtgagcagagatcgtgttgtctcaaaacaaaaaacaaacaacaaaaacaacaaaaaacaacaacaaaaaacaaaaaaaagcacgtgatccaattctgtcagcacaaaatcacacagtgcatgttataaagaagaaaaagaaaataaatgagtgccaaccctgtactctctgaccccaaaaccaaggtgatgaatggcagatgtcttataaggtgttcctgtaaaagatcttcgggctttgggaagagggccagatgcaggcctagaggtaaatttccttgttttcctctgccttagggctatgggagctggagcggagaggagagaagcaccttgcctttgctggtgtttttcccgcagcaggtgggtgggactgagccaacggtctcttggcatcaacaaagcatcaacaaatctctctccagctccacttgtgctgagctactggctgatccccaaggacatccttctggcctctccttcacacctgggtcccctagccctgcgtgagctctgtgcttcttcccctgccctgtgtctgctctatgcctggagcctctgtacctgccctctcctcaacccccaacccctccctgctctcagctcccgatacgcgtggctatgcctg

SEQ ID NO: 38421 - DNA, 2300 bp, Homo sapien
atctttttggctgcaggacagtggtccatcactggccctggggctcagatgccagcgggagcttggggttagaagggagactttgtttttgcccctttgctagggactcccagggagctgaactcagggcaagctgcatgtgtgtgtgttacaactggggacttggggccaggcggggtagctcacgcctgcaatcccagcattttgggaggctgaggagggcagatcacttgaggctagaagttcgggaccagcctggccaacatgctgaaaccctgtctctactaaaactacaaaaattagctgggcgtagtggcgagcacctgtagttccagctactcgggaggctgaggcaggagaatcgcttgaacctgggaggcagaggttgcagtgaaccgagattgcaccactgcactatagcctgggtgacagcgacattccgtctcaaaaaaagagaacaaaacaaaacaaaacaaaacaactggggacttggccaagcccctggaactctggggacaggggtctgaaaagtcctagctcccacctgttatgatcaggatccgaactgcgcagcagctgctttgcgtacggaactttgctccctcctcttgttattaaactttttggctcacaaagcatttttacttccttctctcatttcatgtgtatctcagactggggagtgggccccagtgttctcattgtacaaaggaggaagttggggctcagagatggaattggcttctccaaggtcacagggctggtaggatggcttatggatacacagcttcccagcttttgtcctgagctttttggctcatgaagcattttcacatccccatctcatttcacgtctgtttttgtttttgatcctggagggggtgcaacatcctcatttttacaaaggaggaagctgtggctcagagatggttcctgggctggaaagatggtttatggggtgggcagagatgggtgagctgatctggtggtttttatccttgatagaaaccagcaggtgtggccaggcgcagtggctcacgcctgcaatcccagcactttgggaggccgaggcgggcagatcatctgaggctggaagtttgagaccagcctggccaacatgctgaaaccctgtctctactaaaactacaaaaattagctgggcgtagtggtgtgcgcctgtactcccagctactcgggaggttaagccatgagaattgcttgaacccgggaagtggagactgcagtgagcagagatcgtgttgtctcaaaacaaaaaacaaacaacaaaaacaacaaaaaacaacaacaaaaaacaaaaaaaagcacgtgatccaattctgtcagcacaaaatcacacagtgcatgttataaagaagaaaaagaaaataaatgagtgccaaccctgtactctctgaccccaaaaccaaggtgatgaatggcagatgtcttataaggtgttcctgtaaaagatcttcgggctttgggaagagggccagatgcaggcctagaggtaaatttccttgttttcctctgccttagggctatgggagctggagcggagaggagagaagcaccttgcctttgctggtgtttttcccgcagcaggtgggtgggactgagccaacggtctcttggcatcaacaaagcatcaacaaatctctctccagctccacttgtgctgagctactggctgatccccaaggacatccttctggcctctccttcacacctgggtcccctagccctgcgtgagctctgtgcttcttcccctgccctgtgtctgctctatgcctggagcctctgtacctgccctctcctcaacccccaacccctccctgctctcagctcccgatacgcgtggctatgcctgggagggaaggacagcttcttagggccacaggtggactgttgtagggcttgcatgctcccctcccccatgcctgcttctccaagtggcacttggctgtgtcccaggaaagcaagggcaggaagtggcagggcgggggccgggggccgggggggcaggaggcgggcggggggttggggggggcaggttctggccatctggccaagtcacgtgtctactcagaaagcttgttaaaggctacctggctgggaccacaggtaagaggcacctggggaaggaggcacccatgctggagtgcccacccgtcctgggcaaggccctggccttctctgggcttcagtgtactcctttgagccaaggcaataaaagtccctgccctgctgactggcaggaggctgtgatgaggtcatctccaggaaagcacttatcgcca

SEQ ID NO: 38422 - DNA, 2300 bp, Homo sapien
tactctaatatctcccactctcctccaacgctacagggttccttctactcatcaccctgtaaaaccagaaaatctaagacaggtctcagttaatttggagagtttattttgccaagattgaggacgcacgcctgtgacacagcctcaggaggtcctgacgtcatgtgcccaaggtggtcggggcacagcttggttttatacattttagggagacacgagacatcaatcaatatatgtaagaagtacattggttttgtctagaaaggtggcgacaactcgaagcagggagggggctccgggtcacaggaaggtgaaagacaaatggtcctattctttgagtttctgataagcctttcccctgtaatctcagctactcagcaggctgaggcaggaagtggaagttgcatgagctgagattgagccactgcactccagtctgggtgacagagcgagaccccatctcataaaaaaagaatgccttcaccatctgggaatgcagtccagtaggtctcagtcttattttactcagccgctattcaagatggagttgctctggttcaaacatctctgacacttcgacacttctaccccctaaacatctctgaagatcacccactcctctccgcagtcatgacctctacccaaggtcatgcaaccatcacctcctgcctggacacctgcaacagcctgccaaattctgcctgcccaaacccttgattccaacacaggtcctctagaccagcgcttctgaaccttcagctgcctagaaatcgcctgcagagtttgtagaaacacagaaactctgggccccagtcccagaaatctaattctcattcagaaggtcccaggtcaactgagaatttttactttttttttttatttgagatggagtcttgctctgtcacccaggctgaagtgcagtggcgcagtctctgctcactgcaatctgtgcctcccaagttcaagctattctcccacctcagcctcctgagtagctggaattacagatgcccgccaccacgcccggctaatttttgtatttttagtagagatggggttttgtcctgttagccaggctggtctcaaactcctgtcctcaagtgacccgcccacctcagcctcccaaagtgctgggattacaggtgtgagccactgcgccccggcctaatttttgcatttctcacaagcttccctagggcatctcctagaggaaaccaagatgttacggaggctgacgctgcgtatcttcaggtcacacttccagccgcaagactctctctgctgtccaatacagtagccactagccacatgtggctatttaacttattaaaataaaatttgccagtacggttttttaaaataaaattattaaaataaaatttgccaggaggcagaggtgggagaatcgcttgagactaggagtttaagaccagcctggacaacattttttgtctctacaaaaactacgaagataaaaataaatagataaaaatttaaaaagccgggcaaggtggcatgcacctgtagtcccagctactcagctactcagaaggctgaggcaggaggctggcttgagcttgagttcaaggctgcagtgagctatggtcaagccactgcactccagcctgggcgacagagtgagaccctgtctcataaaacaaaacaaaaataaaacaaaataagtaaatataaatacaaagtaaaaatgaaagctaatcctaggtccctctcctgcccataagaattcagagactccccagtgcctacaaacctcatgctttcaggaagcataaaggacttcaggaggcaggagggcagttggagggggatggtggaggtgctgctacctgacggtggagggggaggccggggccagaccaccgagaagcccctaaacccgcacagcaggaaaacatctccgcagtccctgctctaccaaggctggaggagggccacaagccttgagctcattggctggcggggggggggggggcgggcagactgccagcgccttcctttgactggctattttctctcagcggaaaaccaatcattgcgggcaggcggtgagggtgtggccagggtcgcaacacaggccccgccccgagtcctgttgcccacacgcccgaggcgcgctggattggcggtgagttctgactccggcctccttcgagaccgtttcgctccggatgtcgcccacctccgaccctctctcagtcggagggcggaaaagaggaagataggtccttcctccagccgcggggcacccccttctcccaccttgcccttcccccagccct

SEQ ID NO: 38423 - DNA, 2300 bp, Homo sapien
ggtcttgacatcctccaattctatctgttgtacctgctacagatttctggcatctgttgtctccatttccagggcctcagccctggtcaaggctcccatcatcacatgtctaggggtttatttgttctggattcctttttgctgtccctaccccagagtcctctgccttagtttccatgcacactgcttgagccgcctgctgcaagacccccacccgaccatctgctggagggctttctctggtgtttgtgctggtaagattggaggttcagcgggagttaatgtccaacaggaagcagacaggtcatggaagataaataccccagtattcatgctccttgggtggggtgactctgaggtgcgttctgcaccattttccaggggattttggggatcagccccggttgtctgaactcaaaccctgctcatgaactcatctgtccttgcctctctttcttttctttctctttcttttctttccttccttcctttttctttctttctttctttttctttctctctttttctttcttttctttctctttctttctttccttctttttctttctctttctttctttttctttctttcttctttctttctttctctctctctctctctccccctcccctcccctcccctccccttccctctttttatcacagagtctcactctcttgcccaggctggagtacagtggcatgatctcagctcactgcaacctctgccttctgggttcaagcaattctcctgcctcagcctcctgagcagctgagattataggtgcacgccaccatgccaggccaatttttttttttttttgtatttttagtagagacggggtttcaccatgttggtcaggctggtctctgctgagaccagcttggctggggagaccctaacccagcagcactagaggaattaaacacacacacacacacacacacacacacacacacacacagagaaataaagaggtgtgaagtgggaaatcagggggtctcacagccttcagagctgagagcctcaaacggagatttacccacgtatttattaacagcaagccagtcattagcattgtttctatagatattagattaactatagattagattagattcccatagaagtatcccttatgggaaacaaagggattgggcccaaataaagggatgtgtttggctagttatctgcagcaggagcatgtccttaaggcacagatcactcatgctcttgtttgtggtttaagaacgcctttaagcagttttccgccctgggtgggccaggtgttccttgccctcattccggtaaacccacaaccttccaccgtgggtgtcatggccatcacgaacatgtcacagtgctgcagagattttgtttatggccagttttggggccagtttatggccagattttgggggcctgttcccaacaggtctcaaactcctgacctcgtgatctgcctgcctcggccttccaaagtgctgggattacaggtgtgagccactgtgcctggccccttgcctcactttctgacttcctatggatgcttgcagggcccactccccaaataaactcatcacccttcaattttttttctttgtttagagatagggtcttgctctgtcacccaggcttgagtgatcctggctcactgcaacttctatctcctgggctcaagcgattctcccactttagactcctgagtagttgggactacaggtgtgcatgaccaaggctggttaatttttttctttttttgtttttttgtaagacagggtcttgctatgttgcccatgctggtctcaaactcctggcctcaagcgatcctcctaccttggcctcccaaagcattgggaatccaggcatgaaccccgttcctaggcggcacttgattcctgttccaagatctggggaaatccgacccgaaggaagctttgctctaagacctccttggccgtgttgggctcagacgtggactgaggtttcagaggaagcagtggagcggcaggagccaggtaaaggcagtgggtcactggcggcaaccgggtccccatggtaacttggtccccaccctgtggcatctgtgaggtcaccctgcttctcccagctggagtaggtgggggaggccagacatggaggcccttcctccagtcagatccagccttttggggatcctgttgcaggttacgaggctctcagtgctggtgagtgggggctgggggtaagtggggtggggaccacacaccaggcccttcacagagccacctcagagctgccgggcccaagccctgcctgt

SEQ ID NO: 38424 - DNA, 2300 bp, Homo sapien
cttcccctcccctgcagcaggcacatcctgggcatcgagcttcagaccctgcccctgagcagcccctaaccccaccaacaaagggtggcttgggggggctttcaccccagcataatctccatcagctaccctcaaagcacccccaaataaacacacaccgtaagtaagagctgtacactggctgtgtgcgtacatcttcaagacaattctcccagcatgcccctaccttccaaaattccagagctgctccctccaaagacccagggaaaaggaagggtttgtccagggtcctggggtggccccgtatagaccaaagcctgatagctgtcctagaagcagagtacttgcagagcgagtgacggcaactgtggtattgacaccagtcctagcaccagctgaacacagagcatttttgatctagcagaaatacaagaccacgttgtatttgtctttgcaataatctcttagctaggaatactgatcacctgtagacagataaggaaactgatgctctgtggagaggttttcctaccagaaaggctagagccagaaatttacttctaggtccaccaatacctgcctttgaccaatgcctgcatttgacctttccacgctgagccacccctgctggcactccagactgccacagtgctcctgcctccacaaggggtctttaactcatccctcggagccatcgtggtgcagggaaaagcccacagggcgtgtggcttccatgctgttccctgactggctgtgacctaggacaaggaacaagtttccctctcctattctctaggtctcacatttcttctcctctagcagtagtgggaagtgaggggtgggggacacgaccctcccctgttccatcccacactccaacccccaaaatcccccagggtccccgtccagctcagtcctgggggcagaaatgcagagttctccaggaacgtggtcccagctgtttcagtgcaggccgccccctcctggccaccagcggaatgtcagccttcccagaggggccgggagaacagcagtcgagaagctcccagactggtgtgggcgctagctgtgctcagcgtggggatgggaggtgacccagtgataatgggaagctgggctgcctgtcagtctgcggggggctcccacctccctgttcccccacagggcacctggggatccagcctgatttttaccagaccctgcggcctgcatggggctgggtatagggctgtgaccttgacccatgcagaatagaaccctgtgtgtcgggatcctccatgtgctccagatgcccctggggacagcaccaacatggccttaactcccaagccattcccctgcctctaaccccctggcatctgcaggcatccaccccagacccacccaacacctcctccccagcttcaggcgctaggcagagaccttggcccctgcagaatgcagccctgtccagggtcccctaccttccccccagatccctcccagagcaataccaacccgggcctaccttccaggccattcaacctgcagccccccggcctctgtagacatcgcaccccccaaacccccagacctgcccaatgcctcccctccccagctttgggcagaacctgtctctagccagacctgggggtgttggggagtctggagggccggggtgggggctgaggcgcgggacagctggcccgtatcctcacactgggcccggggcccagccggaggggcgggggcctggccactcgggccttggctggggctgggatttttggcctggccgccaggccctcccttctgcttcctctcccgagggctgtcctggcagaggcccccctcgctctttctggcgggaacagggccagcagcgaaagaacagtcgcagagggaaagcgggaaagagatgggggaaagtgtgtgtgtgtgagtgtgtgcttgtgtgcatgtgtgtgcgtgtgtgtgtcaaggaaaaaagctcgcagtccagcagcccgggcctgggaggcttgtgagccgggcctttcgtaattgtcccctccccgcggccccctcccccaggcctcccccctctcccgccctcccgcccgccctctctccctccctctttccctcacagccgacgaggcaacaattaggctttggggataaaacgaggtgcggagagcgggctggggcatttctccccgagatggcgggtctgacggcggcggccccgcggcccggagtcctcctgctcctgctgtccatcctccacccctctcggcctggaggtaaggacccctcgcccctgtccccagcgctgccca

SEQ ID NO: 38425 - DNA, 2300 bp, Homo sapien
ccagtgcattgcaaacatcccctttatcaaactctccccagttagccccactaagtggcactttctgtttccagccagggtcctgcctggtatatgccctacagccaagttacaaggctctcattcccctctctttccttcccctttttttccctccctatcttttttgacagggtctctgtcacccaggctagagtgcaatggtgcaatcatagctcactgcagcctcaacctcctgaggtcaagtatcctcccacctcagcctcccaagtaactaactacaggcatgagccaccatgcctggctaattaaaaaaaaaaaaaaaagtctgggcgcggtggctcacgcctgtaatcccagcactttgggaggccaaggtgggtggatcacctgaggtccagaattcgagaccagcctgaccaacatggagaaaccccgtctctattaaaaatacaaaattagccaggtatggtggtgcatgcctataatcccagctattccagaggctgaggcaggagaatggcttgaacccgggaggtggaggttgctgtgagctgagatcgcaccattgcactccagcctgggcaacaagagtgaaactccatttcaaaaaaaaaaaaagttagaagagacagggtttcacttcattgcttaagctgatctccaattcctggccccacgtgatgctcccaccttggcctcccaaagtgctgggattataggtgtgagccactgtgcccagccttctttctcatgagaaattaaaaattctggccaggcgtggtggctcacacctgtaatcccagcactttgggaagccgaggagggtggatcacctgaggtcaggagttcaggaccagcctggtcaacatggtgaaacctcatctctactaaaaatacaaaaattagtcggtcatggtggtgcacgcctgtaatatcagctactcgggaggctaaggtgggagaattgcttgaacctgggaggtggagactgcggtgagccgagatcccgccactgcactccagcctaggcaacagagcgagaccgaatctaaaaaaagaaaaaaaaaatctagtattttcttcccaccccacgtaattgttttgcacccaggggtgagtgccccccactttgcagacgtgcctagacctctccccacaaacatgatgactagagttggagctgggctagcgctgcctcttgttcactgggttcacgtgggcacgtggctccactccggtcactgcttcctgggcagagggatgacgtggaaggtagacctaggggggacagggttgcttcctgcccatgtccagcattctagaattgtccacatctaggcagggcgttccaccatcagtgctggactggaccacccaattcctttggacgcttgactcagcccaaacccgtgctccctccaggaccctgggcagggcagccccagctccaggtaatcggcactgagaagagtacacctgtcaccgcctggcaggggctcgctcctttctctggtgctgctcattcgcgaggcctgagacgcggaccgtcaccttccccgggcccagcctggcctcaatgcaggcctcagagagagggacaaaacccggcccgcctccctcccctccccaaggcgaccaccagtgtcctgggggtccacagggcctctccagctctgatccgagttcccggctgcagctggtttgggtctgtgggggcctcgcgcagggaagcggaggccccttctctaggctcctacatcctcctggcctgccccagcagagctagcggccctccgagacagctgggcctcgcagctcccagccgaggcctgtcgctgggagaaagaagaatgaatgaagggcggaaggggcggggaggggcggggcgcgccgcgccagctcgcggcgcccccaggccgggccgcagcggggcgtggcctctagaggcgtggccttgggcgtgggggcggggttttctggtgggggcggggccgcgcagggccgttcccgccgccggccgcccgcgccccgcccccgtgccgcagctcacaggccccgcctcggtccgcccctccgctcgctccccaagccgccgcggcgccgagccggtttccccgccggtgtccgagaggcgcccccggcccggcccggcccggcccgcgccctccgcccccgcctccccgggccggcggcggtgggcgagctcgcgggcccggccgcccccagccccagccccgccgggccccgccccccgtcgagtgcatgaggttgacgctactttgttgcacctggaggga

SEQ ID NO: 38426 - DNA, 2300 bp, Homo sapien
gaactcctgacctcaagtgatcttcccacctcagcctcccaaatagctgggattacaggagtgtgccaccatgctcagctaattttctgtaaaaaatgtcatagagatggggtcttgctatgctgcccaggctggtctcaaacccctagtctcaagcaatcctcccaccttggcctcccaaagtgctgggattccaggcatgagccaccacacctggccctgtttttcttaaagttctcagtctcctctctgccttacccccatccccttttccatctccaggacctagggcagagacaaagtgagcattccctaaaaagcttttatgaggcaaaatgaaaaccagctcacgcctataatcccagcactttgggaggccaaggtgggtggattacctgaggtcaggagttcaagaccagcctgaccaacatagagaaaccccatctgtactaaaaatacaaaattagccaggcatggtggcacatgcctgtaatcccagctactcaggagcctgaggcaagagaatcacttgaacctgggaggcggaagttgcaatgagccgagatcactccattgcactccagcctgggcaacaagagcaaaactctgtctcaaaaaaaaaaaagaaaagaaaagaaaaccaggtccctaacaccgaagagttaaaagaaataagtaaatttggcaaattggtctttttgtgagttagcttataggcaactgatcgagggtctctttcccgtcttcaccctgcaattgtggctcagggcaagctgccagctccctcctgccaatgcaggagcaatagagcttggcctcctcttgcagggcgagtttgggagtcagatatgaagccactaatccgggacctttttgggacccaaggcactcatctgccccaagcataccaggcaggccaggtgcaatgactcatgtctgtaatcctagcactttgtttttgcgacggagtctcgctctgtccacccaggctggagtgcagtggcagaatcttgactcactgcaacctccacctcccaggttcaagcaattcctgcctcagcctcccaagtagctaggactacaggcgcccactgccacgctcggctaatttttgtattttcagtagagacggcgtttcaccatgttggccaggctggtctcaaactcctgacttcaagtaatccatccaccttggcctccccaactgttgggattacaggtgtgagccactgcgcccggccagtcctagccctttgggaggctaaggcgggcggattgcatgagctcaggagttcgagaccagcctgggaaatgtggtgtaaccccgtctctactaaaaatacaaaaaaaattagctgggtgtggtggtgtgcacctgtaatcccagctactcaggaggctgaggtacgagaatcgcttgaactcaggaggcagaggctgcagtgagctgagattgtgccattgcactccagcctgggtaacagagtgagattctgtctccaaaaaaaaaaaaaaaaaaaattcgagaccaaacatacctgggatttggaaggatagatctgttcccccagggtggagacaatggtccattgaatgggaacagctgagcatcttgtgtgggtggccagtgcctacaagcgtgccacctttctccagctcacacctgtggcagacatcagtaattgattacagaattcctcccctgaaaccagaactcggtgttctggccatctgctacttcccagtcacacgaagtagaatcctccacctgctcaccctggatctggtgcccttcgccttggtttcctgttggggctctgagggacaggtgggcactggcctgacccctgccttacccacagagtggatccgggctgcatgagcccagatgtgaagaattccatccacgtcggagaccggatcttggaaatcaatggcacgcccatccgaaatgtgcccctggacgaggtacggtcctgagtctgtggggcaggacgggaggtagtgccttcatgcctagccccctccccactccacccccattcacatgcctgctgtccccagattgacctgctgattcaggaaaccagccgcctgctccagctgaccctcgagcatgaccctcacgatacactgggccacgggctggggcctgagaccagccccctgagctctccggcttatactcccagcggggaggcgggcagctctgcccggcagaaacctgtcttgtaagtcagcctgctcctcggttcagctgggtgctttcactcctgctggggctcaggggctgtgggacc

SEQ ID NO: 38427 - DNA, 2300 bp, Homo sapien
ctaccaaaaacaaaaaaaaaaagaaagtaaataagagtaatagagtaatgggggcaggagcatggagcaggggtccaagtttaaactgcgcaaggagaagaaaccattggttattttctgagccatgtgctaaggtcaaaactaggtgaccttgggcaagtctctttctctctgggtggttccacagctgttaaacaggtttggaaattattatctacaggtaaagcacccataatggtgccagacaccttggtaggtccccaatatatattgtgtgccaggaattttacatatttactaatttgaatctttacaacactgaagaggtaggtgacattattatatagatgagaaaacaggcatgttaaagcggttaagcaacgtcctcgaggtcactcagccagtaagacgttaactgagcctaggttcaatctaggtctatcaggcagcaaagtgttttattacttgggaagaaaaaggcacagaaaaatgaataagtgagttcaacactattaactcatgaattgataatgctctgtccatcttaacactgctatgaaggagaagatactcaaatataaaagttggcagggcacagtggctcatgcttgtaattccagcactttaggaggcagaggcaggaggactacttaaaagccagtagatcgagacaaacctgggcaacatagtgagactctgtctctacaaataaatgttttacaaagcaaattagagccaggcacggtggctcatgcctgtaatcccagcactttgggaggccaaggcgggtggatctcagttcaagaccagcctgggcaacatggtgaaacgctgtctctactaaaaatacaaaaattaactgggtgtggtggtgcacgtctgtcaccccagttactcgggagacagaggcaggagaattgcttgaaccgaggaggtggaggttgcagtgagatgagattgcgccactgcactccaacctgattctccatctcaaaaaaaaaaaaaaaaaaatgcaaattaggcgaggtactgcccgcctatagtcctagctactccagaggctaaggcggcaggatggcatgagcccaagaggtcaaggctgccgtgagctaccactgttccaccgcagtccagcctgggcgacagagcgagaccctgtctcaacaacgaaccaataaatacataataaaaagtaatggttaagcggaagatacctaggtacacatcacaacaaaattctatgaggttctttcaaagtgtgcttagataattaaggtttgtcaacatcgtggcatccacaattactaccatctcaatcacaaacctggaaatttacccgtgtaattaattcccactgcataaccatgttttgttattgctagatgatggaatccacaacagtatccaattctttttccaaggcaacgacttctgcaaaaaaccgagatgtgcagtctctcttgctaagtcaccgatcacctatactctctcctctcaaaaccccccaatacccaggcagcgagtaagccctggaaggcaggattcgtgtctgcatcccaccgcctcgcacccccttccggggcatcctcatcgtgtggccagctcctgcctggagaaggaggtggcctttacttgggtgtcacccggggaccacttgggggtccaagcgggacaggcctccgaggtccccgccatgtatggaggccgaaaggcagcgtcccaggcgaactggagagggagttccccccagctctccaggtcacctcccgccgacggacggaaaggccggcgcgcacgggcgtggtgcggcggggataggaggcagccacgggcgcaccccagggccagcacataatgggccgcgtaggccgggcaggcgtccagctgggacgccgccgcaccacgtgggctgcagagcgcacggggcaggcagctgccggtgggcccagggccgggcgctgcgcggccagcgtccgtgcgtgcgtgcgcgcgcgcgcgtgcgcgtgcctgcgtccaagggatttgcgatcaggcggcgcggcggacagccccggcggcggggcggggggagttatattgcggggtccttcctcgctcaccctggttcctctcggagcggagacggcaaatggcggacttcgacacctacgacgatcgggcctacagcagcttcggcggcggcagagggtgaggcgggcgtgcgcgggccccgtcgggggctgcgggaccggcggagtcggggccgtcagggtggcggccgtcctgcgctcagccggggcggcgggaggcgggggcccgcg

SEQ ID NO: 38428 - DNA, 2300 bp, Homo sapien
caaaaaaaattttaaaaaaggggaaagaacagcaggtaacctctatccaggtgcacagtctggggctgaagggaaactgttgcaggcttgttcccattgtgtgaggaggagccagtcagggggtcccagtgaggaagccaggctttggggtctgggttcaaattcagcttcacctctggaccgagtgagaccctgtctcaaaaaaaaaaaaaaaaagcaggcgaggaatagagacagagggtcagacagcaagagtcccagaggatgagacagatggacacagagacaaaggatgcgggatgtaggtgggcagggcagggacagagagacccctgcagaggccacgagggcagggcagatggaacaagtgaccaaagacaggtggaggagtggacggcacgagtgtcagaggctgcagacagcgagggcgctaaagggtgggagaaggaaggagagccctgctccaccccagccttgggggtctcatcaccccactgcacagatgaggctcctggcatcggggtgcagagaacggctcatagcacaggcagagggaccacagcccactcctgcccagcggtgctcctgtgcccagccctggggtggacaccgtggctgccatccacacagacatgaggaccgagtgagatagttccctgtggaggccaggatgctctggcacctgaggtcaataaagccacatcccacaagtgggtggactgccttgtgctattgaccattaaacagctgcccaaggccattgagctattaattaaataataattattattattttaaatttttttgttgtgttttttgggtttttttgtttttgttttgtttttttgagatggagtctcgctctgttgtccaggctgtagtgcagtggcacgatcttggctcactgcaaactccgccttctgggctcaagtgattctcctgcctcagcctcccaagtagctgggattacaggcacccaccatcacacccggcaaatttttgtatttttagtagagatggggtttcaccattttggccaggctggtctcaaactcccgacctaaataaggtgatccacctgccttggcctcccaaagtgctgggattacagatgtgagccaccacgcccggcctatttattgtttttacagacagacagggtcttgctgtcccccaggctggagtgcagtggcagagtcacggctcactgcagcctccaactcttgggctcaagaaatcctcccgttttggcctcccaaaacactgggactacaggtgtgtgccaccacacccagctaattaaaaaaatttttttagagatggggtctcgttctgttgtccaggctggtctcaaattcctgttctcaagcgatcctcctgcctcagcctccaaaaatgttaggattgcaggtgcaagccactgcacctggcctctatctccctgtttcttgctctctccccatctgtgtgtgtctctgacagtctgtggctctctgtatctttctgtgtgtctctctgtgtgtgtcttggtccatctcatgcccagctaatttttaaattttttgtagagatggggtttcaccatgttggccaggctggtcttgaactccagacctcaggtgattctcctgcttcagcctcccaaagtgttgggattacaggcatgagccaccgtgcctggcccatgggtatgaatttctgcctgtgtgtgtcttcttctttttttttttttttttgagatgaagtcttgctctgtcacccaggctggagtgcagtggcgctatcttggctcactgcaacctccacctcctgggttcaagcaattctcctgcctcagcctcccgagtagctgggattacaggcacccgccaccacacccagataatttttgtatttttggtagatatggggtttcaccatgttggtcaggctggttttgaacccctgacttcatgacctgcctgccttggcctcccaaagtgctgggattacaggcatgagccaccgcgcccggcccatgggtgtgaatttctgcctgtgtgtgtctttttagcgtatgtgtgtctccatatctgccatctgcaggagcacctcagtttcattatcttgctccctgtctattggagtgtatctctcttcctctctgtgtgactttttgtgtttatgtgtgtgtttagtgtgtgtccatattttcctgttctcttgtgtctctctgctgtgtctctctctttttctttctgttttttgagacggagtctccctctgtcacccaggctggagtgcagtggtgcgatctcggc

SEQ ID NO: 38429 - DNA, 2300 bp, Homo sapien
agagggaccacagcccactcctgcccagcggtgctcctgtgcccagccctggggtggacaccgtggctgccatccacacagacatgaggaccgagtgagatagttccctgtggaggccaggatgctctggcacctgaggtcaataaagccacatcccacaagtgggtggactgccttgtgctattgaccattaaacagctgcccaaggccattgagctattaattaaataataattattattattttaaatttttttgttgtgttttttgggtttttttgtttttgttttgtttttttgagatggagtctcgctctgttgtccaggctgtagtgcagtggcacgatcttggctcactgcaaactccgccttctgggctcaagtgattctcctgcctcagcctcccaagtagctgggattacaggcacccaccatcacacccggcaaatttttgtatttttagtagagatggggtttcaccattttggccaggctggtctcaaactcccgacctaaataaggtgatccacctgccttggcctcccaaagtgctgggattacagatgtgagccaccacgcccggcctatttattgtttttacagacagacagggtcttgctgtcccccaggctggagtgcagtggcagagtcacggctcactgcagcctccaactcttgggctcaagaaatcctcccgttttggcctcccaaaacactgggactacaggtgtgtgccaccacacccagctaattaaaaaaatttttttagagatggggtctcgttctgttgtccaggctggtctcaaattcctgttctcaagcgatcctcctgcctcagcctccaaaaatgttaggattgcaggtgcaagccactgcacctggcctctatctccctgtttcttgctctctccccatctgtgtgtgtctctgacagtctgtggctctctgtatctttctgtgtgtctctctgtgtgtgtcttggtccatctcatgcccagctaatttttaaattttttgtagagatggggtttcaccatgttggccaggctggtcttgaactccagacctcaggtgattctcctgcttcagcctcccaaagtgttgggattacaggcatgagccaccgtgcctggcccatgggtatgaatttctgcctgtgtgtgtcttcttctttttttttttttttttgagatgaagtcttgctctgtcacccaggctggagtgcagtggcgctatcttggctcactgcaacctccacctcctgggttcaagcaattctcctgcctcagcctcccgagtagctgggattacaggcacccgccaccacacccagataatttttgtatttttggtagatatggggtttcaccatgttggtcaggctggttttgaacccctgacttcatgacctgcctgccttggcctcccaaagtgctgggattacaggcatgagccaccgcgcccggcccatgggtgtgaatttctgcctgtgtgtgtctttttagcgtatgtgtgtctccatatctgccatctgcaggagcacctcagtttcattatcttgctccctgtctattggagtgtatctctcttcctctctgtgtgactttttgtgtttatgtgtgtgtttagtgtgtgtccatattttcctgttctcttgtgtctctctgctgtgtctctctctttttctttctgttttttgagacggagtctccctctgtcacccaggctggagtgcagtggtgcgatctcggctcactgcaacctctgcttctgaggttcaaacgattctcctgcctcagcctcccgagtagctggaattacagacacatgccaccatgcccagctaattttgtatttttaatagagacggggtttcaccatgttggccaggctggtcttaaactcttgaccttacgtgatccacccgcctcggcctcccaaagtttttggattacaggtgtgagccacctcgcccggtcctatctctctttcttctctttctccctctcactttgtttctcttctctctctctctcccgcctccttcccccgtctcccctcccttccccccaccgccctcttcatagctgagcctgtccggcagtgcggcggatgtacggatgattcagtggctggcaggaagcccgccctgcccgcccgccagtgtcagtggtgttggcatcagcttgggcaggtgtgcgggctcaggatggggcggccgtggtgaggaaccctggactctcaggtaagcctttcccaggggtgcctcagtcctcaggctgtcccccatcccccaggagc

SEQ ID NO: 38430 - DNA, 2300 bp, Homo sapien
gtggacactcgggagtgttggctccacaaatgcccaccatactcaaccccttcagagaccccaccaccctcaactctgtccccagccatctccagggggccaggtctccttattattattttttgaaacggagtctcactctgttgcccaggctggagtgcagtagcatgatcacagctcactgcagccatatatatgtatatatatatatatatgaaaaaatatatataaatatatatatatgaaaaaatatatataaatatatatatgaaaatatatatataaatatatatatgaaaatatatataaatatatatatgaaaatatatatatgaaaatatatataaatatatatatgaaaatatatatgaaaatatatatatgaaaatatatatgaaaatatatatataaatatatatatatgaaaatatatatataaatatatatatgaaaatatatatataaatatatatatgaaaatatatatataaatatatatatatgaaaatatatatataaatatatatatatgaaaatatatatataaatatatatatatgaaaatatatatataaatatatatatatgaaaatatatatataaatatatatatgaaaatatatatataaatatatatatatgaaaatatatatataaatatatatatatgaaaatatatataaatatatatatgaatatatatatatatatatgaaaatatatatatatgaaaatatatatataaatatatatatgaaaatatatataaatatatatatgaatatatatatatatatatgaaaatatatatatatgaaaatatatatataaatatatatatgaaaataatatatataaatatatataaatatatataaaaatataaatatatataaaaatatataaatatatatatataaacatatatatataaatatatatatatatatttttttttttttttgtattttttttgtagagatggaatttcaccgtgttgcctaggctggtctggagctcttgatctcaagcgatcctccctgcctcggcctcccaacgtgctgggattataggcgtgagccaccgctcctggccagggtctgttcctagttgcaacagttcttggaaacccactcgagagggccacgcctccattcaccaggccacggtgggtggtgtgcgtatgttttgctgaggcctggtcatcacgctgtggctccaaggctgggaccagccacagaccgagaagccggtcaggtgccagccagagattcagggctccctccctctgaacatcctgtctttagcccatccttggcatcccagctcatgtcatcccagccacctgcagcagtgccctagggccccatccctctgcggatcatgctcttgggccacctcctccaagaagccttccctgacctccctcctcccagctcccaccacaggcagaatctgggcttgcagttgtttcaggaatggaagccccattcccaggtcctggggggaccccaaggcaggaggtgggcagagaggggtcctgcgaagcatagaggagccctgagttgctctggggtgggcgagggcttccgggtgcgtctgcgtgagtggtggccacagactgtcacctccaggagccagggtgggtttactggaggcaacccactgtgggttgatgggcagagccagggttaggggcaggacactggggcctgaatcccatctttccacttagcagacgtgagctctctggcctcagtttctcgatttgtgaaatgcagtgaacctcgtcctcaaagggcagttgtctagattaagcgaggctgtgtgtagggctgtgtgcgtgcacatggggctgtcttgtgggcccccagaaccttccagcacttatcaagggtgaagatggcccacagggcagaggtgttggtttggggtcacatggggtgaacaggactggttctgtccttgcccagtgcaggagcggggaggggaggtggtgtttccgcagcctaggctcaggtatggggctgtccgagcacagtgggggtgtggggtaggattcctgaaaaaggggccccttgctcacgggcacctcccatttcagcatcacaagaggcaacaccaggagccaacatgagctcggggactgaactgctgtggcccggagcagcgctgctggtgctgttgggggtggcagccagtctgtgtgtgcgctgctcacgcccaggtaagcgggggtctcggggacgtgatggggagaaggtgtggacagtgcatctcagaggccctctcaggcccag

SEQ ID NO: 38431 - DNA, 2300 bp, Homo sapien
ttctcctggcattccatcagttagaggagagccctagcagcgccaaaaggcctcctgtagagtgggggtttttggagaattatgaaaggaaccgtgttctgtacttattaaaaattagtttctaaactgtgttatgtgatgggagggatgtgtgtcatagtgattacaaggaaaacatgaagattacaaaggaacaatcctatggaaaaaccgcggagacatttcaagaaaagtgtatatttcaagaggagtgtgtattttctcctccggaaaaataaaagacctgtgaataatgattgaaaaaacagacaagaccgctccatcagtttaaagggggaataggggagagatggccaattcaaacattttttccaaattacatggaaagaaaaacactgtgttaagttgtgaatctgtatacgttaatactatcgttaaaaccaactgcttggccagacgcggtggctcacacctgtaatcccagcactttgggaggctgaggcaagcggatcacttgaagtcaggagtttgagaccagcctggtcaacgtggcgaaaccccatctctactgaaaatacaagtattagccaggtgtggtggcacacgcttgtagtcccagctactcgggaggttgaggcaggagaatcacttgaacctgggagcctgacattgcagtgagctgagatcacaccactgtactccagtctgggtgacagagtgagactccatctcaaaaacaaaaaacaagaaacaaaacaaagaatggtcaaagcacttgtgaatctgaagtacctactttcttttcttcttatttttttagaaacaggatttcactctgtcccccggggctggagtacattgacttgatcatggttcactgtggcttcaacctcatgggctcaaccgattctcctgcctcagcctcccgagtaactgggactactgtcgcgtaccaccacaactggataatttaaaaaattttttttgtagagatggggtctcaccatgttgcccaggctggtctcaaactcctcggcttgagggatcctcccaccttagcctcccaaagttctgggatcatcattattgaatattatgacaatttgggctatgggaggaaagattgggtagaaaaacagcccataagaatgctcaaaacccttgcaaggttgaagtatttactttttcttttttgagacagggtcttgctgcagaccaggttggagtgcagtggtgtgatcagagatcactgcagcctgcacctcctgggctcaagcactcctccgcctcagcttcctgagtagctggaactgcaggtgcgcgccaccacgcccggctacttttttaatttttatttttgtagagacggggatctcactttgttgcccaggctggtctcgaactcctgggcttaatcgctcttccggtctctgtcccccaaagtgctgggattagaggggtgagccaccgcaccggccttgagtccctattttcctggaatgaacattgcatttcatctgacaaaaggacggtttcagtttcctcctctgcaaaatggggtgggggtggaattcccatcttgcagccgagaattccctgataataaacgtcgagtaccgagcgcggttgaggcgcaggagcctacccaacgggagcagctcactaggacattcagagcaatctggaaaagtgggcacgggcagccccagacgtcatccccggaccccgctgcccagcagcgcccggacgccagcgttgtccgtgtcccaacaccgaagcccgcgtttggccgcaacccctccaggccctgctcctcccacgccgccgcggagcggatcttccacagaaaccacacacaaacgtccgttccgagagcgacctgctttctcggaaggcgtcgcggccacagctcgccttcctgtcgctcccaggccgggcgccaggtctcccatagcaaccgcggcctccagcgatggccgccagggcaccaccggaaccctcttcgcaggcacagagaggcgcgggtacgtaacttccgctcgcgcccggcggaagccagggggcggggcttgcgtggcggcgtcaaggggcggtgcctcgggtggcgggaagaggaggcgcgagaatggaggtggaggccgtctgtggtggcgcgggcgaggtggaggcccaggactctgaccctgcccctgccttcagcaaggcccccggcagcgccggccactacgaactgccgtggtgaggtcccaggccgtaaagaatgggcgcgtttggacgtgagggtgggcgagtggcgggcc

SEQ ID NO: 38432 - DNA, 2300 bp, Homo sapien
caggttatctgcccgccaccacctcctaaagtgctgggattacaggtgtgagccactgtgcctggctggtttataactgttgatatacaggttatgcatcccagccacaaggaacaattagctccctgtttcctgaacactgccctctccaccctgagtcccctccctccctatgggttcacacctcctacagaagcccagtctttctggagttcactctgaacctcctcccttattagtctccaagtctggctctccacaccaactgggcaccccctcagggctgaccccatgcccagcctccatcattacagcattgcatgttcgctgaactgaattgaaacactctccccaatttacagatggggaaactgaggtcaaaatgtttaggccaggcacggtggctcacagctgtaatcccagcactttgggaggctgaggtgggaagatcatctgaagccaagagtttaagaccagcctggaccccaacataatgagaccccatctctataaaaaacacaaaaaattagccgggcatggtgcatgcccgtagtcccagctactctggaggctgaggcaggaggatcatttgagcctgggagtttgaggctgcagtgagctgtaatcacaccactgcactccagcctgggtgacagagtgagaccccttctctaaaaaaaggttcactcacttctcaaagattatggataccaagacagttgaggggtggtaatgttaacttagtaagttcattcattcattcaacaaatattactggatgtctaccctctgccaagcattgcactgggtcccttaggggataggaacaagatcgtatgtggcacttctctcccgcagaacagtggtctcaccatacagaccacaacctcccccaacacccacattcctgcactcaagggaaaagcagggacatttaagctgtgctttgaagggggaatatgatttgtcaaacagagaaagggggcagggcaggactggtagaacggccagctaggtcaaaggcatccaggcgagcttatcaaggggggacagagggaaaccaagccacagaagccaaccgcagcctgggcatggacaggggctggggcttggtcactgtttagttcctgagctgtcacttggcatctgcctctccacgcaggaggggacctggcagctgcctcaactcctctgaaatagcagtacatgcatcctgtcctggggagggttcatttgtatcttggaagctgatcaccatgagatccttttttttttttcttttgggacggagtctcgctctgtcacccaggctgaagggccgtggcttgatcatgactcactgcagcctcgacctcctgggctccagcgatcctcccaccccagcctccccagtagctgggaccgcaggcgcgcgcccagctaatttttgtattttttgtagagacgaaggttacgttgcccaggttgttctcggactcttggcctcaggcgatctgcacgccttggcttcctgaagtgctgggattacaggcgtgagacactgcccaggctatgagatccttgataaccatgagaccctgtgccacagttccccacccacgctggccccaacacagacctgaagttttcgccccagctgcactgtccccctcctcatcctttctgtccagcgccaacagcatctcaccttcccaagctgccgtccttcccaatgaccagagacatctttgcaagcatagcatggctggaggatgcgtttcaccaaacgcgatgtaagcaccaccaggtgcccagcgcggaggtggatgtgggcgaaccctggacgccccacaaaggacagctgcggcctgggaagggaaggagatggagcggggagagggggaagaggttgctccgcgttttccgcccgcccgcctgctttccgcgaggcactgaggcctgaaaaccgcgaggccgcccacgcgcgcctgacccgcccccccctcccgcccgccccaggccccgccctcccgcgcccgcccctgcgccggccccttttgttccctcccggagccgggccgctggctccgctggctccgctggctccgcgggcgctcagctcggctcggccgcggggcgcgcaggcggctgctgggcggcctcggtgcgcgcctcccgccttcccagagacgtggcgcgaggcccgggccctgagcacctatcgcggggatccccggcgccaggagggggtgcagccggtgggcagcgccgcgcagggaggggccgcagcatcctcgccccccagcgcgcccgggcccgag

SEQ ID NO: 38433 - DNA, 2300 bp, Homo sapien
ttctgatttttaattgttagtctaatttcttaaaggctcagagggaccacacaaaccatgtctatcgactgaatctagctcattggatgctaaagtgtgttctgaggaaatcccagtgggtcccttaaaaccttttcaagggatctatggctcaaaactatttttgtaataataacaaaactattttcattacttctcttcagaatacaataggttttttctggggctagtagaaatactaaccatgatttgaaaaggacattcaaatactcctttgttttctaactacatatctatgtaagatcagatttttagaacatagttcaaccaaaagagcaaattgcaaagatggaacatggaaaaagatgccagaatctagtttctcctattaagccccaatattcaaggattttgcaaaaatttgaaataatgccactcttcccagtaaatattttttgttttggaaaatagttacttttttttttgatggagtttcgctcttgttgcccaggctggtgtgtagtggcgcaatctcggctcactgcaacctccgccttccgggttcaagagattctcctgcctcagcctcccgagtagctgggattacaggtgcctgccaacacgcctggctaatgttttgtatttttagtagagacagggtttcgccatgttggacaggctggtcttgaactcacgacctcaggtgatctgcccacctcgacctcccaaagtgctgggattacaggcagaagccaccccgcccagtcccccacccaccccccccaccccgccagaaaatagttactttttatcaaaagcatgctacttatgttacatgcaattggcttattaattttattttttgagacagggtcttactgccaccgcccaggctgcagtgcagtagcaagaccttggctcactgcagcctcgacttgccacctaaggtgatcctcccacctcagcctcctgagtagctgggattacagatgtatgctactatgcccagctaaattttgtgtttttggtagagaggggttttgccatgttgcccaggctggtctcaaagtccttggctcaagtgatcctcctgcctcagccttctaaagtgctgggattacaagtgtgagccaccacgcctggcctggcttcttattttaagatggattcgtatcttacactttttcagtcttaattctaatatggtaaatatagaataaacaaacaaaagctctttggggatcctcaataatttttaggagtttaaaggggtccctgagaccaaacattttggggaggcattaatcctttctttctttctttctttctttctttctttctttctttctttctttctttctttctttcttctttctttctttttctttctttctttctctctctctctcttttctttctttctttctttcttttttttttttaaagagacagggttttgctctattgccccggctggagtgcagtggtatgccatagctgactgcagcctcgaactcctgggctcaagagatcatcctgcctcagcctcccaagtagctaggactactggtgcataccaccaggcttggctaattaaaagaaaaaaaaaaaactttattattattatttttttgagatggagtcttgctctggtcacccaggttggagtgcagtggcatgatctcagctcactgcagcctcctcctctcgggttcaaggaattctcatgccccagcctcctgagtagctgggactacaggcacacaccactacacccagctaatttctgtatttttagtagaaacagggtttcaccattttggccaggatagtcttgaacccctgacctcaggtgatccggctgcctcggcctcccaaggtgctgggattacaggtgtgagccactgcacccagcctaatttttttttttttttttttttttttagagataggggtctcactatgttgcccaggctggtcttgaactcctgggctcaatcctcctgcctcagcctcccaaagtgctgggattacaggcatgagccactgtgcctggccctactcttttctataagctctgcttggaaaacagtgtagaggctttggagactttatcggagcttagaggagagcagggtgatcgctcgagatcggccacctggcccaccagctctatccccctctctgccccaagataacatgagctaatgtcaagaagaggagcaagggccagggccacagggaggacccagccggccccacggccgcctcaccgctccttccgcagcagctcctggctg

SEQ ID NO: 38434 - DNA, 2300 bp, Homo sapien
gacagtcttactctgtcgcccaggctggagtgcagtggtgcgatcttggctcactgcaacctccgcctcccaggttcaagcgattcttatgcctcagcctcctaagcagctgggatcacaggtgcctgccaccacgcccggctaatttttgtgtttttagtagagacagggtttcaccatgttggccaggctgatcttgaatgcctgacctcaagtgatccacctgcctcggcctcccaaagtgttaggattacaggcatgagccaccgtgcctggcctaatttttgaaacacagtctcactctgtcacccaggctggagtgcagtggctgaatcttggctcactgcagcctccacctcctgggttccagtgattctcatgcgtcagccttctgagtagctgggattacaggcatgcaccaccacacccggctaatttttgtatttttagtgaccaggtttcgctgtgttggccatgctggtcttgaactcctgacctcaagcaatccacccaccttcgcctcccaaagtgctgggattacaggcatgagccactgagcccagccaaaagcgtcttattaatgcagagctagccaagcagtaggactggagttattactcaaataaatctccccaagaactcagaggctagggtttttatggataatttggtgggcaagggcccagggaatgggtactgctgattggttggagatgaaatcacaggggtgtggcaaacggtccttatgcactgagtcggtctctgagtgggggccacaggatgggctgagtcatgagtcacacaggtccaggtgagtcagtcggttgcccgaatgcgaaagtctgaaaaacatctccaaagaccaatctcagtttccacaatagagatgctatctataggaggaagtggggaactcacaaatcttgtgatctctcgccacatgactcctgagcagtcagattataaaaacgatgcgtaggttttagcagcgtccaggcccctcccataatcctaatctcacggcctttcgttagttttacaaaggtggttttggtctcttgtataaaaagcaggttaggtttaaggagtaactattatcatccttgtttcaaagttgaactataaactaaattcctcccccggttagcttggcctatgccccggaatgagtgaagacagccagcgcgtgaggctggaagcaagatggagtcagccacgctaaacttctgtcactgtcctaatctttgcaaaggcagtttggccaggaggctgtggggagaccttgtgggttttgccaggacctgggagattctcgatctatgtttggctgtccttctaagccagaagctccctggggttggggcctgcctggggtgagtccctccctccctgccatgcccagtctagccaaggtctagttcagggatcagggcaccacgtgggggaaggactgtgttccttgtgctgaattaggatttatggctttggggccggatgggaggcgtgcgcactgattcagtaggagcgctgctgtggtgtgtgtgtggttggtgggagcggggcgggcggggggcgggggggctggttggggggacaggggtaaaagcctatcagagggaggtcccatcagacaagatgggaccaagagtccagttggctctgctgcgactttcggcctgtcactgccttcctgcacatctcaggggtgggagggggacaaaggctgtaagagtaagaggtacctggcccaagccttaggactagaacccgggccaggcgggagtgaccagccgggacactcagggcctccgcgcgttccagctgggtgaccttgaccctccaacttcagccccctgcgcccggctgctctcccagtggtggtggggagcggtgggggtagacgggggcgcgcccaggcttttctaatccggcgctggtgggggagaaccgagggcgccaccgcccctccccgcaggtccggggccgaggggtgcggcgcgctctccccaccgcggtgcccaggtccccgggacgcaggggcgctgggtagcaaggggggtgcgcaggggcgcggggcgcggggcgggctaatcccgtatgtaaatggcagccaatggagggtggtgttgcgcggggctgggattagggccggggcgaatggctggcaatcttactgggattacagaacaaagagcctccccgcgctcccgctctccgctcctctccccgcgccgccccgccctccgccgcagcccgcgccgggggtgggggccgccgagcgccagccccccggccggccg

SEQ ID NO: 38435 - DNA, 2300 bp, Homo sapien
tcagcccctccttttcccctctctccctgcttttggaggcctcagcgtctgtcattcccatctttatgtctgtgagtacccaacgtttagctccccttataagtgagaacatttgatatttggttttctgtttctatgttaatttgcgtaggataatgatgtccagctacttccatgttgccgcaaaggacatgattttgttcttttttatggctgcataatattccatggtgtgcatgtaccacattttctttatccattctaccgctgatggacacatgggttgattccatgtctttgctattgtgaatactgctgctctgaacagatgcgtctctcaccttattaagggaagttgacttttgaacccaaaggatggacatttgggatatttctcttccttgcgagtgtctgcgttttgggctgctgagagaggcgtctgggctcctgttcccattgctccctgcgttgcagtgtgaccaaccatcctaggtggcctaggactgaggggtttcccaggagacggaactttctgtgtaaacccaggaatgtcgagttgggcccagttggctgtgtgtcagctctgcgtgtgagcagctggtctgttccctgcatccctgtgaatgtgagaagcgtggtcttcctaccgcatggtgacagcaaggacaccagcaaggctggagacagacagccttcttccccgctgtgcactggctgaggcctggagctagtgcctttcttgtctctaagatagagtgatgctggaagaaggatagtagctcatgcgggccaatgctgccatcagaatttttacttttttttttttttttttttttaatggagtgttgctctgttgcccaggctggaatgcagtggcgccatctcggctcactgcaacctccaccgccggggttccagcgattctcctgcctcagactcccaagtagctgggattacaggcgcccgccaccacgccaggctaatttttgtatttttagtagagacggggtttcaccatgttgtccaggccggtctcaaactcctgacctcaagtgatctgcctgcttcaccctctcaaagcgctgggattacagacatgagccactgcgcctggccctgctatcagaatttttattttttatttaaaagacagggtcttgctgtgtcacccaggctggagtgcagtgttgccatcatagctcactacagcctcgagctccttgtctcaagcagtcctcccgcctcggcctcccaaagtgctgggactataagcatgaaccaccgcacccggcctctgccttcattttctgtttagaaccattcccactttacaaatgaaaaatctcgggctttcaggactcacccgaggtgctcctagcagacgtgggcctgggtctcatcttcccccgcttctcctgctgcattcttgctccaggcacgtggaacctgcctctccctccatctgaggccctttgcagggagtggctgtctctctccatgctccccaagtgcacccacctgggctgtggctcgggacagggggtcctacaagcccggatgaccgagacaaggagctggggatggcccacagcccagcccctcttccctctctgtgtccctccctcctggagtccctggttccttcctaaacggattagagcctttaccggaaggagccggccgctgtctggggcagccggggggccagggctagatggctgtctggtgcctcctgctttgccctgattcgatttgggcctcagcagctgggaggctggcagccctaaggcctttctgggaatggttcaagggacgggcttgcaggggatggcttgggggagggggacaccttccagcccccaggcaggcagacctctcagctggatcttttatgaagtctggtcgcatgcaagaccctcaagcgggcttcctgccacggaacatccccagccgtggccactggccacctcgtggttcatcagcgggtgtcatccaaggcctgtgtcccatccatggcctgtcatcccctccgcatcccttaatacagcagatttcaaacttctataaaattgcaacccagaagaagaaatgtcttttataaacatttagcagcaaactcaacatacattttggccaaacgcccaccggccagttgtttaaatcaatatttatccacagccaaaaagcagaggagagccagaactgaggccagagccgagctctgatgcatctctcatttctcgggatgtttctgtccctgtggttggacacctctggccttgtgaagtgtgatgcactgt

SEQ ID NO: 38436 - DNA, 2300 bp, Homo sapien
caaagtgagactctgtctcaaaaaagagaggtgcgggtgggcgtaggggtctggccttctgctccgggcttggcttgggctccgggttttggggcatgtgggctaagcaggggcctggggaggcaatgatggggcaggggcagaatgaatgggttctctaacttaacacagagaataagacgagtctgagagagaattctgttatagctccttgtgtagctgtgtggcctattccttctgggccttttgaggattgaatggaaaatgcaggcacggtgtctggcctaatcaggcactttgtaatttttttttttttttttttttgaatagagatgggatcttgctatattgcccaggcctgcatagcctgagtgtcagagcaaggccctgtttcttaaaaaaaaaaaaaaaaaaaaaaaggcggcaggggtggggggaagggacaatgatggcccccccgacccaagttttcctaacataaaatgaaaaagtggatgaaacacacctgacatgtagcagatgtttaataagcatgaggtgttttttcattgtccttatttcccttgtgaattaaaacatcattaagtgcatcggtgcacctgaagacatttccgacctgggcgtccttgggcaagttacttaaccactctgtgcctcatttacataaaccaggcctgataccagcccaggcaacatggcgagaccccatctctgcaaaatatttaaaaagttagccaggcatggtggcaggtacctgtagtcccagctacttggaggctgagatgggaggatcacttgaccacaggagttcgagactgcagtgagctatgatcgtgccactgcactccagcctgggtgacagagtgacaccccatctcaaaaaataaaaaataggccaggcatggtggcctggattacgcctgtaatcccagcactttgggaggccaggatgagtggatcacctgaggtcaagagtttgagaccagcccggccaacatggtgaaactccgtctctactaaacatacaaaaattagccaggtgtggtggcgcacgcctgtagtcccagctactcgggaggctgaggcatgagaatggcttgaattcgggcgacagagattgcagtgagccaagatggcacaactgcactccagcctgggtgacagcgagaatccatctctaaataaataaattaaacatagaataaccaggcctgataattgtccatgcctcatagtgttgatcggagagtaaattaccagatgtggatgaaatgcttagaacagtggctacagcttcagagcctccaagtacacttttttctattacacaccccagcctcatcatttaaccatctgagatcatgctggcaaaagtgagtcaggagaggagggcttaaaaaggagccaggggctgagcacagtggcttacggcctgtaatcccagcactttaggaggccaaggtaggcggatcacttgagcctaggagttcaagaccagcctggccaacgtagcaagaccccatctccaaaaagaaaaaaaaaaagtggggggagccaggaggtagagtctctgccctggcccaggtatctgcagggtatgcaccatctgggagtcagaagtgctttctacaaggcctgagggtcttgttattggtggtacagctctctgccccccacctctgccccaaccccaactcatgccaagttctggcctcctacttctcatgtctgtattcctactgggatacaatagaatcccccagggctgtgggttcacacctcaggggcagatatattggttctagctaagccagaacttaggaggagaaagtatctggagaagatttctagaactcagaactgtgcttagaggctggccagcgaccccttggtcagtgcctatcatgtgggccttccagtccgggcagcccgtgagggcatctgaccgctccctgacatctgcctccacccccaatgcccccccagggaatggtgtaagtccctgatgctgtctcgaacccacatctccccgaccctgttctccctgataaataaataaaactgtaaataataaaactgcaggctgggcacagtggcttacacttgtaatcctagcacttggaaaggctgagacaggaggatcacttgaggccaggagtttgagaccaacctgggcaatatagtgagaccctatttctacaaaaaataaaataaatagccaggcctggtggtatgcacctgtagtcctagctactgaggaggctgacggaggaggatcacttgagcccaggaattggagg

SEQ ID NO: 38437 - DNA, 2300 bp, Homo sapien
agagatctactgtgtcaaggtgcacagggtgcagagggaatggcacacagccagcgctggccggggcgcaggggaagatgcagctctgtctgaagagtctgtggtctgatcacaatgggccctctgtgccagttgactggtttgtgctgaacacgttggccaagatgcctgtcattccagcctccgcttccaggcgaaattacaccacccactcagggaagctggactaagctgctgctgcttttttttttttttaacaactttattcaagtattttatttacacagaataaaatgcattcgtttttatgtgtttacttaaaggagccttagcaaatattttcactcacccgtgtcacccccaccataatcaagatacagggctgggtgcggtggctcatgcctgtaatcccagcactttgggaggccgaggcaggcagatcatctgaggtcaggagtttgagcccagcctggccaacatggtgaaaccctgtctctactaaaaatacaaaaattagccgggcgtgctggcgcatgccgtgcctgaaatcccagctactccggaggctgaggcaggagaatggcttgaacccaggaggtggaggtcgcagtaagccgagatcacaacactgcactccagcctgggcgacagagcaagactccgtcaaaaaaaaatatatgcaacacttccattgctctagaaagtttcctgtgcccctcttcattagttaattttcttcaccacccaccaccccaggccctggcaatcactgacctgcttgcctgcttactttcttcttttttttcttttttagacagggtattgctctgcagcccaggctggagcgtagtggcaagatgtcagctcactgcaaccctgacatccctagctcaagtgatcctcccacctcagcctactgagtagctgggactatttttttttttttttttgagatggagtctcactctgttgcccaggctggagtgcagtggcacgatctcggctcactgcaagctccgcctcccaggttcatgccattctcctgcctcagcctcccgagtagctgggactacaggtgcccatcaccacacccggctaattttttgtatttttagtagagacggggtttcaccatgttagccaggatggtctcgatctcctgacctcatgatctacccgcctcggcctcccgaagtgctgggattacaggtgtgagccaccgcgcccagccaattttttgtatttgagagtcaggagttcaagaccagcctggacaacatggtgaaaccctgtctctactaaagatataaaaattagccaggagggctgggcatggtagctcatgcctgtaatcccagcactttgggaggccgaggcgggtggatcacctgaggtcaggagtttgcgaccagcctggccaacatggtgaaaccccatctctactaaaaatacaaaaattagctgggtgtggtggcgggtgcctgtaatcccagctactcgggaggctaaggcaggagaatcgcttgatcctgggagatggaggctgcagtgagctgagatcgtgccagtgcactccagcctgggtgactctgccaaacacactaaaataaaataaaaaattttaaaaatataataatacaactttttataggccgggcgtggtggctcacgtctgtaatcccagcactttgggaggccgaggcgggcagatcatgaggtcgggagatcgagaccatcctggctaacacggtgaaaccccgtctctactaaaaaatataaaaaaattagccgggcatggtggcgggcacctgtagtcccagctacttgggaggctgaggcaggagaatggcgtgaacccgggaggcggagcttgcagtgagccgagatcatgccactgcactccagcctgggcgacagagagagactccttctcaaaaaaaaaaaaaaagagaaaattaaatacaaattaagcaggagagaggagagggactaatactgtatataaaataatccaacttttttttttttaattaaaaaaaggacacttagtccaatggccagtactggttcccactgtggccctgataccagcagggcaaccagccacgccttccagcccagagcaaagttttcagaagataagaactctgtggttttcagcaaggagacaataagaagttgttcctaattggcttcctgtcgcagtcctcagggcacctgctggttccagcctggatccagcctaccttgacctttgccagttggcaccgatgtgcagataaccagtgaagcccaggagc

SEQ ID NO: 38438 - DNA, 2300 bp, Homo sapien
agcaaaattccactgtgggcccggtgcggtgctcacgcctgtaatctcagcactttgggaggctgaggaaggcagatcacttgaggtcaggagttcgagaacagtctgggcaacatgtttagtagaaacccgtctctactaaaaatacaaaaattagctgggcgtggtagtgcacgcctataatcctagctactcaggaagctgaggcaggagaatcacttgaacccgggaggtagacgttgccgtgagccgagatcgcgccactgcactccagcgtgggtgacggagcgaggctcggtctcaaaaaaaaaattccactgtgaaccactaaacaaattcatagaagaaaggaactaccttccaaacgttttcacgatgataagagtcatcttggctaaataaacttctgccttgctaactcactttgtaacatccccccaaattctactccacgactccactatacccaggaaatcctttccctgacccctccaggtggagaaaccactctctcaacaaaagatactcactgaagtccacagcagctgaaatctgcatctcgtaggctggctgctcttactagagtgagttataggcttctcaagagttaaatttgttcctaaatatatgccagtggcacgtggtattgggaatagagaatttaattaaatattactaaatgtcaatgaaatacaagtgcaaaaagaaagttgctcttgtgcaaacttaatgaatgactttcgagacaatcgacaaaggagagtcacaatcttattaggcaaggaccgaagggatcctagacattgtccgggaaatcgcaaaaattcaggcttctgtaatcagattgcttctccggtgagctttacgctctccatgtatttttcaaaaaaaatccaacatgaaaattctagaggaggctttattgggtgcggtctgtgcaagagagacgatggggaatgccaatcggagaacccagattgaaaggaaaggtttttggaacccacatcaaaagactggctgctcggaaagttttctcgctagcgacaaaggcttggaggctggaaaaagcgtcgtggtcgccacctaccgagaagcggcgggtggggggaggatggccgtcgtggcccgaatccccagtgggtggtactgggtgggggggcgggcgggaatcaaaaaaccactcaatctcgtgctttacataaacatctaaaaatcgtcggcctcggggttgtaaagttttggagtttaacttaggtgaacagtaatgtctctccattttcaaaacccaccggctaattcaagttgagaagcaaaaaatagtggtagggggaggagtttgagttaaatcgcatcgcggttgacagaacaaaacaggagctacgagtcaggatttctgctcccactcccttgcaagtttccttccaaatcctgagggagagatagaggcggagggtctgggggaggaattaaaacacaaggtctcctcccctctcgcctgtccgaacttgggggcaacggtctctttggaggccagcttggaaaacactagagaggagttctttgtgtcctggagggtggtgcaaggcggaaggactccccttttgcagagcaaggagggcgacggcccagcccggggctccccggcttttgcagcttccctgcctcgcaatttgcaaggaatgtggggtgcaagagcaagtggcggacttggacggcggctggcgctcggtggggacgacgccggagccaccacccgtccagatttccgtttctgcaccccggctcccctcccccacccgggcggccgcgcaggccccaggtgcagccatgttctcgctcccaccaccctcgcctccattgacagcccttgctggagagggccgggcgccgcgcttgcctcgtcctcgggttcggggctagccggcgcggtgcttcctgggagttgtagtccacgaccgccgccgccgcgttgacggggaacgcatccgaaactacaactcccgctgggcggcgctgcggatgcgcaggcgcaacgcgccttcgaggaacaaaaaaaaaaaaaaaaaaaaaaaaaaaagaaaaaagaaaaaaaaaaggaggaggaggaggagggtgagagagaagctgggagagcagagaaaaggggccaccggtcgcccccccgcttccccgcacgcgctctccagccgcggccgcccgcctgccgcggtcaccccggcctctgcctctgtcccccagtgatcggatcaaggcgctgagcgaggccctgcctgcggggcggccatgcggcggtgacagga

SEQ ID NO: 38439 - DNA, 2300 bp, Homo sapien
ggatcacttgaggtcaggagtttgagacaagcctggccaacatggtgaaaccctgtctctactaaaaatacaaaaattagcagggcatggtggcgggcacctgtagtcccagctgcttgggagactgagccaggagaattgcttgaacccgggaggcggaggttgcaatgagccgagattgtactactgcaatgcagagactccgtctcaaaaaaaaaaaaaaaaaaaaaaaaaaagataaaagtagagacaatagggggatctcagcaaatactggatttaacaaagtagattaacagaaactgtcagttaaaaaaataatttttaatgaaacccccaagatccagagctttgtaataaatatgtaaataaattcccaaatatccatgctggaagtttaaaagaaatgttagctgataactatagaaatacaacttttccttagctttactgtaatctagaaacaaagactgtttctaatatttagacagacactactaaggaccttacaatgagagacgtgtaagaaagtgtggcacggttcactggcagccctgggctgggcttgtccacatcacccccatgatgaacagtaacgccattgtgtaaatgctcatgaacaaagtattacaggaattttcctatttagacataccatatttcctttcaaacaattcttcaacttgtttacgtagatcagtgatgcgagcattccatttctctgaaaattgagcaaaagttaattctcattaagaagtccctaccatcggggcagcactagggtcttgggatgactgaacatacaatgacatattttctacatttttacatcccaactgtccatatcattttactgctttccaagaactttcccctttttggtggttcttagaattagtaggttggtgcaaaagtaactgtggcttttgccattacttttaatagtctcatgggagactacacgagaagttttaacatttagcacctctttttagccttttaatttctgaaaagcaggagggcagaaaagatcaagcaaatgaaacacgacaaaagggagaccacgataaaggtctccaggggtcttttagcaaacttcctaaaacatgtctcagttgtgtggaaataagactttacggatatatagttgcaacttaaaatgctaaagaacaggccaagtgcagtggctcatgcctgtaatcccagcactttgggaggctgaggcatgcggatcacctgaggtcaggagttcgattccagcctggccaacatggtgaaatcccatctctactaaaaatacaacaattagctgggcatggtggtgggcgcctgtaatcccagctactcaggaggctgaggcagaagaatcacttgaacccgggaggcggaggttgctgtgagctgagatcgtgcctctgcactccaacctgggtgacagagcaagactctgtctcaaaaaaataataataaaaattaaaaataaagaacaaaaacatatttaaaaagtacaaaaattcaattcatatccaatcattgtgactacgacacagtagaatattaaagtactattttcaagatgtatacaagcttaatattccatttattcaaaatatgaatcatcaacataatttgccgctaatatctcattcagtcccttgctaggatacatcatccattgagagctcacagattagcagctgcagtaacacagagcaaaaaaaaaaaaaaagaaaaccaagaggtgaaatagttctgaaataaagattttaaagctaagagaaataactaaattactaagtctttagcactaatcttgagctgactaattaacatcagacaagacaatgtcctatgctttggtaaatccaaactatgtttaaacaatgtctgtaatgtaattttcaaaatgctcctggctttccaaagatgagattatgatgcagtaatagacgctaaagcattttccccctgcagagcatgttgcaacatttatcagtcacactgagaatccagaagatgaaggaaaaggtcacgtcgttcgctgagaacttaccgaagttgaactccctcactttccgcttcccagcattggcgggttccgggactggtggctgcggtagctcattggcctttggtctcttagacggtggagaataatcatcatcttgaaaaagaaaatggtcattactggaagaaccatcttacagttacagtcacctcctggtcaattcccaacattcaaaaggtgagcagggctttaaagctattttgagtatcaatagttatttctgtattgtgag

SEQ ID NO: 38440 - DNA, 2300 bp, Homo sapien
tcaagtgctcctgttttcacagcccatcttgtgtttccatgctgcgtttgtggggcgttttctctttccatcctcaattctggcgctgattcttttcaggatacattctaaccttggaaagaagatgccaataaaaccagtgtaggggaagggcagccaatgagaggcagcaatggatgttaaatttacaattgtggtttgtctttttggctgtggttctttagataagcatgtgatttctgttcttcatgactaagaattgaatttagactttacagagttactggtttgtaaatctttgagttgtttaaattttaatgttagagttttactgtttgatcagcacattttttttctcttttgtctataggcccgaaatgtttgagacggcgattaaggagagcacctcctctaagagccctcccagtgagtgtattttctgtattttcattgctatagaacacacgctcttaggcatgcattgtgcagctgtggtttacaaacattgtttaaagaatagccattgaggccaggcatggtggttcacgcctgtaatcccagcactttgggaggctgaggtgggtggatcacctgaggtcaggagtttgagaccagcctggccaacacggcaaaaccctgtctctactaaaaatataaaaaattagccaggcgtggtggcaggcgcctataatcccagctactcaggaggctgagacagcagaatcacttgaacccgggaggcggaagttgcagtgagccgagatcgcaccactgcactccagcctggacaacagagcaagactcatctcaaaaagaaaaaagaaaacccattcaaagttgtagttcaggctatttcacaatttttagttatttaataattgggtggctctgtgagtgtgtgatgatctcctaagtacccccaggaagagaaaaacagtgaaaggcagcccttcagggggcatcatgtcttcttgaaatgatctaccatggaaagaaagaaccttgaacaggactgagataaaacagtctcagacagcatgattattagagatgttgaccgtgttttctacaaattctgattttaaatgtatattttcaggaaaaataaattcatcacccaatgttaatactactgcatcaggtgttgaagaccttaacatcattcaggtgacaattccaggtatgagttctctgcttccatcagagtttttgggggtctcttcagggcctcttggactttcccaactagagaggtttgctcagctcatccggggactcggatacattacacgttgcctggtgctcctcccagactcctacagcagttgccttccaaatacagttgctctccaaacagcaacggcaagttttggcacttggcatgagctaaatcctgttaaccacccaaatggctagtctgttccttaaaaaaagtctatatgagaccgggcacggtggctcacgcctgtaatcccagcactttgggaggctgaggcaggaggatcgcttgaggtcaggaattcaaaaccagcctagccaacgtggtgaaaccctgactctactaaacatacaagaaaaattagccaggcctggttgtgtgtggctgtaatcccagctacttgggaggctgaggcaggagaagtgcttgaacccgggaggtggaggtcgcagtgagccgagatggggccagtgcactccagccttggtgacagagccatactccatctgggaaaaaaaaaaaatctatataaaacagcaggtaaaggtctttataacaagaataaatttgtagcatttttagttaggcattattttaaacaatttcaaatttaattagctcaaagtgctcaaatacttaaatcattaaaaaatggaaaatgcttgaaaacattacacagagctcctaaaaattgggattaaaagtgcatcattgagcagcggcttgtacctgtagtctcggctacttgggaggcttaggcaggaggatcgcttgagcccaagagttcaaggccagtctgggcaacatcgtgagaaaccatctctttaccataaaaaaaaaaaaaagcagtatttaagttttgggttttctctgaactgtttcagatgatgataatgaaagactctcgaaagttgaaaaagctagacagctaagagaacaagtgaatgacctctttagtcggaaatttggtaagttttgcatttgcaaagtacagttgctataagcaaagagatttgttttaataagatcttttcagcagatgatggttggatggttgtaatcctatataaaaggagttaaa

SEQ ID NO: 38441 - DNA, 2300 bp, Homo sapien
aacaggactgagataaaacagtctcagacagcatgattattagagatgttgaccgtgttttctacaaattctgattttaaatgtatattttcaggaaaaataaattcatcacccaatgttaatactactgcatcaggtgttgaagaccttaacatcattcaggtgacaattccaggtatgagttctctgcttccatcagagtttttgggggtctcttcagggcctcttggactttcccaactagagaggtttgctcagctcatccggggactcggatacattacacgttgcctggtgctcctcccagactcctacagcagttgccttccaaatacagttgctctccaaacagcaacggcaagttttggcacttggcatgagctaaatcctgttaaccacccaaatggctagtctgttccttaaaaaaagtctatatgagaccgggcacggtggctcacgcctgtaatcccagcactttgggaggctgaggcaggaggatcgcttgaggtcaggaattcaaaaccagcctagccaacgtggtgaaaccctgactctactaaacatacaagaaaaattagccaggcctggttgtgtgtggctgtaatcccagctacttgggaggctgaggcaggagaagtgcttgaacccgggaggtggaggtcgcagtgagccgagatggggccagtgcactccagccttggtgacagagccatactccatctgggaaaaaaaaaaaatctatataaaacagcaggtaaaggtctttataacaagaataaatttgtagcatttttagttaggcattattttaaacaatttcaaatttaattagctcaaagtgctcaaatacttaaatcattaaaaaatggaaaatgcttgaaaacattacacagagctcctaaaaattgggattaaaagtgcatcattgagcagcggcttgtacctgtagtctcggctacttgggaggcttaggcaggaggatcgcttgagcccaagagttcaaggccagtctgggcaacatcgtgagaaaccatctctttaccataaaaaaaaaaaaaagcagtatttaagttttgggttttctctgaactgtttcagatgatgataatgaaagactctcgaaagttgaaaaagctagacagctaagagaacaagtgaatgacctctttagtcggaaatttggtaagttttgcatttgcaaagtacagttgctataagcaaagagatttgttttaataagatcttttcagcagatgatggttggatggttgtaatcctatataaaaggagttaaaatttaaaagtgagttgtttgtgctaaatttatttaataagataccattagtgttacactattgattgtcagtatgaaagttaatgaatttaaggttcaccatctggcagtgtggctcacacttgtaatcccagcactttgggagcccgaggcaggtggatcagttgaggccaggagttcgagaccagcctggccaacatagtgaaaccctgtctctactaaaaaattcaaaaaattagccgggtatggtggtgcacacctgtaatcccagctactcaggaggctgtggcacgagaattgcttgaacctgggaggcagagattgcagtgagctgagatcaagccaccacactccaacctgggtgacagagcaagactctgtctcaaaaaaaaaaaaaatttaaggttcatatttaaatttgtttgaagtgtacaaagaccttagttaacagcagagacagtctttaaaataaatgttgatcttgtgcttttgacaggctgtttaaggcggtgggttaatctgtgctgttgtgctgtttgtctcactgtccctgtaggtgaagctattggtatgggttttcctgtgaaagttccctacaggaaaatcacaattaaccctggctgtgtggtggttgatggcatgcccccgggggtgtccttcaaagcccccagctacctggaaatcagctccatgagaaggatcttagactctgccgagtttatcaaattcacggtcattaggtaagtgagagtttcctgcttagtcacaggagcgaatctggagctcatgaggctgactcttctaaaatgcagccacaggtagtcatcgaatccggcttcctatgctgtgcaatcaacaaatcaaaataacttgtgtcatcattagaatgtcagatgtgcttctacgaactaagctgactcttttaattctttggcaaagggttggcaaactaggactgtttgccaaattcaggctgcctcctatttttagagtcttcctgaaacac

SEQ ID NO: 38442 - DNA, 2300 bp, Homo sapien
aagagaacaagtgaatgacctctttagtcggaaatttggtaagttttgcatttgcaaagtacagttgctataagcaaagagatttgttttaataagatcttttcagcagatgatggttggatggttgtaatcctatataaaaggagttaaaatttaaaagtgagttgtttgtgctaaatttatttaataagataccattagtgttacactattgattgtcagtatgaaagttaatgaatttaaggttcaccatctggcagtgtggctcacacttgtaatcccagcactttgggagcccgaggcaggtggatcagttgaggccaggagttcgagaccagcctggccaacatagtgaaaccctgtctctactaaaaaattcaaaaaattagccgggtatggtggtgcacacctgtaatcccagctactcaggaggctgtggcacgagaattgcttgaacctgggaggcagagattgcagtgagctgagatcaagccaccacactccaacctgggtgacagagcaagactctgtctcaaaaaaaaaaaaaatttaaggttcatatttaaatttgtttgaagtgtacaaagaccttagttaacagcagagacagtctttaaaataaatgttgatcttgtgcttttgacaggctgtttaaggcggtgggttaatctgtgctgttgtgctgtttgtctcactgtccctgtaggtgaagctattggtatgggttttcctgtgaaagttccctacaggaaaatcacaattaaccctggctgtgtggtggttgatggcatgcccccgggggtgtccttcaaagcccccagctacctggaaatcagctccatgagaaggatcttagactctgccgagtttatcaaattcacggtcattaggtaagtgagagtttcctgcttagtcacaggagcgaatctggagctcatgaggctgactcttctaaaatgcagccacaggtagtcatcgaatccggcttcctatgctgtgcaatcaacaaatcaaaataacttgtgtcatcattagaatgtcagatgtgcttctacgaactaagctgactcttttaattctttggcaaagggttggcaaactaggactgtttgccaaattcaggctgcctcctatttttagagtcttcctgaaacacagctacacccgtattatccatggctgctttcctgtcacagtgagtaagtagctgggactgagaaggcatggcctccaaagtctaaaatatttactctctagcactttgtagaaaaaccttagctaggcacagtggctaacgcctgtaatcccagcattttgggaggccaaggcaggcagatcacctgaggtcaggagttccagaccagcctggccaacatggtgaaatcccatctctacaaaaataaaacagttagctgggcatgatggcgggtgcctgtaatcccagctactcgggaggctgaggcaggatagtcgcttgaacccaggaggtggaggttgcaatgagccaagatcatgccactgcactccagcctggacgacagagtgagactccatcacaagaaaaaaagaactttgtcaacctctgtcttagggcgccttgtcacaggcttcgggtcagacggattcaaccttgcatcagccatttgttagccaggtcactctgttctttgtctgtaaatgagattgatcgttgttcccactgagagtgtcagctccttcccgtagagcaggcatgatgattgtactcacctctgacaccattgtgagtgccacattccttcccacgtccttgtcactgtaagagatgcccacctgagcaccaaccccaggttatcttcccctttgtcttccagccccccagaaacagctacgactcaacctacccaatcatttcatcatcagattgccactgtctctagttcaggtctcttgggactggcactcagaaatctcataataaatcctcttgaggcttctcatacactcgtcttcttccaatcttctttccctcaaaatctcatattttggttccacttcacccaccgtcattctccatatcactcccaggagttaggcaaaaagccccttccgttcttccgtatgttaaacttagaatcactctgttccctgctctgcgtttctattttttgtttttcctccatttactagtagcttaacactttctaacagtgttcttattattgatacgtatctatctcttccataagcttataaggtcacggataatacttctcattgtagtacgtaaatgacgtgggctagatatgagttgaataaac

SEQ ID NO: 38443 - DNA, 2300 bp, Homo sapien
tatgttaaaatgcttttccaagggaacaacacatccttacattatttaaaccaatctgcttcattttcagagctggttgatcagagtgagtcagaaggccccgtgatacaaggtgagcgaggcaggggagggcccggagctactcctgcctgcacagtggcacacatggcgtgcctgcgtgtggcttcggctctcagtcacctgccctgaggggactcagttacacagcacacacatgcttctctgtggttttcactcctgggtttgacagctgatcaaaacataaattcaagctgtgggtcctgattgagaactgggggctgcagaccatttgcaccccctatcccagctcaggcctaacatcaggaaccccaggattaatgggtaggatgaaatggcagagcaagagggccgtcactttaacctgactctgccatccatttctaatgtctgccataagtcagtgagcaaaatgttcttcagtagaaatgtacagattgtgctcttaaaaaattccttaaaaaacaagtggaatggcctggtgctgtgtgagtcattgaaagtaatgagactgggcgtggtggctcacgcctgttatcccagcactttggaaggctgagaagggtagatcacttgagatcaggagttcgagaccagcctggccaacatggtgcaaccccgtctctactaagaatacaaaaactagccagacgtggtggcgtgtgccggctactcaggaggctgaggcaggagaaccgcttgagcctgggaggcggaggtcgcagtgagccaagatcgtgccactgcactccagcctgggcaacagaaaggagattctgtctcaaaaaaacaaacatacgaagaaaaacaaaaaaagtaatgaaaagcttttattaaagggagtaaacagaaggataagggagaaagcataactaaggagcttgttttcatggtagagctatgttaagactctgctctttcaaacttcagttgtatatgtgaacttaggaccacatttgaaaaacagaaatttgaaagtacacttggataatcgtgtgctccatctcaagaccgtgagcattgtttcatcatgcacctgtgtttgtacagagtctagagggcttttctcctcttcctcctcctgggttctttacatagtataaagcagctgttgaacaatgtggaaatcagtctctgtgtttctctttagaatcagctgaaccaagccagttggaagttccagccacagaaggtaaaagggtggggtggtcctgcaagtccttaagacttcttctttcttcttcttttttttttttttaaagacagagacttgctctgtcacccagggtggagtgaggttgcgcgatctctgcaacctccgcctcccgggctcaagcagttctcctgcctcagcctcccgagtagctgggattacaggcctgcaccaccatgcttggctaatttttgtatttttagtagaaacggggtttcaccatgttggccaggctagtctcagacttctgacctcaagtgatccgccagccttggcctccaaagtgctcggattacaggcgcgagccaccttgcccagccaagacttttttatcaggacaaaggattgtgcatttaaactatttcactagaactgggtggtggttttgctctctttcttctgggtgaattggatttgcaggttatgctgttgagtgatgacgcatagctgcttttgctccatttcccccagatgacttggtaaattctccgtgaatgactctgctacataacctagataacctaacgtgtgtcctttaaatgcatgtaagccagaagatgtatgttactttgaaaacataagtaacaaaattttgaatgtattgctaaagagatgtctctctgaagctcttttgatgtttggtgtcttgtccttcttattaaaccatatcttagtaaatagtttggtacgaatggatttatcactgagcaggtctgcaaaataattaatcggtaccgttttgtttctgttgatagaaataaaagagactgatggaagctctcagatcaagcaagaaccagaccccacgtggtagacctcttccctcctagggtaaatcagcttctgtgtcagggatgctgtgtggtgtccatctgaaccccctgcatacgcgtagctaatgtgatctccccactttcacataagatggtggccctgccttcagggaatgtgggagccaggtgggagccttcccggatatttaagctagaagattctacagggagattctccttggatcaatatatgt

SEQ ID NO: 38444 - DNA, 2300 bp, Homo sapien
aaaaaaaaaaaaaaaaaaagggccaggcacagtggctcatgcctgtaatcccaacactttgggaggctgaggtgggtggatctcctgagctcaggagttcaagaccagcctggccaacagggtgataccccttctctactaaaaatacaaaattagccaggcgtggtggcgcacacctgtaatcccagctacttgggaagctgaggcaggagaatcgcttgaacctggaaggcagaggttgcagtgagccgagattgtgccactgcactccagcttgggcaacaagagcgaaacttcgcttcaaacaaataaattaacgcccagcatgtcttggctttcatctgccagacctcaaccctcacccccaggagatcaggtccggaccatgagctgaccctggactcaggcaagggtgagttggtgcagccctggcctgctgggaggcacaggctgcagcaggctgcctggggctgaggcccgccactcatgaactcatgaccttgaatgagctccaaaagctctgggcctcccaggctctagggggagtgggagagagaggcctcagcctgtccctgggcatgctgccccctcctcacctctttgtcccaaatccccttcctggcaaagctgacagtcttaatatcactctggagaaaactgagtcagccctaaggaacaattcaatgaaccatttgcttacttgaggattggaactcaagtctcactcaaagtctgtgccattttcgtcccagctgtcactggccctcatccacacacacccaaggatgagcatctaacgcttgcatgcacactcccatgcccgcgttcattcactcattcattcattcattcactcattcattgactcattcattcattcactcactcattcattcactcagtgaatgttgcagtcacgatccaaatatttatggcctctgtgtgccaggcactagatggaggggctggggctagagcccctgataacccggtcatgccctagctttcctgggacacacattgtggtaaggggagactaaaaaaattaagtcaggccaggcacggtggctcatgcctgaatcccagcactttgggaggccgaggcgagtgaattacctgaggtcaggagttcaagaccagcctggccaacatggagaaacccagtctctaattaaaaaaaaaaaaaattaaccaggtgtggtggcacatgcctgtaatcccagctactcaggagactaacgcaagagaattgcttgaacccaggaggcagaggttgcggtgagccgagatcgcgccattgcactccagcctgggaaacaagagcgagactccatctcaaaaaaaaaaaagtgggaggcagaggcaggaggatcactagaggccagtagtttgagaccatcctgggcaacatagcaggaccctgtctgtacaaaaaaattaaaaaaaatttaaccgggcatggtggcacacacccgtagtcccagctactccagaggctgaggcaggaggatcgctggagcccaggagttggaggctgcagtgaactgtgatcccaccactgcacttaagcctggataacaaagcaagaccctgtctcaaataacaatagcaataataataaagaaaaattaaatgcaatttgcgatgcatcagtgataagtgctctgcagaaaaaggaggcaggaagaggctgagaaaggtatgaggtttgctatgcaatgtgaagttatcaaggaaggcttctcggaagaggtgacatttgagcagagaaatggaggagagttatggagggaagatggtgaatggggggaacatggtcaagaccaggaatatggtcaaggggggaaagatggtcaaggggacgcagcaaatgcaaaggccctgaggcaggagcagcttgattcacccccaaaacccgtggggcccgtgcaggcgacgggaaggacaagtgtaaacccttttccttgtccctgcaggtgtgtgtgaacatgagtctgcccatgtttacaccctgcaagcctgaagagtccccagaaactgaaagaagaagcaaagccctttctgtaccctccctgccccctgtcccgaccgcgacaaaagcgacttcctctttccagtgcatttaaggcgcagcctggaagtgccagggagcactggaggccacccagtcatgggggacaccttcatccgtcacatcgccctgctgggctttgagaagcgcttcgtacccagccagcactatgtgagtagctggtggagggcatcccgtggggggaatacgggagggacagcacggccac

SEQ ID NO: 38445 - DNA, 2300 bp, Homo sapien
ttggggttttttagagacaaggtctcactctgtcacccaggctggagtgcagtggcatgatcatagctcactgcagcctggaactcctgccctcaggtgattctcccaccttcacctcccgagtaactgggacagcactgccatgcccagataatttttttttttttttttttttttgtagagacagggtctcactatgtttcccaggctggccttgagcttctggcttcaagcgatcctcctgcctcagcctcccaaagtgctgggattataggcatgagccgctgtacatggcctacattttcttaaggtgcacttttatgtgtgtgtactctggaaataccttgattacctgcagggtggccaggttctttaaatctaaaacactagcccctgtacactcgaacacacttatacgaatgagttttgtgtggttctgtggccgtcacccttgtcatttgagactcacagtaggtaaaaatcatatgcctttctgtgctcattcccatctctgttattacaaagttttcttgggaatcaaatgagaaaatatattaaaatgctcacacctataatcccaggacttttggaggccaaggcaagaggattgcttgaggccaggagtttgagaccagcctgggcaacatagcaagaccccatctctacaaaaaatttaaaaattagctggaaacagtggctcacacctgtagccccagctacttggcaggctaaagcaggaggatcacttaaactcaggagtttgagacagcagagaaccataattgcaatactatactccagcctgggtgacagaacaagaccctgtctctaaaaagaaaatgcaaacatattatcaaataattcctgtttaaactggacataacaagcacagctacatgctgaacctcatcaaaggtgtcttttgtttggctcatgtacttttgaaaataaggatgaggcctggcacggtggctcctgtaatcccagcactttgggaggccaaggcgggtggatcgcttgagcctggggtttcagaccagcctgggcaacaaggtaagactccagctctacaaaaaaaaaaaaaaaagaaaaagaaaaaaagaaaagaaagaaagaaagaaaagatagctcggtgtggtgcatgcctgtagtcccagcaactgggagctgaagtgggaggatcacctgagcccagggagttccaggctgcaatgagtcattatcaccacaaaccaggcactctttcataaaagtcaatcttcaggttttctttagaaaacctgaagatctggctgggtgcagtggctcatgcctgtaatcccagcactttgggaggctgaggtgggcggatcacctgaggtcaggagttcgagaccagcctggacaacatggtgaaatctcatctctactaaaaatacaaaaattagctgggcgtggtggcaggcacctgtcataacagctactcaggaggctgaggcagaagaatcgcttgaacccaggaggcagaagttgcagtgagccgagattgcgccactgcactgcagcctgggcgacagagcaaaactccgtctcaacaacaacgacaacaaaaattcagtcttcaggttttctttagaaaacttgaagatctggccacagctggcatcctggcagcggtttgctggagttgagggtcagccgtccctctgcagggtgggtcaccctcctgttaaccacgccctgccccgccccgcttcctccctctcgtgcgtcatcaagcatttgctgttgttttcctcatagtagtgataagagaaaagtgaaatatctttgtctccctgtctctgtcaaaagtgggaaaacgcaagatagaccaggagggccgtgtgtttcaagaaaagtgggagagagcgtatttcttcgtggaagtacagaatattccaacatgtctcatatgcaaacaaagcatgtctgtgtccaaagaatataacctaagacgccactatcaaaccaatcacagcaagcattatgaccagtatatggaaagaatgcgtgacgagaagcttcacgagctgaaaaaagggctcaggaagtatctcttaggcttgtcagacaccgagtgtcccgagcaaaaacaagtgtttgcacacccaagtccaacccagaaatcccccgtgcagcctgtagaggacctagctgggaacttatgggagaagttacgtgaaaaaatcaggtcttttgtggcatattctatcgcaatcgatgagatcacggatataaataataccacccagttggccatattcatccgtggtgtcgat

SEQ ID NO: 38446 - DNA, 2300 bp, Homo sapien
acgtggtgaaaccttgtctccactaaatatacaaaaattagccaggcgtagtggtgcgcatctgtagtcccagctacttgggaggctgaggcaggagaatcacttgaacctgggaggtggaggctgcagtgagccaagatcatgccattgcactccagcctgggctggaaagagaaggggaagggctccaatggaatggaatggaatatttagtctttcctacatttctgtgtgttggctggactggctcagcaagggccggatggctgtgtgtctgaggccccggctgggacatcagggtctctctccttgtggcctcataccctttggaggcaccctaggctggctcccatggtgatgaggttctagaagcagcaggcacagatgatcaagctcttctcaagcctctctttgcatcccatcggctgatgtcccattgaccaaagcaagtcacacagccagggccagatttaaagggcagagaatggcctggcgccatggtttacagctgtaatcccaacattttgggaggccaaggcaggcaaattgcttgagtccaggagttcgagaccagcctgagtaacatggtgaaacctcatgtctacaaaaaatacaaaaattaggcaggcgtggtgatgcatgcctatagtcagctactcaggaggctgagacaggaggatcgcttgagcccaggagacagaggttgcagtgagccatgatcatgccactgcactccactgggcaacagagcaagactctgtctcaaaaaataataacaaaatggcagagaaacagactttacttctagaaaagaagcatgggatagtcacattgcaaagggatgtacatcctgggatgggagaggtcttgagctaatttttgcagccaaccgcacccttctctgataaaggcattaggttgtactgatatagcttctccaggttttgaaatccattccattatagtgagtaagttaagattataagtgcctagccgggcacggtggcttatgcctgtaatcccagcactttgagagaccaaggtgggtgggtggatcacctgaggtcaggagtttgagaccggcccggcctacatggtgaaaccccgtctttactgaaaatacaaaaattagccaggcatggtggcgtgggccacttgggaggctgaggcaggagggtcacttgaacctgggaggtggatgttgcagtgagccgagatcatgccactgcactccagcctgggcaacagagtgagactctgtctcaaaaaaaaaaaaatggttatatatgtcagttcaggcttcatgacagaagaatcttcacagcatttcatgtaaatgcacgtggatattcagccaccctgaaggggaaaatctcccaaaactaggactagaatcagaactaagctctcgcgccttcacgatgccttccttcatcctcctctccttccttcctttttttttttttttttttttttgagatggagtctcgctttatcaaccagctggagtgcagtggctcgatctcagctcactgcaacctccacctcctgggttcaagcaattctcctgcctcagcctcccatgtggctggctacaggcgtccgccaccactcccagctaatttttgtagttttagtagagacagggtttcaccatgttagccaggttggtctcaaactcctgacctcaagtgatctgcccgcctcagcctcccaaagtactggtattggaggcgtgagtcaccgtgcccggtcccctccttccttctttccttttctattgattttacaattgatattatttttatataaacatacataaatacacaaatgtatgttttctatatgtatattattttaatttatagtatttctatttttgtatcaagaggtcaaatttgttcatagtgagtgagctacaagttcttttgctgattgtaacattgctgtattaatcaacttatattagctagtcgtatttctttgttggcaaacttaacctaacatacaattttatcatttccattacattccaaggcatttcactgaaagcagaagctgtctcagtcaagaaagaatcagaagatcctaattactatcaatataatatgcaaggtaatactgtttgataataattttcttccccaaaagttatttgggatggaagattttaattactacctgtctgaaaaactggcgagcacccatgtgtgtttacctaggatctagcatgctgccatttagagtaaataatcctacagttataaaatagattctatttagcctaaatccacgtactc

SEQ ID NO: 38447 - DNA, 2300 bp, Homo sapien
agatgggaattaaaaaaaaaatacgctgggcatggtggcttgagcctgtaatcccagctacttgggaggctaaggtgggaggatcatttgagcccaggagtttgagaccagactgagcaacatagtaagaccctgtctctacaaaataaaataaaaataattttcaaaaatcctttgcagtgttttaaaaagctagataacaggctgggcacggtgactcacaccagctacttgggaggctgaggtgggtggatcacctgagatcaagagttcgagaccagcctggccaacatagtgaaactccgtctctactaaaactacaaaaattagtcgggcatggtggcaggcggctgtaatgccagctactcaggaggcagaggcaggagaattgcttgaacccaggaggcagaggttgcagtgagcccagtcgagaccctgtctcttaattaaaaacaaaaacaaaaacaaaaaaaactaggctgggctcagtggctcgcctgttatcctagcactttggcaggctaaggtgggtagatcgcctgagctcagccgttcgagaccagtctgggcaacacggtgaaacctcatctctactaaaatacaaaagaaattagctgggcatggtggtgtgtgcctgtagtcccagctactcgggaggctgaggcaggagaattgtttgaacccaggaggtggaggttgcagcgagccgagatcttgccattgcactccagcctgggtggcagagcgagactctgtttctacaaaacaaaaaacaaaaaacaaacaaaaaaaaactggtagaacgttaggttcacaccatccaaagacgtttgcgtcttcttgtaggtaaagccttagggacaacagtgatggtgcctgttccctatgagaagatgctgcgagaccagtcggctgtggtagtgcaggggcttccggaaggcgttgcctttcaacaccctgagaattacgaccttgcaaccctgaaatggattttggagaacaaagcagggatttcattcatcataaataggtgacacactctgcacccccgccccttcagttcatttaaagatgaaaccaatagcctaattttaattcactcgtgcatcccgcctgctgcgtttcagagctgactgttcagatgtgtcatgcttttttcattggtccgtgctgggtaatggtgttgcttttcttgcagacccttcctaggaccagagagtcagctgggtaagtgacagcttctcaggtttggtggctcttctgagctgctgaaccacttcttcttcattaaaacttgaattgggggccgggcgtgatggctcacacctgtaatcccagcactttgggaggctgaggcaggtggatcacaaaggtcaggagatcgcgaccatcctggctaacacggtgaagcccagtctgtactaaaaatacaaaaaaaaattagccgggcgtggtggcgggcgcctgtagtcccagctactcgggtgtctgaggcaggagaatggcgtgaacccgggaggtggagcttgcagtgagcggagatcgcgccactgcactccagcctgggcgactgagcaagactccgtctcaaaaaaaaaaaaaaaaaacttgaatttgggtgaggggagggaacttagaggatgggccaataggtgcagcaagccattgtggcacacatgtgcctaggaaacaaacctgcacattctgcagatgtatcccccccttttttttttagaagaaataaagaatattttttaaaaaaagaaaaatacatttgtagctattaaaaaaaaaaattggccggacgcagtggctcacacctgtaatcccagcactttgggaggcagaggtgggcagatcacttgaggtcaggagttcgagaccagcctagtcaacatggtgaaaccccatccctactaaaaataccaaagttagccaggcatggtggcgggtgcgtgtaatcccagttactcaggaggctgaggcaggagaatcacttgaacccgagatgtagagtttgcagtgagccaagattgtgccaccgcactccagcctgggtgacaaaatgagactgtgcctcaaaaataaataaataaagaagaataaaagaagatgtcttgctgagactgcctaagtggagtaaggagacggcaggggtggggggtggcacagttcacaaggcacctgctgggtgtatgacatgcttcagttcttcttagccggggactaaacacagtggaaagtctgtttcgggagggatggtgagttcctgtcatcctctaactcacattaaaggacaa

SEQ ID NO: 38448 - DNA, 2300 bp, Homo sapien
aaaagacacctgccttgaacgtttatcacagcactattcacaatagcaaagatgtgcaaatcaagctaagcatccatcaccagatgacgggacaaagaaaatgtggtacgtacactatgggatactattcagccataaaaaagaatgaaatggccgggcatggtagtgcatgcctataatccaagcactttgggaggccgaggcgatggatcacttgagatcagtagttctagaccagcctggccaacatggcgaaacctcgtctctactaaaattataaaagttagccgggggcggtggtgcatgcctgtaatcccagctactcaggtggctgaggcacaagaattgcttgaacccgggaggcagaggttgcagtgagccgagatcatgccattgcactccagcttaggcaacagagtaagactctctcaaaaaaaaaaaaaaaaaaaaaaaagaatgaaatgatgtcttttgcagcaacatggatgggattgggggctattgtctttatcatttgacgtaaaaaggcaaatgcggcatgtcctaacttacaagaggggctaaataataggtacacatggacatagaatgtgaggctaggtgcagtggctcactcctataatcccagcactttggaaggccgaggtgggcagatcacttgaggccaggagttcgagaccagcctggccaacatggtgaaaccctgtctctactaaaaatacaaaaatgagcctggtgtagtggcgggtgcctgtaatcccagttactagggaggctgaggcacgaaaatctcctgaacccaggaggcagagattactgtgagctgagattgcaccactgcactccagcctaggcgacagagtgagactctgtctcaaaacaaacaaacaaaaacatggtcatagagtgtgaaataacagacactggagactcaggggtgggaggcaggaggtgggtaagggatgataaattacttcatgggtacaatgtacattatttgggtgatgagtacactaaaaccccagacttcaccaacaacaccgtatatccatgcaagaaaactatacttggcggggtgtggtggctcacgcctgtaatcccagcactttgggaggccgaggcaggcggatcacgaggtcaggagatcgagaccattctggccatctctactaaaaaatacaaaaaattagccgggcgtggtggcaggcagctgtagtcccagctactcaggaggctgaggcaggagaatggcgtgaacccgggaggcagaacttgcagtgagtggagaacatgccactgcactccagcctgggtgacacagcgagactctgtctcaaaaaaaaaaaaaaagaagaaagaaagaaaactatacttgtgccccttacattgatacaaaaaaaaaaacaaaaacctttctgtgttcaaattactatgtggtttctctcttctgactagactgatgaaaacaatcagttttaaaacttttggaggagcaattgattctggggctggtcttgaatgggttcaggggtatagtcttcctatacaattattgccacgtttcaactgtatagcaaatcaaatttctgttataaagataatttctggatgggtgcagtgcctcacacctgtaatcccaacactttgggaggctaagatgggaggatcacttgaggccaggagttagaggccagcctgggcaacatagtgagatcccatctctaaaaaaaatttaaaagttagccaggtgtgatggggcactcctggaggctgaggtgggaggaccgcttaagcccagaaatttgaggctgccgggaacttcgatcatcccactgcactccagcctgggcagcagagtgaaaccctgtctctaaaaataataatttccttaaactactactatttctttatatgttgatttttttatagttcattaacctgtttatcataaatacaattttttcttgtttttctttaaaagatcttgttttatatttattcacttttttccccttttttctttcaataccagaaacaaagtacggaagtgtacagcacaaatgcttagaaactgacctaatgccaatcatccatttgcaggcgttgcagagggactgtgtgaggtgaaacctccctgccctgtgaacgggatgcaggtccactcgggcgaaacggaaatactcaggaaggcagtggaggactatttctgcttttgttatggtaacgttcactttaagcattaattctattttttttttttttttgagatggagtcttgctctgccacccaggctggagtg

SEQ ID NO: 38449 - DNA, 2300 bp, Homo sapien
gggaggctgaggcaggaaaatcacttgaacctgggaggcggaggttgcagtgagccaagatcgcgtcactgcactccagcctgggcgacagagcgagactccatctcaaaaaagaaaaagaacataatagatttagggtttggcactatctgcagttccaggcatccgctgagggtcttggaatgagtctgctgaagataagggggagaatcctggcccttcatttctcttgtcctcccagtggattcatctgcgttcctacatgccctgaggccatttcatgggtgtctggctccttttactgtattgcttgtgattcccctccactccttgccatcagtatacgttttttttgggggggaaggatacagagtcttgctctgtcacctaggctgaagtgcagtggcacaatcacgtcctgctgcaacctccgcctcctgagttcaagagattctcctgcctcagcctcctgagtagttgggattacaggtgcgtgccaccatgcccagctaattttttttttttttttgagatggagtttcgttcttgttgcccaggctggagtgcaatggcatgatcttggctcactgcaacctccgcctcccgggttcaagcaattctccccgcctcagcctcccgagtagctgggattacaggcacccaccaccacgcctgtcctttttttttggatttttagtagagacagggtttcaccatgttggccaggctgatatggaactcctgacctcaggtgatccacctgcctcagcctcccagagtgctgggattacaggtgtgagccacctcacctggctactagtatacatttttacatcgcaggtgatcattacatttttgttgaatggtgaaacatgtactcttgtgtttgtacttgtaggctgagctgtgaagaaggtagaatttattaattaaaaccaagccctgcggctcagtgtggtggctcacgcctataatcccagcactttgggaggctgaggtgggaggattgcttgagtctaggagttcaagactggcctgggcaacatggcaaaactctgtctctacaaaacaaacaaaaaacaacaacaaaaaattagctgggtacagtggtgtgcgcctgtgctcccagctacttgggaggctaaggtgggaggatcacttaagcttgggagtcccaggctgcagggagctatgatcatgccactacactccagtctgggtgatagagcaagaccctatctcaaaagaaaaaaagcaaaacaaaacagaaaacaagtcccaggtctgggcacagtgtctcattcctataattccagtattttgagagactgaggcaggagaatcgcttgagcctaggagttcaagatcagcctgggcaacatagtgaaactttgtctctacaaaaaaaaaaaaaaaaagtcaaaattagccaggcgcatggtaagctgtgatgataccactgcacttcaatctggaggacagagcagactctgtctcaaaaccaaaccaaaacaaaaaaactaagccctttaaaacctgaaaaattaatctttggaagggaaaatctagaaacagtttttaaaaataaaccagtcctctatttcaagatttcagagttttcataaaggaagtggatgacattccaaatgatgaaaggttgtaagggatagatacagattctagatcagtgatgggcaaactttgtttgtaaggatagtaaatatttttggctttggggacatggggtctttgtcacatgcatgcaaaccttcctttgcaggaaagcagctgtagacaagatgtcaacaagtgaatgtgactgtgttctgacaaagcttaatttacaaaactaggctgcggtctggatttgacctgtaggctggagattgttctaggtatttgcttttcgttagtaaaatattacactagaaggacagaaacgcctccagcattgctgggaagacaaaatgagatttggaagtttttggagtttacatctacagttttaaaagagcaaaaagggccaggcacggtggctcatgcctgtaatcccagcactttgggaggctgagcggggcggatcaccttaggtcaggagttcgagaccagcctggccaacatggtgaaacccagtctctactaaaaatacaaaaattagccagatgtggtggcacgcacctgtaatttcaactactcgggaggcagagtttgcagtgagctgagattgcaccactgcgctccagcctgagccacagagcaagactccatctcaaaataaaagagtaaaaagttaagtacta

SEQ ID NO: 38450 - DNA, 2300 bp, Homo sapien
gcttagtcctctacccaatgacctgtgaattctgaacaggcattgttcttggccctgtctgagtgtcaagcactattccaatgcattcagatggttctttccctagaagcaagtgattatgtcacacgtgtatgctgatgtactctgctacatactccaggggttcctctgcagatctccggggttctctctctgtgcaaaactctctctctggtacccttccttataagctgcagttaccttgttctttctggacttagctctgttacaaccaaggaagtcagctggtctcttgtcttagttctccttccctgtgtgatgacctgataaactctcaagtctgtaagctaagcaattgcagggctcacctcacgtttaccatctctcgaacactatcttttgtcacctgatgtctagtgtcttgaaaaaaacattgtttcatgcatttttttgtttattgttgcagctgggagggtatatctggtctttgtcacttcgtcgtggacagaagcgtaaattaggacctttactctgaaatggacatttttgagaagagtgaaatgagttacactttacaagattctttttgttgctgtgttaagaatggaagagggttaagggcagaattagggagacaaattaggagtctacagcaagagacagtgttggcttggtagtagtgggggccattagaaattggtagaggccaggctcggctcgtgcctgtatcccaacagtttgggaggctgaggaaggaggcaggaggatcccttgagaacagcaatttgagaccagcctgggcaacacagggagaccttgtctctacaaataattttttttttttttttttttttggagagagagagtcttgctctgtcgcgcaggctggagtacagtggtgcgatatcggctcactgcaacctccgcctcctgggttcaagcaattctcccgccttagcctcccaagtacctgggaatacaggcgcgtgccaccactaatttcttttgtattttagtagagacggggtttcaccgtgttgcccaggctggtctcgaactccttagctcaggcaatccgaccgccttggcctcccaaagttctaggaatataggcgtgagccaccgcacccagcctctacaaataatttttttttttttttttgagatggagtctcgctctatcgcccaggctggagtgcagtggcgtgatctcggctcactgcaaccttcgcctcccaggttccagagattctcctgtctcaggctcccaagtagctgggattacaggagtccgccaccacgcccagctaatttttgtatttttagtagagatggggtttcatcatgttggccaagctggtcttgaactcctgaccttgtgatctgcccaccttggcctctcaaagtgctgggattacaagcgtgagccactgcgcctggccaaataatttttaaaatttgccgggtgaggtgatgtgcgcctgtgatcccacctactcgggaggctgacgtgggaggcttgcttgagtgcaggaggttgaggctgcagtgagctatgactgtaccactgcactccaacctgggtgacagagcaagtccatctcccctcaacacacatagcaaaaaaaaaaaaaaaaaaaaaaaagagagagagaaagtggtagaatctgggcaaagttagagctgccggaggaatctgaaggaatggtgtggagcgtgggaggaataagatgcttccaaggcttctggcttgagtaagtggaggaatggagtttcattcattgagctggagaagactgcaggagaagtgtggggagcgtgagacatgttcttcttgggatgcctattcattctccaagataaaaattttttttcttaagtcgctgtacaagtggagatttcaaagcaggcagttggctatatagatgtggagtttaggggaatggtctgggctggagatgaatatttgggagtcataaccatatgaaaatgtaacctggccggccgcggtggctcacacctgtaatcccagcactttgggaggccgaggcgggcggatcacgaggtcaggagatcgagaccatcctggccaacacggtgaaaccccatctctactaaaaaaaaaaatacaaaaaattagccaggcatggtggcgggcgcctgtagtcccagctactccggaggctgaggcaggagaatcgcttgaacctgggaggctgaggttgcagtgagccaagatcgcgccattgcactccagcctcgacaacaagagccaaactccgtctcaaaaaaaaaaatta

SEQ ID NO: 38451 - DNA, 2300 bp, Homo sapien
agagagcgtttcttttcttaaagcgtgttcttttcttaaaggtatcacaggagtgattatgcctttattgattgatggagcagatgaggagaggcattgcatgacatgggaaggaagcttagatgtgggtggcaccttgttcacccgtgttattttttagctccatcttgacaattatacttaattattttttccctctctgtttctttttttataattttattgaagttctaatatctgaaagtgtacaaagcgtatatgtagtttaaaaaataaaaatgagatatcacccagatctctagccccagctcaagaaatgaaacattaatagtgctgtagagatcctttgtgtaccttctttctaccctacctcacagtccccttattacccataggtaaacactagggtgaactttgtgttaatctttctcatctttcattatagtgttaccactatgaatgtgttctttaattatgtaaatgaatccattattcaggcttctgtgatttaattatttcagttaagattgtttgagatttatccacattaacatgtagttttatagtttctgggaaaatatttaaaattttcaaacatacagaattttgctagttatattttcgttatttgatttctaactttattgtgttgtagtcagggaatgtggtgtttgaaatttatgtaggggctgggcacagtggctcacatctgtgatcccagcacttggggaggctgaggcaggcagatcacttgaggccaggagttcgagaccagcctggccaacatggcgaaaccccatctctactaaaaatacacaaattagctgcatgtggtggcatttgtctgtaatcccagccacttgggaggctgaggcatgagaattgcttgaacccaggaggtggaggttgcagtgagctgagattgtgccacggcactccagcctgggtgacagagtgatactctgtctcaaaaaaaaaaaaaaaaaaaaaagacatttatggagacttagccttatggcctagtattgagttggcacaatcattttatcttttctgtttctttttccccctttgcttgctttcctctggatttcttatcttctacaaggacctgaacacattttaattccagttgtcttttccaccttacatgcagtagtacagtgtgttagttttttatttgaaacggagtcttgctctgtcaccaggctggagtgcagtgacgcgatcttggctcactgcacctccgcctcccgggttcaggcgattctcctgcctcagcctgccaagtagctgggactacaggcacccgccaccatgcttggctaatttttggccaccatgcccagcctgaatgaactttcaaaattggtttttaaaagaggtatggaggccgggtgcagtggctcacacctgtaactccagcactttgggaggccaagacgggcagatcacttgaggtcaggagttcgagaccagcctggccaacatggtgaaaccccatctctactaaaaatacaaaaaggtagctgggcgtggtggtgcacctgtaatcccagctactcaggaggctgaggcaggagaatcacttgaacccgagaggtagaggttgcagtgagctgagattgtgccgctgcactccagcctgggcaacaggtggagtggagaattaggctgtacaaggctggtgtttaactattttatggtttggtaacagaaagaaaatatttactaactgggtatggcacatttttgtagtcctagctacttgagaggccaaagtgggaagatgacttgaacccaggagttcaaggccagcttgggcaacacagcaagagaccccatcccttaaaaaaaagagaaaaaatatttacatgtattttactatatatatagtatttacatcgggaggaagaaatgaaaggcatggggtacatggcatttcaagaaaataaattcttccatgagagggagttaactggtaggatggaaagtgagtttggagagagggtggctctaagagtcgacttatctgtctgtgtctagggatgtccttcctgagatccgtgctatctgcattgaggaaattgggtgttggatgcaaagctacagcacgtctttcctcaccgacagctatttaaaatatattggttggactctgcatgataaggtgggattcgagtcagtttccctttccgtttccttcatctttttcctgtcctaggacacttcaccttttcctgggcctgccactgagatattttacctagtgaccaatgattaacccatcaaggcgctga

SEQ ID NO: 38452 - DNA, 2300 bp, Homo sapien
ctggtcaacatggcaaaaccccgtctctactaaaaatacaaaaattagccaggtgcagtggacagtgcctgtaatctcagctactcatgaggctgaggcctgagaattgcttgaacccaggaggccaaggtggcagtgagctgagatcatgccactgcactccagcctgggtgacagagtgaaactccgtctgaaaaaaacaaaaaaaacaaacaaacaaaaaacctgaccatattgtttagggatacttagctgacaaaataatagagacaagcatgacataattaccataaaaatcaggccctggggtgctggtggggaaggtttaagtggaaagaatggagcggtgacaatgtgtgtcaacctaggaggtggtgaccctggggttcgctttgtaattcctcaaaatgagcatttatgtgctattcacttttcagaggatagaattctgaactaaaatgtttaagcagccatacgcaaaaaaaaaaaaaaatatggatagatttttattttaattaaaacatttaaaaaatagagacaaggcagctgggcgtggtggctcacgcctgtaatcccagcaatttgggaggccgaggcaggcgaatcacgaggtcaagagatcgagaccatcctggctaacacggtgaaaccatgtctctactaaaaatacaaaataaagttagccaggcgtggtggcgggcgcctgtagtcccagctactggggaggctgaggcaggagaatggcgtgaacccgggaggtggagcttgcagtgagccgagatcaggccactgcattccagcctgggcgacagagcaagactccaactcaaaaaaaaaaaaaaaacatagagacaagggtcttgctatgttgctcagggtggtctcaaactctccgggctcaagcaatcctcccgcttcggtctcccaagcaatcctcccgcttcggtctcccaaagcgctgagattccaggcgtgaaccaccgcgctcgaccaggaaaaaaaatatatatatatataatatataatatattttataatatattatgtcatatattacacataatatacaatatgtataatacgcataataaaggtatatttaatatatataaagatatatatgtatataataatttttttttttgagacggagtttcactcttgctgcccaggctcgagtgcaatggctcgatctcagctcactgcaagctccgcctccagggttcaaaccattctcctgcctcagcctcccgagtagctgcgattacaggcgcccgacacacgcccggctaatttttgcatttttagtagacacggggtttcaccatgttggccagactggtctcgaactcctgatctcaggtgatccgcccgcctcggcctcccaaagtgccgggattacaggcgtgagccacggcgcccggcctgaataaatcttttaaaacataaaaatctgggtgagcccctggccggccggcacagatgccggggtggggccgcgaatcggttgggacgcactctatccggcctaggggcacccgggccagcacccggccgccgcgcgtgcgcagtgggcggggggccccgcgctcctacctgcaagtggccagtgccaagtgctgggccgccgctcctgccgtgcatgttggggagccagtacatgcaggtgggctccacacggagaggggcgcagaccccgtgatagggctttacctggtacatcggcatggcgcaaccaaagcaagagagggtggcgcgtgccagacaccaacggtcggaaaccgccagacaccaacggtcggaaaccgccagacaccaacgctcggaaaccgccagacaccaacgctcggaatacacgccagaccacgacggagggcgaccacctcccttctgaccctgctgcgggcgttcggaaaaaaaacgcagtccggtgtgctctgattggtccaggctctttgacgtcacggactcgacctttgacagagccactaggcgaaaaggagagacgggaagtattttttccgccccgcccggaaagggtggagcacaacgtcgaaagcagccaatgggagcccaggaggcggggcgcctgtgggaaccgtggagggcactttcccagtccccgaggcggatccggtgttgcatccttggagagagctgagagctggaggtgagctgggctcgcggtcgcccctctcgcgcgccctctttgagaaccacggcttccaacctccctggaaatggggggaacatggccgaggcgcgtggcgaggtcacctcgtggaggccccggagcggca

SEQ ID NO: 38453 - DNA, 2300 bp, Homo sapien
cccgccttggccttccaaagcactaggattacaggtgtgagccaccgcaactggccgtcccctatattgcagcacagtgaacaactgtttcctgaacatcacaagctctcttagacactacagtgtataagcaggtctctgtctaaactgctctcctcttgcccctctgcccaaccaatgtctgctcatccaaagaatgtatcccgtgtgttcattaacttagcaagttcccagtaaacagtttaattgatcactcgttaagagaaggcgggaaacctccatgaaaagagaaatcagtgggtatttcctacagcatttaacacatcgtaggccttcaataaacccttgtgaaataaacaaacctctttactcttcattctatgttgctaagaatctcacctaagtctgtctaccatgtgaaactgcagatgacctcacagaaaatggaaagaagtatctctaaaaataagtttatttggcaacacactacaggctacaggttcacttctgattttttttctttttttttttgagatggagtcttgctgtgtcacccaggctagactgcagtggtgcaatctcagctcactgcaacctctgtctcctgggttccagcgattctcctgcctcagcctcccaagtagctaggattacaggcgcctgccaccacgcccagctaatttttgtatttttagtagaaatgggatttcaccatgttggccaggctggtcgtgaactcctgacctcatgatccacttgccttggcctcccaaagtgatgggattataggtgtgagccaccgcacctggtccacttcagatatttagatacagacggcaaatttatttaaatgtctcaatacatttaaatgtagttacctaaatatatctaatatatttaaatgcagagagcaaatttgcgtttacaaatctgacatggaattcaactgtgctagccaagattcggtgtagcttaccagccagaaatcacataccctaacaggtaaaaatgcattgcattttttaaaactgagcagctacgcaaattaggatatgtctggatgctctactgtccccaaaataacctcaatttttttttaaaaggccaggcacagtgcattacgcctgtaattccagcgctttggggggccaaggcgggcggactgcttgagctccggagttccagaccagcttgggcaacatagcgaaatccccgtctctacaaaaaaataaaataaaaattaaaaataaaataatataaaaataaaaataaaaggggagggagaacaggtagaaaggaaatgcattcagtctatggggatttcacgttccggcttcaagtccacggccctgtgatgggatgtgggcagggcctgagacaggccgaacccaactcttcacagggccgaattctttgcccgcagcccagcaccccgaaggagcttgcctcggcttcaaggcgcacctaatgggcaccggatcgctggggcgctgaggatgccgctccggggcctccacgaggtgacctcgccacgcgcctcggccatgttccccccatttccagggaggttggaagccgtggttctcaaagagggcgcgcgagaggggcgaccgcgagcccagctcacctccagctctcagctctctccaaggatgcaacaccggatccgcctcggggactgggaaagtgccctccacggttcccacaggcgccccgcctcctgggctcccattggctgctttcgacgttgtgctccaccctttccgggcggggcggaaaaaatacttcccgtctctccttttcgcctagtggctctgtcaaaggtcgagtccgtgacgtcaaagagcctggaccaatcagagcacaccggactgcgttttttttccgaacgcccgcagcagggtcagaagggaggtggtcgccctccgtcgtggtctggcgtgtattccgagcgttggtgtctggcggtttccgagcgttggtgtctggcggtttccgaccgttggtgtctggcggtttccgaccgttggtgtctggcacgcgccaccctctcttgctttggttgcgccatgccgatgtaccaggtaaagccctatcacggggtctgcgcccctctccgtgtggagcccacctgcatgtactggctccccaacatgcacggcaggagcggcggcccagcacttggcactggccacttgcaggtaggagcgcggggccccccgcccactgcgcacgcgcggcggccgggtgctggcccgggtgcccctaggccggatagagtgcgtcccaaccgattcgcg

SEQ ID NO: 38454 - DNA, 2300 bp, Homo sapien
atgatctcggctcactgcaacctccacctcccaagttcaagtgattctcctgtctcagcctcccaagttgctgggattataggcatccaccattacactcagctaatttttgtgtttttagtagagatggggtttcaccatgttggccaggctggtttctaactcctgacctcaggtgatctgcccgccttggccttccaaagcactaggattacaggtgtgagccaccgcaactggccgtcccctatattgcagcacagtgaacaactgtttcctgaacatcacaagctctcttagacactacagtgtataagcaggtctctgtctaaactgctctcctcttgcccctctgcccaaccaatgtctgctcatccaaagaatgtatcccgtgtgttcattaacttagcaagttcccagtaaacagtttaattgatcactcgttaagagaaggcgggaaacctccatgaaaagagaaatcagtgggtatttcctacagcatttaacacatcgtaggccttcaataaacccttgtgaaataaacaaacctctttactcttcattctatgttgctaagaatctcacctaagtctgtctaccatgtgaaactgcagatgacctcacagaaaatggaaagaagtatctctaaaaataagtttatttggcaacacactacaggctacaggttcacttctgattttttttctttttttttttgagatggagtcttgctgtgtcacccaggctagactgcagtggtgcaatctcagctcactgcaacctctgtctcctgggttccagcgattctcctgcctcagcctcccaagtagctaggattacaggcgcctgccaccacgcccagctaatttttgtatttttagtagaaatgggatttcaccatgttggccaggctggtcgtgaactcctgacctcatgatccacttgccttggcctcccaaagtgatgggattataggtgtgagccaccgcacctggtccacttcagatatttagatacagacggcaaatttatttaaatgtctcaatacatttaaatgtagttacctaaatatatctaatatatttaaatgcagagagcaaatttgcgtttacaaatctgacatggaattcaactgtgctagccaagattcggtgtagcttaccagccagaaatcacataccctaacaggtaaaaatgcattgcattttttaaaactgagcagctacgcaaattaggatatgtctggatgctctactgtccccaaaataacctcaatttttttttaaaaggccaggcacagtgcattacgcctgtaattccagcgctttggggggccaaggcgggcggactgcttgagctccggagttccagaccagcttgggcaacatagcgaaatccccgtctctacaaaaaaataaaataaaaattaaaaataaaataatataaaaataaaaataaaaggggagggagaacaggtagaaaggaaatgcattcagtctatggggatttcacgttccggcttcaagtccacggccctgtgatgggatgtgggcagggcctgagacaggccgaacccaactcttcacagggccgaattctttgcccgcagcccagcaccccgaaggagcttgcctcggcttcaaggcgcacctaatgggcaccggatcgctggggcgctgaggatgccgctccggggcctccacgaggtgacctcgccacgcgcctcggccatgttccccccatttccagggaggttggaagccgtggttctcaaagagggcgcgcgagaggggcgaccgcgagcccagctcacctccagctctcagctctctccaaggatgcaacaccggatccgcctcggggactgggaaagtgccctccacggttcccacaggcgccccgcctcctgggctcccattggctgctttcgacgttgtgctccaccctttccgggcggggcggaaaaaatacttcccgtctctccttttcgcctagtggctctgtcaaaggtcgagtccgtgacgtcaaagagcctggaccaatcagagcacaccggactgcgttttttttccgaacgcccgcagcagggtcagaagggaggtggtcgccctccgtcgtggtctggcgtgtattccgagcgttggtgtctggcggtttccgagcgttggtgtctggcggtttccgaccgttggtgtctggcggtttccgaccgttggtgtctggcacgcgccaccctctcttgctttggttgcgccatgccgatgtaccaggtaaagccctatcacggggtctgcgcccctctc

SEQ ID NO: 38455 - DNA, 2300 bp, Homo sapien
gctaataaatatgttcaaataagcacaaccccattaaggaaaaatgtcacttgacagcaaataatcaatccagaccacaatatgatcacactcactgtgaaggtgagaaaagttcatctttattatgtttccccaagagatgcactgcactgttctcttgaaaacacacagctcatgtcctcctttagaacacacatcctctttaaagtaacatacaaacatgccaaaacaagataaaaaattccatctgaattctcacatttcaaacatacactaaatatcaaataaaaatttatttttacaagaatttaggggaactaccacatagctataaatgtaatatatatgttaactaagtatcatagataaaaaccatgctccccttcagcagcacgtgtaataatagatacaaagattgaaaggtaaaagatttaggatgaaaagaatcctctcttaaaaaggaaaacaaaattatatgtatgtgtatacaacagttataacacccatcacacagctttgtagaaacagcatctattcaaaaataccagtatttccaaaatatttaaaataatatttaaagtaataataatatttaaataaataaacatatttaataaatatttcaataaataaaataatatttaaataattctatacccatgtttttcaaaataaaccaataaaatagatagtatatattagacgtgttagtatatatatctgagacatgttaaaaatcacaactgaattctcacaattcagtcacaaacctaaacagcaaataaaaatttctatcaccagaattatgtttttttctggtggggaactaccaatagctataaatagaagagattattatggaagtatcatagataaaaagagtgctcgcttcaggagcacatataataatacagaaaaaaatttaaagataataaaagatttaggataaaaagaattctcacttaaaaatgaaaagaaaattatctttaggtatatataacaactataactctcatcaaaaaactctacaggaacagcatgttttcaaaagtacaacaatttccaaactatttgaaataaacctattaataattcaatggccaacattttccaaacaaaccaataaaatgcatagtgtgcatgaagctatctgttacagtctgtggcactcatatttcacaaagaattctgtgccaatctgagcccctgcactgtgccttcaaatgctcctggactgtggcaaccaagtccataagaaacaggacctccaggttccgccccagggaggttggcattcagcaatataaaaagggaggtggtgccgcaggaaagggtggaactggaaacactcctggtttcttacttttctccaaggactcctagaagtaccccaccccacccctgctccttggaggacaacgtgatcactgtattcagctctgtcaagaatggtccaggttcttctagatgatctgcacaaatggttcctctcctccttcctgatgtctgccattagcattggaataaagttcctgctgaaaatccacatctcccctgggtccggtgttctggaagtgagagagacaatgtcacacttcaaggaggcagctctctagacaggaaggttattcacgtcccatgtcaagtctagctagagttcagagcaattgagaagtgcaattttatctcctgcctttcattctataccctgcttctgaaccatcgtgttcaactgtgaaactcacactttggtgaccctgactccaaaacttaatacacccaaggtcagccccagtgatctgcttcatagcaaggactttgggtgggtcttcccagggagtagggcaccctcagagaatgtggctttggacttcatcacagctggggccttttgtgtcacttcagatctaaacttgtaaccgtgctagatctgtttctaacgtgacaacatcacgaaccacgagtccagaagcctaatccataatcctccctcctcatgacaaagtctcatgctctgtgctcaacatggttagctgcacaagatgtaaaccaaagcttcactgaaccctcgacccagatcggtaactcaagtgcatcaatcataatgaacctccccgaactcagtatttatgattatttttgaggcagggtctcactctgtcgcccgggctggagtgcagtggcaggatcagggctccctgcagccccgacctcccaggctccagcgatcctcccgcctcagcctcctgagtagttgggagtagagatgcctcccacatcgcctggctaatttttgtatt

SEQ ID NO: 38456 - DNA, 2300 bp, Homo sapien
atgagccatcaaccgcagccccaggaagagcagagcccccagcggagcacctcagggtaccccctccaggaggtggtggatgatgaagtgtcgggaccatcaggtgaggggactggaggaagaagaggtggcataggattgactaagatgaaggaagggggccaggcgtggtggctcacccctgtaaccccaacactttgggaggctgaggcgggcagatcacctgaggtcaggagttcaagaccagcctggccaacatggtgaaaccccatctctactaaaagtacaaaaattagccaggcggtagtggtgtgtgcctataatcccagctacttgggaggctaagacaggagaatcacttgagcctgggaggaagaggttgcagtgagccgagatcgtgctactgcactccagtctgggtgacagcgtgagatgctatctcaaaaaaaaaaaaaaaaaaaaaaagaagaaaaaaaagaagggtcagaggtcaggaaggagaacctggggagggtgtgtgggaagaatggagaaattcaggctgggtgcagtggctcacacttgtaatcccagcactttgggaagccaaggcaggcggatcacttgaggccaggagtttgagaccagcctggccaacatggtgaaaccctgtctctattaaaagtacaaaatggagctgggcattatggcaggcacctgtaatcccagctacctgagaggctgaggcaggagaataactggaatccgggagatggatgttgcagtgagctgagattgcaccactacactccagcctgggtgacaaagcaagattctgtctcgaaacaaaaaaaaaaaaaaaagagggactcagagagccagggaccagggaaggatatgaggcagtgttctgaggacagagagagggaagaatggggaggggaaggagtggcacatggggttgagcagaggagaaagtcagaaaggtggcttggagaagccagcagtctgcgaggctggggaggatggagagtggtttggggtttggggtcggggtctaacgtgatcagttgcagaagcattacacggtggcctggtttctttactcagcccctggggtagatcccagccccccacgtaggtcccttggctggaaaaggaagagggaatgtttggatgaatctgatgatgagccagagaaggagctcgcccctgagcctgaggagacctgggtggcggagacgctgtgtggcctcaagatgaaggcgaagcgacggcgagtgtcgctcgtgctccctgagtactacgaggccttcaacaggctgcttggtaggaggacaccccagagagcacctccaatcctgttctttctaaagaggaaacttccaataaccacacttttccaatgggaaaaatatgccccagtgggtgagctctccatgcgggaggactctgaagtgatcactcatgagggacacttaaggagacaacagaggattaggtagacttgataaaggtcggtgcttgggataagaaagcttggttttgggccaggcgctgtggctcccgcctgagatcccagcacgttgggaggctgaggcaagaggattgcttgaactcaggactttgaggctgcagtgagctatgactgcaccactgcactccagcctgggtgacagagcaaaactctgcgtcaaaagaaaaaccaaggctgggcacagtagctcatccctgtagttccagctactcgggaggctgagacaggagaactgcttaaacccaggaggcagaggttgcagtgagccaagatcaggccaatgcattccagcctggcccacagagcaagactctgtctcaaaataaattaataaataaataaaaataaaaatcaaataaagaaaaacaaaatcaaaaatcaaaaaagtggtttcagctgtgccctctgaaacttaatgtttcttactgacttttctaaacctaagtgtctccatccatagtgagggatcccaaggccatggtcacaccctgatgtgtgactgtctcatgaggaaatgatgggaattcctttatgactctgcagtggtccctccatgtctgctggagggggtcctggctgattcccagctctacatcctgtagattctcacacccagggcctccttcggcctcttctcaggggagtctcagagcaggagcctctctcccttgcccagtgaaagtcattctcccctctcccatccacctcacccgcagccacaatcctgagactttcccccgggaggcacacttctcctcgctgccctgctgctctcacggaaacc

SEQ ID NO: 38457 - DNA, 2300 bp, Homo sapien
gtggctcacgcctctaatcctagtactttgggaggccgaggcaagaggatcgcttgtgaccaagagttcaagaccagtctgggcaacagagcaagatgctatatctactacaggcatgcacctgtagtctcagctacttgggaggctgagagaagaggattgcttgagcccaggaggcaacagagagctgattgtaccactgcaccccagccaaggcaacagagaccttgtctctaaaaaacaaaaacaggccgggtgcagtgtcttatgcctgtattcccagcactttgagaggcagaggcgggtggatcatttgaagtcaggtgttcaagaccagcccggcaaacatgacgaaaccctaaaatacaaaaattagccgggagtggtggtgggtgcctgtaatctcagctactcgggaggctgaggcaggagaatcgcttgaacctgggaggcagaggttgcagtgagccgagatggagccactgcactgcagcctgggtgacaagagcgaaactctgtctcaaaatattaggaaaaaaaagagagagagcctcttttccatctccccgccacagagttgtcttcagtaatttcattcccttctttcctgaggattcactgggtttctgggtcccagaggggaagttctcttcaaggtacagaaaccacgactccgcagagaaccgcagagatggcagcatgaccagaccacggacaggtgtgtagaagctgctgggctgaaacttgggctgaacttccgctgcaggttgacttattcccatcagcaccaaagccgctggagggggtcatccactagcaaatgaagtgggggcacggattggaggctgtttcagaaggtcccactgagccacggactcaaggcctggccacagccctcccaagcgaggcccagatcatatttcaccacgctcagaaaaccttgtcagctcatttcagtccacagtgactttgctttctttaggatctctcttgcactgtccaactcagagaatttcaaatctgaatggattccaatgatggagctaaatcaggcctcacctcagttttttaattacaatcaatagggctgggtcccagcatctgtgtcttaatgttcctccatgtgatcctcatgctgaaaggctggtatttgaaaatccctttatttggggagtgaagggtttttttagagacaggcctcactctgatgcccagcctggaatgcagtggtggatcacagctcactgcagcctcgaactcctggccgcaagaaatcctcccaccttagccaaccgaagtgttgggattgcaggagtgaccactgtgtccagccaggaaagcccttctgtttcacttgaatgatatttctgccgcagacctacagccattgttgtattaaacggcatcattgcaggaaaagaaaaggtgagaggtgactgttttgcttttttctgaacatatcagaccaaaccagggctgtctggcactttttttttttttttttgagtcggagtctcactctgtcgcccaggctggagtgtagtgtcgtgatctcggctcactggaacctccaccttcccggttcaagtgattctcctgcctcagccccacaagtagctgggattacagaagtgcactcccatgcccagctcattgtttctgtatttttacagaaaaacagacaggtttcaccatgttggccaggctgatctcaacctcctcacctctggttatctgtcggcatcggcttccaaaagtgctgggattacaagtgtgagccaccgcacctggtttgcccattttctgacaatgtatcaacatcatctaagatgggcactgcctcagtgtagtgtgtctagacaaggtggccggaacagagaggaatatgcataccaggcttaaagatgggttaaatcagagcttttcattccacagaagagcaattttaataaggtcagaacatggatgttctaatagttgaaagcctgttaactaggagagagagagagtaaagtgatttgttgtaggaggacacacccggctctgacggtttaaagcgtcatgaatgcaaatttgaactccagaaaagcagagcttcctaacaatgggacttccacagcaatgggatttccttccgcattcagtttatgcctttcccatgagcgagagactcctaggagagccgcagcccgttaggaagccatgtgggaactcatccacaggttctttttgtttgtttgtttgtttgttttttttgagatgtagttttgctcttgttgcccaggctggagtgcaatggt

SEQ ID NO: 38458 - DNA, 2300 bp, Homo sapien
tggagtacagtggcaagcctcatagctcactgcagcctcaacctcccaggctcaagtaatccccccaaggagctgggactacaggcatgcaccaccatgcctggctttttttttttttttttttttagaggtggagtctcactatgttgcccaggctggtctcaaactcctgttctcaagcgatcctcctgcctcagcctcccaaagtgctgaggttacaggcgtgagccactgcacctggctaggaaactgagttttttcagtggtagaggctcctagccagtggccaagggaaagagagagttctgggttcaggggctggcaggaagttagcaagacaccagggactcagctacactggctggatctcagagaagagcaactgccacagtggggacctggagcacaaggggaaactggggcagcagctgcaccacagggttggcggtacctgataagggaagaggatgacttccataagtaggcccacaggtgcccagggctccccatacccactgggtgccaggtctaaaaccatgagaccagtaccagcaccaaccactcaaggagctgagacggctgacccactctctgccctggctaggactggccccagcacccccagtggggaggcctcaatgatcccagctgccaggggcccaggaacactagcaacagaagaatggccaaagtgacagggaacccttgagaccctagagcagcaatgcctgggccgggcctgatccttcccaccagcccccagccattcctggccttctgccatgcttcctggttggtctgcaaagtgcctggggcaaataccttctgggagaagagtagagagggtatccaggctccatgggcctcaggattcctgaagtaggaggctctgatggggccaccctgctctggacagaaattccctagcctcagggacatgttgaatcttgtcacccagaggaaccaagtggctgggtggtagcccagtgcagtggctcatgcctgtaacctcaacactttgggaggccaagacaggcagatcacgaggtcaagagattgagaccatcctggctaatatggtgaaaccccgtctctactaaaaatacaaaaattagctgggtgtggtggtggcaggcacctgtaatcccagctactcgggaggctgaggcaggagaatcacttgaacctgggaggcacaggttgcagtgagctgagatagcgccactgcactccagcccgggcaacagagtgagactccatctgaaaaaaaagaaaaagaaaaaaaaaagaaagaggctggacagcaaaataaaatggttccccagttcagcctttggaggtaccaaccatctgttagcagagctctaagaccaaatgggctcccactccaggaacgtcccccttcccacaggggctggggagatggagtccggggctgtgctgccctctggagcagcaggtggaggccaaggcagcctcactgttctccggggccctgggaagccatgcagagaggcagaggtcctttatgtgccagatgaggctgctgtcaagggactgcaaatctgcttgaggtgtgacatatctgtttttagaacaagaacatcacatcaggaggagccggtggccagagcttgggggaaggggggatccaggtccaattcccatgtatctagggcacatgtgcacagcactgagggccactccagcccctccccagctctcagaggaccctgctcccacctgccttttgctctgctatcgggcagatggcattgtctctgctttgcaactgatgaaataggaactctggcttctgggctaggctgagagggtgcttgctgctgccattccgggcccaggtgagacattcggtcatgagcatctgtagctcttgcctgagcctctgagcctgccagggcagagcagaagcaaatgcatgaaggcccctcccccaggggctgctcttagccagtgactgatgaaaatgggtgtgtaaacagcttagccacatgaccccacacaggtgggacaaccatgggtttccatattctgtactgcctcccagaggtccccaccaggtttaagctcaattgcccacactggtaactggtaacttccttgatagcactcatttcttttttcattcttttggtgtttttttagatggagttttgctcttgtcacccaagctggagtgcagtggtgcgatctcagctcactgcaacctccgcctcccagattcaagcaattctcctgcctcaccctcctgggattacaggcatgtgccaccacacctg

SEQ ID NO: 38459 - DNA, 2300 bp, Homo sapien
tcaacccaggaggcagaggttgcagtgagccgagatcgtgccactgcactccagcctgggcaacagagtgtaactccatctccaaaaacaaaagcaaaacaaaacaaaacaaaactaccatggttacctaaaatagggcatgtgttgggaagggagtagacagagccagagtggatagacagaagacatctgatcaagaaagattcaggccgggagtggtggctcacgcctgtaatcccagcactttggaaggccaaggtgggtggatcacctgaggtcaggagttcgagaccaccctggccaacaaggcaaaaccccgtctctattaaaatacacaaaattagccaggcatggtggtgcacgcctgtaatcccagctactcaggaggctgaggcacaagagtcacttgaacccaggaagcagaggttgcagtgagctgagatcacgccattgcattcccgcttgggtgacagagtgagaccctgtctcaaaaaacaaacaaaaccaacaaggcagagatgtggccagggcttctgaaggaatgcatgaagtccacccagcacccactccagttgtgtccctccatcctcccagactcccccctgcccctgcactcccagccatgccccctgtgtgggcctctggtcctctcaccctctacctttgctggagaacatacaggactcacgtcttttcctcccacgggacagaaactcctttcgcgcttcctatcaggccctgcctacagcaggtatacactgcggggtttctcagtgaacagagcataccaatttgcacccgccacaggacagtggcttgttccctgcagacaacttactctttcagcctccaggcgtttgctcctccagcccagagggatggggcagcaatgagcatttgagccgccctagaagcaggaggcaggaggcaggaagatatctggatagttcaggaaagagatgaggaaaaaggaaaaaggcataggaaaaagatttgggagctagggttgagccagcccctttctctgggcagcagcagactatggctgtcctgagtgggcacacgcaaggctctggggctcaccccgtaccctcttcacctatacccctcccctgatccatctgtagccacccactcctgttccctgcttgctcatcttgctttaaccccagcacctcctgacattttctcatgccagccatcaccccattcttggctcagatggtgctgcctcctctaggaagccttactggcttgcagctctgtggtcctagagcattttggctgcccctgccagaggcctgacacctaaatgacaggtgaggtccttggcttaattctgcgagagcagtgacagcatctccactttccagaatcaggatgcgattatgtgtgtgtgtagtcttctaagcctgggcttttctggctctgccctcacaaactggtgctggccagtggccccagggccttcccagttaatgcttaatggctgggtacagtggctcacacttgtaatccagcacttttggagttccaggtgtctttattaaaaatacaaaaattagccaggcatggtggtagagacctgtaatcccagctacttgggagactaaagcaggagaatcgcttgaacctgggagacagaggttgcagtgagctgagatcatgccactgcactccagccggggcaacagagcaagactctgtctcaaaaaaaaaaaaaaaaaaaaaaaaagcttactggagcttctagtggaccagatacccttgagagtgcttgacgtggtttatctcatcaagccctcacaaccacttaggttacaggcatgatcatcatctctgttttacaggtaagaaacatagcacagagaggtcaagcaacttgcccaaggtcacacagccaggatgagcagtgctgggattccagcccaggtgtcccagggctctaactcccttgggctagcctgtctttccctaaactgcaattagacagtggcctcagcccaatgtgttgcgaggaatgagggctctgcatggactttttgcaattttaagcttttctctcataaatacctcgtaagacgttagtgttcactggccgggcatggtggctcacgcctcccagcactttgggaggcccagacgggcagatcacaaggtcaggagttcgagaccagcctgaccaacatggtgaaaccccgtctctactaaaaatacaaaaattagctgggtgtggtggcatgcgcctgtaatcccagctactcggaaggctgaggcaggagaattgcttgaacctggga

SEQ ID NO: 38460 - DNA, 2300 bp, Homo sapien
tgcacttgtgagtgtccagcgccagacccctccagggcagggccggggtggggaagcaggttcctgggctcacgggcaggcatctgcctcctctacccctgcacaggtccccgaagagaacatcaatggtgtcatcagtgccctgaaggtcagccaagcagagaagcactagaagggtctcttctgctcctccctgccgccgcccgggcccagccctaaccctgaagattgatcttgcagtatttctctacagactggaaaatcagcctggggaccctgaggaaggggcctctgtgggagactccctcgattgccaatccctccagggcaggggcccacgccaaggcctctccatgccctcctgccttcccggagccccccgaccctccagagaacgacctttctcttccctacctcccccaccccggaaaatgctttcggaggcccagggagcttgtgagctgatccgccttctcatccggcctcacccacggccaggggcagatgccgagggaagccggtccctcctgcgagacaccggtgtgccagctgtcatgtcaccttgcagggctggggctggcggggtggggccgagtttggggtgccctggagggtttgggggtgagtactgtggtcactggtctctgcttccatcagctcagggctggttccctcggagtggaggccagcgtggccccctcaggtcatcggggctggtgaggctcagacaggaacccaggtgggatccccgagctgggaaggacccagactccccctgtacctcgcctgccaaccacagggcctgggcccgactcccagcaagactgccaagagggccctgtccagaccctcccccacaagcactcagtccttgggggaggagggagggtcccaggagacccaccagcctggagcaccagctcctgtcccctcggctctccctggacccgacttgggcaggtagagcctcagcttcccccagtagggacatccctggctttccaggcctgaggtttcttaggtggtgtcccacctccccaacagacaactagaccagcataggactccccgccgtcctcctccctcctctgcccccaagtcacctgcctgcccacccgccccttggctgggggctgtggcattcatgagtacttgacccaggaggcagcttaactgagccttaatagagaaaaccatactttgttttagttttttatttaatgtatttgcacccagggtgctcttggcggtagtttctgtttggcagggataggacctgtttgagttctgtcaagggagcctggaggctctgtgtcactaagctggtgctctgtggctccagggacaggcagtgggaatcgggagatgtcacaggagcctgggccctctcttctgaagggaagctaggagcagagatctgttacaagacgctggagccgctggcaccccacatgggaactcccaccaaccagctgtagttctatctgagcaccggagggggtgagggaacccgagggccatggggaggtggacagccgggtggcaggccagctgagtggtcatgtccaggaggcatggggttagccgtggtgtcccttccagtggggtggttttctgaatgagcaggaccaagggcccctgtggttttggctctggcgggggtttttttttttttttttgagatgggagtctggctctgttgcctaggctggaatgcagtggcacgatcttggctcactacaccctcctcctcccaggttcaagtgattctcctgcctcggcctcccaagtagctgggattacaggcacgcaccaccacgtctggctagttattgtattttttaatagagacgggatttcgtaacattgctcaggctggtcttgaactcctgagttaagtgatccgcctgcctcggcctcccaaaatgccgggattacaggcgtgagccaccacacccagccgagttgtgctgtttctgtggtcagaggagaagggatattttctagtcctgacaaagtgttccctgcttctctgagtgggaccctctgagccctggaagcccaccagaaggagaagctgttctttaaaatccttgtgggtgttgaaggcccaccacattaattagaaaccaacttttttttttttaagttaatttgttttgcacaaaactccagaacaaaactcgtacattgctggtcccaaaagggaggtggccaagtggggcagggctgtggtggaagccctgagtcccctttctgaccttgcaaggccttgattttcctttctgtcatttccccct

SEQ ID NO: 38461 - DNA, 2300 bp, Homo sapien
ccagtagggacatccctggctttccaggcctgaggtttcttaggtggtgtcccacctccccaacagacaactagaccagcataggactccccgccgtcctcctccctcctctgcccccaagtcacctgcctgcccacccgccccttggctgggggctgtggcattcatgagtacttgacccaggaggcagcttaactgagccttaatagagaaaaccatactttgttttagttttttatttaatgtatttgcacccagggtgctcttggcggtagtttctgtttggcagggataggacctgtttgagttctgtcaagggagcctggaggctctgtgtcactaagctggtgctctgtggctccagggacaggcagtgggaatcgggagatgtcacaggagcctgggccctctcttctgaagggaagctaggagcagagatctgttacaagacgctggagccgctggcaccccacatgggaactcccaccaaccagctgtagttctatctgagcaccggagggggtgagggaacccgagggccatggggaggtggacagccgggtggcaggccagctgagtggtcatgtccaggaggcatggggttagccgtggtgtcccttccagtggggtggttttctgaatgagcaggaccaagggcccctgtggttttggctctggcgggggtttttttttttttttttgagatgggagtctggctctgttgcctaggctggaatgcagtggcacgatcttggctcactacaccctcctcctcccaggttcaagtgattctcctgcctcggcctcccaagtagctgggattacaggcacgcaccaccacgtctggctagttattgtattttttaatagagacgggatttcgtaacattgctcaggctggtcttgaactcctgagttaagtgatccgcctgcctcggcctcccaaaatgccgggattacaggcgtgagccaccacacccagccgagttgtgctgtttctgtggtcagaggagaagggatattttctagtcctgacaaagtgttccctgcttctctgagtgggaccctctgagccctggaagcccaccagaaggagaagctgttctttaaaatccttgtgggtgttgaaggcccaccacattaattagaaaccaacttttttttttttaagttaatttgttttgcacaaaactccagaacaaaactcgtacattgctggtcccaaaagggaggtggccaagtggggcagggctgtggtggaagccctgagtcccctttctgaccttgcaaggccttgattttcctttctgtcatttccccctgacggtgtcacttctctgcctttccttcccgccgtgcaagtgtgtcggccccgtgaccccagagtcgtgtgtcccctagacttcctaggacgtatctattgtacacacctataaatacctgtgttttatgttgatagagatatatactgtaaatagcatatatacttgagcaatatatatgttaatatatactgtgtgcgcagtccgtggacacagccccccgctgtgtgtgcacacgtgtatgggcgtgacggcctccaccccgcaccgtctgccatacacgcgggcacatttgagccaccatatatttttaattcaagtatataggcaatacgattattacagaagccgatgggttccctcagacctgacttgagagaacaaagccagcagctcaaagagcctgtgacatgggacgtgggaagggtgctgagagcccgctgtggcgtgggtcatgccttctgcaccccactttccccaggcaagatccctgggcgcccttatttggggggatgttgatcccgagggaggagtatttggaatttcttgcttttaaccagaatgccccctctcccctgccctcgccagcagcctcaccctgaagacctgggcctgctgaatgggccacacgctgcctgtgtcctgcctccgtgggtggcactttttacgcaggcagcttctctgttttttttgttttttgtaacctgcaagcttagaaatctcaggttgtgctcctggggctgctcctggggactggcctcgtgtcatggagaaaagcatgtgtgtcggggcgcgctggggccagggtatggctctccgccctggctggctctgcaggggtggtccctgttcaagcccgctccgtgggagctgccccctggggaccctgctcctcggtcacagggggcccctttagttttcccatccccatcctgctcgtgtaaagcttggtttatcttctcggcgttctgtgtgtag

SEQ ID NO: 38462 - DNA, 2300 bp, Homo sapien
acttaatgtgggtggtgtcgggagtgagacagtgggagagttcatgagtaatgctttccttcacgcagaggcaaactgtttttggtcctcttttctgttagggattgaaaagaacccactcaccagatcagtgtcctgtatcatgtttcagagggtgtgttgatctcttctggtaaaacagatgccatggctgggcgcggtggctcaggcctgtaatctcagcactttgggaggtggaggcgggcagatcacctgaggtcaggagttggggaccagtcatggccaccatggtgaaattccgtctctactaaaaatacaaaaaattaaccgggtgtggttgtgcacgcctgtaatcccaactacttgggaggctgaggcaggagaattgcttgaacccaggaggcggaggttgcagtgagtcgagatcatgtcaccgtactcaagcctgggtgatagactgagactctgtctcaaaaaacaaacaaacgaacaaaaaaacagacggcacgcttgacacagcagctatgagttggaccatgcacttgcctaaatgtatggtggtcccctgtcccctaccacagtccatctttttttattttttgagacggagcctcgctctgtcgccaggctggagtgcagtggtgcgatctcggctcactgcaacctccgcctcccgggttcaagctattctcctgcctcagcctcccaagtagctgagactacagtgcgttccaccacgcccagctaatttttgtattttcagtagaaatggggttttactatgttggccaggatggtctccatctcttgacctcgtgatgtgcctgccttgccctcccaaaatgctgggattacaggtgtgagccactatgcctggccaatccatcagtttttttaggagccaaacaggtgaactcaatggggagctacccattggataggaatcaccacccctctgaatcttttacatctttgaaggtggcactagcatctacaattccatgtggcaaacagtgtgtgttctgattgaatactggctgggtcgagacagggtaaggggaccgatgtgaatggctaagtttatctatcccaaatggtggcagggaacttactaccaggcgggtccatagacacatttatttttacttttatatttacatttaatttaatttttttttttttttcagagacagggtctcactctgctgtcctggctggagtgcagtggtgcaatcatggctcactgcagcctcgaactcctgggcttaagccatccacctgcctcagtctcctaagtagctggcaccacaggtgcacaccatcacgccgagctaatttttaaatttttttgtagagaaagggtcccactatttgcccaggctggtctcgaactctcaagtgattctcccacctttgtcttccaaagtgctggaagactgggtccgccgcagagaatacatttcatagcccgggagactggtggtttcagtgccttcatgaattttactccctgtagtaagaggctttccatgagcagtcttgtggtcaccacattttattagtgggttttccccagtcatcttccataaaacaggcctgcacaggctggggttggtggcttatgcctgtaatcccagcactttgggaggccgaggtgggtggatcactggaggtcaggagttcaaaaccaacctggccaacatcgtgaaaccctgtctctactaaaaatacaaaaattagccgggcgtggtggcgtacgcctgtggtcccagctactcgggaggctgagacacgagagtcacttgaacccaggagggggaggttgcagtgagcctgtcgataggtttgaggggacctgggcaggggatgcgaaggcagcagggaatcgtccactccagctcgctgtcgctggaggacggcctggggcggcgtgggagcagaccggagcggagacggctgcagcaaggccaggtaagaaatgtcgcggggcaatagcaagggagcaaaacaggacacgcagtttcgctaagggacaagaatcctaatcccgcccctaaccccgcccctcaccatcgccacgccacgcctccctgagccttgggctgccgtcagcgcctttgccttcaaccaggagtaaaagtggccgtagcctcttccggcgaggactggtgttaagggtcacgcaagatggcggcgcccagaggctgctgaggcgcggaacggaggatggcgctggtggcgttggtggctggggctcggctggggcggcggctgagcgggccggggctggggcgagggca

SEQ ID NO: 38463 - DNA, 2300 bp, Homo sapien
caagaccttgcttagtcctctacccaatgacctgtgaattctgaacaggcattgttcttggccctgtctgagtgtcaagcactattccaatgcattcagatggttctttccctagaagcaagtgattatgtcacacgtgtatgctgatgtactctgctacatactccaggggttcctctgcagatctccggggttctctctctgtgcaaaactctctctctggtacccttccttataagctgcagttaccttgttctttctggacttagctctgttacaaccaaggaagtcagctggtctcttgtcttagttctccttccctgtgtgatgacctgataaactctcaagtctgtaagctaagcaattgcagggctcacctcacgtttaccatctctcgaacactatcttttgtcacctgatgtctagtgtcttgaaaaaaacattgtttcatgcatttttttgtttattgttgcagctgggagggtatatctggtctttgtcacttcgtcgtggacagaagcgtaaattaggacctttactctgaaatggacatttttgagaagagtgaaatgagttacactttacaagattctttttgttgctgtgttaagaatggaagagggttaagggcagaattagggagacaaattaggagtctacagcaagagacagtgttggcttggtagtagtgggggccattagaaattggtagaggccaggctcggctcgtgcctgtatcccaacagtttgggaggctgaggaaggaggcaggaggatcccttgagaacagcaatttgagaccagcctgggcaacacagggagaccttgtctctacaaataatttttttttttttttttttttggagagagagagtcttgctctgtcgcgcaggctggagtacagtggtgcgatatcggctcactgcaacctccgcctcctgggttcaagcaattctcccgccttagcctcccaagtacctgggaatacaggcgcgtgccaccactaatttcttttgtattttagtagagacggggtttcaccgtgttgcccaggctggtctcgaactccttagctcaggcaatccgaccgccttggcctcccaaagttctaggaatataggcgtgagccaccgcacccagcctctacaaataatttttttttttttttttgagatggagtctcgctctatcgcccaggctggagtgcagtggcgtgatctcggctcactgcaaccttcgcctcccaggttccagagattctcctgtctcaggctcccaagtagctgggattacaggagtccgccaccacgcccagctaatttttgtatttttagtagagatggggtttcatcatgttggccaagctggtcttgaactcctgaccttgtgatctgcccaccttggcctctcaaagtgctgggattacaagcgtgagccactgcgcctggccaaataatttttaaaatttgccgggtgaggtgatgtgcgcctgtgatcccacctactcgggaggctgacgtgggaggcttgcttgagtgcaggaggttgaggctgcagtgagctatgactgtaccactgcactccaacctgggtgacagagcaagtccatctcccctcaacacacatagcaaaaaaaaaaaaaagagagagagagaaagtggtagaatctgggcaaagttagagctgccggaggaatctgaaggaatggtgtggagcgtgggaggaataagatgcttccaaggcttctggcttgagtaagtggaggaatggagtttcattcattgagctggagaagactgcaggagaagtgtggggagcgtgagacatgttcttcttgggatgcctattcattctccaagataaaaattttttttcttaagtcgctgtacaagtggagatttcaaagcaggcagttggctatatagatgtggagtttaggggaatggtctgggctggagatgaatatttgggagtcataaccatatgaaaatgtaacctggccggccgcggtggctcacacctgtaatcccagcactttgggaggccgaggcgggcggatcacgaggtcaggagatcgagaccatcctggccaacacggtgaaaccccatctctactaaaaaaaaaaatacaaaaaattagccaggcatggtggcgggcgcctgtagtcccagctactccggaggctgaggcaggagaatcgcttgaacctgggaggctgaggttgcagtgagccaagatcgcgccattgcactccagcctcgacaacaagagccaaactccgtctcaaaaaaaaaaatta

SEQ ID NO: 38464 - DNA, 2300 bp, Homo sapien
tgaggcaggaaaatcacttgaacctgggaggcggaggttgcagtgagccaagatcgcgtcactgcactccagcctgggcgacagagcgagactccatctcaaaaaagaaaaagaacataatagatttagggtttggcactatctgcagttccaggcatccgctgagggtcttggaatgagtctgctgaagataagggggagaatcctggcccttcatttctcttgtcctcccagtggattcatctgcgttcctacatgccctgaggccatttcatgggtgtctggctccttttactgtattgcttgtgattcccctccactccttgccatcagtatacgttttttttgggggggaaggatacagagtcttgctctgtcacctaggctgaagtgcagtggcacaatcacgtcctgctgcaacctccgcctcctgagttcaagagattctcctgcctcagcctcctgagtagttgggattacaggtgcgtgccaccatgcccagctaatttttttttttttttttgagatggagtttcgttcttgttgcccaggctggagtgcaatggcatgatcttggctcactgcaacctccgcctcccgggttcaagcaattctccccgcctcagcctcccgagtagctgggattacaggcacccaccaccacgcctgtcctttttttttggatttttagtagagacagggtttcaccatgttggccaggctgatatggaactcctgacctcaggtgatccacctgcctcagcctcccagagtgctgggattacaggtgtgagccacctcacctggctactagtatacatttttacatcgcaggtgatcattacatttttgttgaatggtgaaacatgtactcttgtgtttgtacttgtaggctgagctgtgaagaaggtagaatttattaattaaaaccaagccctgcggctcagtgtggtggctcacgcctataatcccagcactttgggaggctgaggtgggaggattgcttgagtctaggagttcaagactggcctgggcaacatggcaaaactctgtctctacaaaacaaacaaaaaacaacaacaaaaaattagctgggtacagtggtgtgcgcctgtgctcccagctacttgggaggctaaggtgggaggatcacttaagcttgggagtcccaggctgcagggagctatgatcatgccactacactccagtctgggtgatagagcaagaccctatctcaaaagaaaaaaagcaaaacaaaacagaaaacaagtcccaggtctgggcacagtgtctcattcctataattccagtattttgagagactgaggcaggagaatcgcttgagcctaggagttcaagatcagcctgggcaacatagtgaaactttgtctctacaaaaaaaaaaaaaaaaaaaaaaagtcaaaattagccaggcgcatggtaagctgtgatgataccactgcacttcaatctggaggacagagcagactctgtctcaaaaccaaaccaaaacaaaaaaactaagccctttaaaacctgaaaaattaatctttggaagggaaaatctagaaacagtttttaaaaataaaccagtcctctatttcaagatttcagagttttcataaaggaagtggatgacattccaaatgatgaaaggttgtaagggatagatacagattctagatcagtgatgggcaaactttgtttgtaaggatagtaaatatttttggctttgggaacatggggtctttgtcacatgcatgcaaaccttcctttgcaggaaagcagctgtagacaagatgtcaacaagtgaatgtgactgtgttctgacaaagcttaatttacaaaactaggctgcggtctggatttgacctgtaggctggagattgttctaggtatttgcttttcgttagtaaaatattacactagaaggacagaaacgcctccagcattgctgggaagacaaaatgagatttggaagtttttggagtttacatctacagttttaaaagagcaaaaagggccaggcacggtggctcatgcctgtaatcccagcactttgggaggctgagcggggcggatcaccttaggtcaggagttcgagaccagcctggccaacatggtgaaacccagtctctactaaaaatacaaaaattagccagatgtggtggcacgcacctgtaatttcaactactcgggaggcagagtttgcagtgagctgagattgcaccactgcgctccagcctgagccacagagcaagactccatctcaaaataaaagagtaaaaagttaagtacta

SEQ ID NO: 38465 - DNA, 2300 bp, Homo sapien
gctcttcttcaagattatttctgttattcagagtcccttggtgttccatatgaatttttttttatttttttttttttgagacagaatctcgctctatcgcccaggctggagtgcagtggagagatctcggctgaccacaacctctgcctcctcggttcaagccattctcctgcctcagcatcccaagtagctgggattacaggcacatgccaccatgcccagctaatttttttttttttttttttgtattttgagatagggtttcaccatgttggccaggatggtcttgaattcctgacctcgtgatccaccctcctcagcctcccaaaagttctgggattacagggtgagccaccgcgcccagccccatgtgaattttagagtggatttcttaatttgtacgagaaatgcccttgagattttgatggggattgcaataattctgtagatggcttttggtagtacagatatcttagcaatattaagcctgccaatccatgaacatgagatgtctttccatttgtttgtgtcttctttaatttcttttctttctttttttttttttttttttgagagacagagtcttgctctgttgcccaggctggagtgcagtggcttgatctcggatcactgcaacctctgcctcccaggttcaagcgattctactgcctcagcttcccaagtagctgggactacaggcatgcaccaccacacccagctaatttttgtatttttagtagagacagggcttcgccatgttgcccaggctgatcttgaacacctaacctcaagtgatctgcctgccttggcctcccaaagtgctgggattataggattataggcgtgagccaccacgcccagcctgtcttctttaatttttttcagcagtgttttattgttttagtatacagatttttcccttccttgattaggtctatccctaaggattttattctttttgatgctattgtaaatggaattgttttatttcctttgcagattgttcattgttactgtatagaaatgcagttgatttggtgtgttgatgtagtatcctgcaactttgctgaatatgttggagttcgaatagatttttgtgtggaatttttaggattttctacatacaaaatcatgtatcatctatgaacagagataattttacttctttctttcaaatttggaggcctttttttttcttacctagtttaattgctcggctaggacttccaaaactgtgttgaacagaagtggggagagagggcatctttgccatttctttttttttttttttttctttgagatggagtcttgctctgttgcccaggctggagtgcactggcttgatctctgctcactgcaacctccggatcccaggttcaagtgattctcgtgcctcagcctcctgagtaactgggattacaggtgcgtgccaccacacctggctaatttttgtatttttttagtagaggtggggtttcaccacattggccagcatagtctcaaactcctgacctcaagtgatctgcctgcctccgcctcccaaagtgctgggattacaggggtgagccactgcacctggcccatctttgctatttctgatcttagctatcagtctttcattgttgagtgatattagccatggactttttataaatggcctttattacattggtcatttcctaccacttctagttggtagagtgcttttatcatgaaaggatgttcaatcttgtcaaatgctttttctgtggcaattgagatgatcatgtggcttttgtcctttattctgtcaatgtggtatgttacattgattgatttaaatatgttgaaccatccttgtatttgaggaataaattccacttggggccaggcacgcctataatcccagcattttgggaggccaaggcgggcagatcacttgaggttgggagttcgagaccagcctggtcaacatgggaaaaccccgtctctactaaaaatacaaaaattttagtggtggcaggagcctgtaatcccagctactcgggagggagaggcaggagaatcgcttgaacccgggaggcggaggttgcagtgagctctcacctgcctgtgatgaccaacagcatttgggatacccagtgtggcactcattccagtgagttttagtgacacccccaccacacacagcttcccagtcacttccactaatactccagctggcttcccagcaagtcttatcgaagtcccagaaaattccagaaggggccaggtgcagtggctcacatatgtaatcccagcactttgggaggctgaggtgg

SEQ ID NO: 38466 - DNA, 2300 bp, Homo sapien
tttatcacagcactattcacaatagcaaagatgtgcaaatcaagctaagcatccatcaccagatgatgggacaaagaaaatgtggtacgtacactatgggatactattcagccataaaaaagaatgaaatggccgggcatggtagtgcatgcctataatccaagcactttgggaggccgaggcgatggatcacttgagatcagtagttctagaccagcctggccaacatgacgaaacctcgtctctactaaaattataaaagttagccgggggcggtggtgcatgcctgtaatcccagctactcaggtggctgaggcacaagaattgcttgaacccgggaggcagaggttgcagtgagccgagatcatgccattgcactccagcttaggcgacagagtaagactctctcaaaaaaaaaaaaaaaaaaaaaaaaaaaaaaaaagaatgaaatgatgtcttttgcagcaacatggatgggattgggggctattgtctttatcatttgacgtaaaaaggcaaatgcggcatgtcctaacttacaagaggggctaaataataggtacacatggacatagaatgtgaggctaggtgcagtggctcactcctataatcccagcactttggaaggccgaggtgggcagatcacttgaggccaggagttcgagaccagcctggccaacatggtgaaaccctgtctctactaaaaatacaaaaatgagcctggtgtagtggcgggtgcctgtaatcccagttactagggaggctgaggcacgaaaatctcctgaacccaggaggcagagattactgtgagctgagattgcgccactgcactccagcctaggtgacagagtgagactctgtctcaaaacaaacaaacaaaaacatggtcatagagtgtgaaataacagacactggagactcaggggtgggaggcaggaggtgggtaagggatgataaattacttcatgggtacaatgtacattatttgggtgatgagtacactaaaaccccagacttcaccaacaacaccgtatatccatgcaagaaaactatacttggcggggtgtggtggctcacgcctgtaatcccagcactttgggaggccgaggcgggcggatcacgaggtcaggagatcgagaccattctggctaacgtggtgaaaccccatctctactaaaaaatacaaaaacttagccgggcgtggtggcaggcacctgtagtcccagctactcaggaggctgaggcaggagaatggcgtgaacccgggaggcagaacttgcagtgagtggagaacatgccactgcactccagcctgggtgtcacagcgagactctgtctcaaaaaaaaaaaagaagaaagaaagaaaactatacttgtgccccttacattgatacaaaaaaaaaaacaaaaacctttctgtgttcaaattactatgtggtttctctcttctgactagactgatgaaaacaatcagttttaaaacttttggaggagcaattgattctggggctggtcttgaatgggttcaggggtatagtcttcctatacaattattgccacgtttcaactgtatagcaaatcaaatttctgttataaagataatttctggatgggtgcagtgcctcacacctgtaatcccaacactttgggaggctaagatgggaggatcacttgaggccaggagttagaggccagcctgggcaacatagtgagatcccatctctaaaaaaaatttaaaagttagccaggtgtgatggggcactcctggaggctgaggtgggaggaccgcttaagcccagaaatttgaggctgccgggaacttcgatcatcccactgcactccagcctgggcagcagagtgaaaccctgtctctaaaaataataatttccttaaactactactatttctttatatgttgatttttttatagttcattaacctgtttatcataaatacaattttttcttgtttttctttaaaagatcttgttttatatttattcacttttttcccttttttctttcaataccagaaacaaagtacggaagtgtacagcacaaatgcttagaaactgacctaatgccaatcatccatttgcaggcgttgcagagggactgtgtgaggtgaaacctccctgccctgtgaacgggatgcaggtccactcgggcgaaacggaaatactcaggaaggcagtggaggactatttctgcttttgttatggtaacgttcactttaagcattaattctattttttttttttttttgagatggagtcttgctctgccacccaggctggagtg

SEQ ID NO: 38467 - DNA, 2300 bp, Homo sapien
gaagatgggaatttaaaaaaaaaatacgctgggcatggtggcttgagcctgtaatcccagctacttgggaggctaaggtgggaggatcatttgagcccaggagtttgagaccagactgagcaacatagtaagaccctgtctctacaaaataaaataaaaataattttcaaaaatcctttgcagtgttttaaaaagctagataacaggctgggcacggtgactcacaccagctacttgggaggctgaggtgggtggatcacctgagatcaagagttcgagaccagcctggccaacatagtgaaactccgtctctactaaaactacaaaaattagtcgggcatggtggcaggcggctgtaatgccagctactcaggaggcagaggcaggagaattgcttgaacccaggaggcagaggttgcagtgagcccagtcgagaccctgtctcttaattaaaaacaaaaacaaaaacaaaaaaaactaggctgggctcagtggctcgcctgttatcctagcactttggcaggctaaggtgggtagatcgcctgagctcagccattcgagaccagtctggacaacatggtgaaacctcatctctactaaaatacaaaagaaattagctgggcatggtggtgtgtgcctgtagtcccagctactcgggaggctgaggcaggagaattgtttgaacccaggaggtggaggttgcagcgagccgagatcttgccattgcactccagccggggtggcagagcgagactctgtttctacaaaacaaaaaacaaaaaacaaaaaaaaaaaactggtagaacgttaggttcacaccatccaaagacgtttgcgtcttcttgtaggtaaagccttagggacaacagtgatggtgcctgttccctatgagaagatgctgcgagaccagtcggctgtggtagtgcaggggcttccggaaggcgttgcctttcaacaccctgagaattacgaccttgcaaccctgaaatggattttggagaacaaagcagggatttcattcatcataaataggtgacacactctgcacccccgccccttcagttcatttaaagatgaaaccaatagcctaattttaattcactcgtgcatcccgcctgctgcgtttcagagctgactgttcagatgtgtcatgcttttttcattggtccgtgctgggtaatggtgttgcttttcttgcagacccttcctaggaccagagagtcagctgggtaagtgacagcttctcaggtttggtggctcttctgagctgctgaaccacttcttcttcattaaaacttgaattgggggccgggcgtgatggctcacacctgtaatcccagcactttgggaggctgaggcaggtggatcacaaggtcaggagatcgcgaccatcctggctaacacggtgaagcccagtctgtactaaaaatacaaaaaaaaattagccgggcgtggtggcgggcgcctgtagtcccagctactcgggagtctgaggcaggagaatggcgtgaacccgggaggtggagcttgcagtgagcggagatcgcgccactgcactccagcctgggcgactgagcaagactccgtctcaaaaaaaaaaacaaaacttgaatttgggtgaggggagggaacttagaggacgggccaataggtgcagcaagccatcgtggcacacatgtgcctaggaaacaaacctgcacattctgcagatgtatcccccccccttttttttttagaagaaataaagaatattttttaaaaaaagaaaaatacatttgtagctattaaaaaaaaaattggccggacgcagtggctcacacctgtaatcccagcactttgggaggcagaggtgggcagatcacttgaggtcaggagttcgagaccagcctagtcaacatggtgaaaccccatccctactaaaaataccaaagttagccaggcatggtggcggatgcgtgtaatcccagttactcaggaggctgaggcaggagaatcacttgaacccgagatgtagagtttgcagtgagccaagattgtgccaccgcactccagcctgggtgacaaaatgagactgtgcctcaaaaataaataaataaagaagaataaaagaagatgtcttgctgagactgcctaagtggagtaaggagacggcaggggtggggggtggcacagttcacaaggcacctgctgggtgtatgacatgcttcagttcttcttagccggggactaaacacagtggaaagtctgtttcgggagggatggtgagttcctgtcatcctctaactcacattaaaggacaa

SEQ ID NO: 38468 - DNA, 2300 bp, Homo sapien
caacgtggtgaaaccttgtctccactaaacatacaaaaattagccaggcgtagtggtgcgcatctgtagtcccagctacttgggaggctgaggcaggagaatcacttgaacctgggaggtggaggctgcagtgagccaagatcatgccattgcactccagcctgggctggaaagagaaggggaagggctccaatggaatggaatggaatatttagtctttcctacatttctgtgtgttggctggactggctcagcaagggccggatggctgtgtgtctgaggccccggctgggacatcagggtctctctccttgtggcctcataccctttggaggcaccctaggctggctcccatggtgatgaggttctagaagcagcaggcacagatgatcaagctcttctcaagcctctctttgcatcccatcggctgatgtcccattgaccaaagcaagtcacacagccagggccagatttaaagggcagagaatggcctggcgccgtggtttacagctgtaatcccaacattttgggaggccaaggcaggcaaattgcttgagtccaggagttcgagaccagcctgagtaacatggtgaaacctcatgtctacaaaaaatacaaaaattaggcaggcgtggtgatgcatgcctatagtcagctactcaggaggctgagacaggaggatcgcttgagcccaggagacagaggttgcagtgagccatgatcatgccactgcactccactgggcaacagagcaagactctgtctcaaaaaataataacaaaatggcagagaaacagactttacttctagaaaggaagcatgggatagtcacattgcaaagggatgtacatcctgggatgggagaggtcttgagctaatttttgcagccaaccgcacccttctctgataaaggcgttaggttgtactgatatagcttctccaggttttgaaatccattccattatagtgagtaagttaagattataagtgcctagccgggcacggtggcttatgcctgtaatcccagcactttgagagaccaaggtgggtgggtggatcacctgaggtcaggagtttgagaccagcccggcctacatggtgaaaccccgtctttactgaaaatacaaaaattagccaggcatggtggcgtgggccacttgggaggctgaggcaggagggtcacttgaacctgggaggtggatgttgcagtgagccgagatcatgccactgcactccagcctgggcaacagagtgagactctgtctcaaaaaaaaaaaaaatggttatatatgtcagttcaggcttcatgacagaagaatcttcacagcatttcatgtaaatgcacgtggatattcagccaccctgaaggggaaaatctcccaaaactaggactagaatcagaactaagctctcccgccttcacgatgccttccttcatcctcctctccttccttctttttttttttttttttttttgagatggagtctcgctttgtcaaccagctggagtgcagtggctcgatctcagctcactgcaacctccacctcctgggttcaagcaattctcctgcctcagcctcccatgtggctggctacaggcgtccgccaccactcccagctaatttttgtagttttagtagagacagggtttcaccatgttagccaggttggtctcaaactcctgacctcaagtgatctgcccgcctcagccttccaaagtactggtattggaggcatgagtcaccgtgcccggtcccctccttccttctttccttttctattgattttacaattgatattatttttatataaacatacataaatacacaaatgtatgttttctatatgtatattattttaatttatagtatttctatttttgtatcaagaggtcaaatttgttcatagtgagtgagctacaagttcttttgctgattgtaacattgctgtattaatcaacttatattagctagtcgtatttctttgttggcaaacttaacctaacatacaattttatcatttccattacattccaaggcatttcactgaaagcagaagctgtctcagtcaagaaagaatcagaagatcctaattactatcaatataatatgcaaggtaatactgtttgataataattttcttccccaaaagttatttgggatggaagattttaattactacctgtctgaaaaactggcgagcacccatgtgtgtttacctaggatcaagcatgctgccatttagagtaaataatcctacagttataaaatagattctatttagcctaaatccatgtactc

SEQ ID NO: 38469 - DNA, 2300 bp, Homo sapien
aaaaaaaaaaaaaagggccaggcacagtggctcatgcctgtaatcccaacactttgggaggctgaggcgggtggatctcctgagctcaggagttcaagaccagcctggccaacagggtgataccccttctctactaaaaatacaaaattagccaggcgtggtggcgcacacctgtaatcccagctacttgggaagctgaggcaggagaatcgcttgaacctggaaggcagaggttgcagtgagccgagattgtgccactgcactccagcctgggcaacaagagcgaaacttcgcttcaaacaaataaattaacgcccagcatgtcttggctttcatctgccagacctcaaccctcacccccaggagatcaggtccggaccacgagctgaccctggactcaggcaagggtgagttggtgcagccctggcctgctgggaggcacaggctgcagcaggctgcctggggctgaggcccaccactcatgaactcatgaccttgaatgagctccaaaagctctgggcctcccaggctctagggggagtgggagagagaggcctcagcctgtccctgggcatgctgccccctcctcacctctttgtcccaaatccccttcctggcaaagctgacagtcttaatatcactctggagaaaactgagtcagccctaaggaacaattcaatgaaccatttgcttacttgaggattggaactcaagtctcactcaaagtctgtgccattttcgtcccagctgtcactggccctcatccacacacacccaaggatgagcatctaacgcttgcatgcacactcccatgcccgcgttcattcactcattcattcattcattcactcattcattgactcattcattcattcactcactcattcattcactcagtgaatgttgcagtcacgatccaaatatttatggcctctgtgtgccaggcactagatggaggggctggggctagagcccctgataacccggtcatgccctagctttcctgggacacacattgtggtaaggggagactaaaaaaattaagtcaggccaggcacggtggctcatgcctgaatcccagcactttgggaggccgaggcgagtgaattacctgaggtcaggagttcaagaccagcctggccaacatggagaaacccagtctctaattaaaaaaaaaaaaaaaattagccaggtgtggtggcacatgcctgtaatcccagctactcaggagactaacgcaagagaattgcttgaacccaggaggcagaggttgcggtgagccgagatcgcgccattgcactccagcctgggaaacaagagcgagactccatctcaaaaaaaaaaaaaaagtgggaggcagaggcaggaggatcactagaggccagtagtttgagaccatcctgggcaacatagcaggaccctgtctgtacaaaaaaattaaaaaaaatttaaccgggcatggtggcacacacccgtagtcccagctactccagaggctgaggcaggaggatcgctggagcccaggagttggaggctgcagtgaactgtgatcccaccactgcgcttaagcctggataacaaagcaagaccctgtctcaaataacaatagcaataataataaagaaaaattaaatgcaatttgcgatgcatcagtgataagtgctctgcagaaaaaggaggcaggaagaggctgagaaaggtatgaggtttgctatgcaatgtgaagttatcaaggaaggcttctcggaagaggtgacatttgagcagagaaatggaggagagttatggagggaagatggtgaatggggggaacatggtcaagaccaggaatatggtcaaggggggaaagatggtcaaggggacgcagcaaatgcaaaggccctgaggcaggagcagcttgattcacccccaaaacccgtggggcccgtgcaggcgacgggaaggacaagtgtaaacccttttccttgtccctgcaggtgtgtgtgaacatgagtctgcccatgtttacaccctgcaagcctgaagagtccccagaaactgaaagaagaagcaaagccctttctgtaccctccctgccccctgtcccgaccgcgacaaaagcgacttcctctttccagtgcatttaaggcgcagcctggaagtgccagggagcactggaggccacccagtcatgggggacaccttcatccgtcacatcgccctgctgggctttgagaagcgcttcgtacccagccagcactatgtgagtagctggtggagggcatcccgtggggggaatacgggagggacagcacggccac

SEQ ID NO: 38470 - DNA, 2300 bp, Homo sapien
aagagaacaagtgaatgacctctttagtcggaaatttggtaagttttgcatttgcaaagtacagttgctataagcaaagagatttgttttaataagatcttttcagcagatgatggttagatggttgtaatcctatataaaaggagttaaaatttaaaagtgagttgtttgtgctaaatttatttaataagataccattagtgttacactattgattgtcagtatgaaagttaatgaatttaaggttcaccatctggcagtgtggctcacacttgtaatcccagcattttgggagcccgaggcaggtggatcagttgaggccaggagttcgagaccagcctggccaacatagtgaaaccctgtctctactaaaaaattcaaaaaattagccgggtatggtggtgcacacctgtaatcccagctactcaggaggctgtggcacgagaattgcttgaacctgggaggcagagattgcagtgagctgagatcaagccaccacactccaacctgggtgacagagcaagactctgtctcaaaaaaaaaaaaaatttaaggttcatatttaaatttgtttgaagtgtacaaagaccttagttaacagcagagacagtctttaaaataaatgttgatcttgtgcttttgacaggctgtttaaggcggtgggttaatctgtgctgttgtgctgtttgtctcactgtccctgtaggtgaagctattggtatgggttttcctgtgaaagttccctacaggaaaatcacaattaaccctggctgtgtggtggttgatggcatgcccccgggggtgtccttcaaagcccccagctacctggaaatcagctccatgagaaggatcttagactctgccgagtttatcaaattcacggtcattaggtaagtgagagtttcctgcttagtcacaggagcgaatctggagctcatgaggctgactcttctaaaatgcagccacaggtagtcatcgaatccggcttcctatgctgtgcaatcaacaaatcaaaataacttgtgtcatcattagaatgtcagatgtgcttctacgaactaagctgactcttttaattctttggcaaagggttggcaaactaggactgtttgccaaattcaggctgcctcctatttttagagtcttcctgaaacacagctacacccgtattatccatggctgctttcctgtcacagtgagtaagtagctgggactgagaaggcatggcctccaaagtctaaaatatttactctctagcactttgtagaaaaaccttagctaggcacagtggctaacgcctgtaatcccagcattttgggaggccaaggcaggcagatcacctgaggtcaggagttccagaccagcctggccaacatggtgaaatcccatctctacaaaaataaaacagttagctgggcatgatggcgggtgcctgtaatcccagctactcgggaggctgaggcaggatagtcgcttgaacccaggaggtggaggttgcaatgagccaagatcatgccactgcactccagcctggacgacagagtgagactccatcacaagaaaaaaagaactttgtcaacctctgtcttagggcgccttgtcacaggcttcgggtcagacggattcaacctcgcatcagccatttgttagccaggtcactctgttctttgtctgtaaatgagattgatcgttgttcccactgagagtgtcagctccttcccatagagcaggcatgatgattgtactcacctctgacaccattgtgagtgccacattccttcccacgtccttgtcaccgtaagagatgcccacctgagcaccaaccccaggttatcttcccctttgtcttccagccccccagaaacagctacgactcaacctacccaatcatttcatcatcagattgccactgtctctagttcaggtctcttgggactggcactcagaaatctcataataaatcctcttgaggcttctcatacactcgtcttcttccaatcttctttccctcaaaatctcatattttggttccacttcacccacggtcattctccatatcactcccaggagttaggcaaaaagccccttccgttcttccgtatgttaaacttagaatcactctgttccctgctctgcgtttctattttttgtttttcctccatttactagtagcttaacactttctaacagtgttcttattattgatacgtatctatctcttccataagcttataaggtcatggataatacttctcattgtagtacgtaaatgacgtgggctagatatgagttgaataaac

SEQ ID NO: 38471 - DNA, 2300 bp, Homo sapien
gaacaggactgagataaaacagtctcagacagcatgattattagagatgttgaccgtgttttctacaaattctgattttaaatgtatattttcaggaaaaataaattcatcacccaatgttaatactactgcatcaggtgttgaagaccttaacatcattcaggtgacaattccaggtatgatttctctgcttccatcagagtttttgggggtctcttcagggcctcttggactttcccaactagagaggtttgctcagctcatccggggactcggatacattacacgttgcctggtgctcctcccagactcctacagcagttgccttccaaatacagttgctctccaaacagcaacggcaagttttggcacttggcatgagctaaatcctgttaaccacccaaatgtctagtctgttccttaaaaaaagtctatatgagaccgggcacggtggctcacgcctgtaatcccagcactttgggaggctgaggcaggaggatcgcttgaggtcaggaattcaaaaccagcctagccaacgtggtgaaaccctgactctactaaacatacaagaaaaattagccaggcctggttgtgtgtggctgtaatcccagctacttgggaggctgaggcaggagaagtgcttgaacccgggaggtagaggtcgcagtgagccgagatggggccagtgcactccagccttggtgacagagccatactccatctgggaaaaaaaaaaaatctatataaaacagcaggtaaaggtctttataacaagaataaatttgtagcatttttagttaggcattattttaaacaatttcaaatttaattagctcaaagtgctcaaatacttaaatcattaaaaaatggaaaatgcttgaaaacattacacagagctcctaaaaattgggattaaaagtgcatcattgagcagcggcttgtacctgtagtctcggctacttgggaggcttaggcaggaggatcgcttgagcccaagagttcaaggccagtctgggcaacatcgtgagataccatctctttaccataaaaaaaaaaaaagcagtatttaagttttgggttttctctgaactgtttcagatgatgataatgaaagactctcgaaagttgaaaaagctagacagctaagagaacaagtgaatgacctctttagtcggaaatttggtaagttttgcatttgcaaagtacagttgctataagcaaagagatttgttttaataagatcttttcagcagatgatggttagatggttgtaatcctatataaaaggagttaaaatttaaaagtgagttgtttgtgctaaatttatttaataagataccattagtgttacactattgattgtcagtatgaaagttaatgaatttaaggttcaccatctggcagtgtggctcacacttgtaatcccagcattttgggagcccgaggcaggtggatcagttgaggccaggagttcgagaccagcctggccaacatagtgaaaccctgtctctactaaaaaattcaaaaaattagccgggtatggtggtgcacacctgtaatcccagctactcaggaggctgtggcacgagaattgcttgaacctgggaggcagagattgcagtgagctgagatcaagccaccacactccaacctgggtgacagagcaagactctgtctcaaaaaaaaaaaaaatttaaggttcatatttaaatttgtttgaagtgtacaaagaccttagttaacagcagagacagtctttaaaataaatgttgatcttgtgcttttgacaggctgtttaaggcggtgggttaatctgtgctgttgtgctgtttgtctcactgtccctgtaggtgaagctattggtatgggttttcctgtgaaagttccctacaggaaaatcacaattaaccctggctgtgtggtggttgatggcatgcccccgggggtgtccttcaaagcccccagctacctggaaatcagctccatgagaaggatcttagactctgccgagtttatcaaattcacggtcattaggtaagtgagagtttcctgcttagtcacaggagcgaatctggagctcatgaggctgactcttctaaaatgcagccacaggtagtcatcgaatccggcttcctatgctgtgcaatcaacaaatcaaaataacttgtgtcatcattagaatgtcagatgtgcttctacgaactaagctgactcttttaattctttggcaaagggttggcaaactaggactgtttgccaaattcaggctgcctcctatttttagagtcttcctgaaacac

SEQ ID NO: 38472 - DNA, 2300 bp, Homo sapien
ctcaagtgctcctgttttcacagcccatcttgtgtttccatgctgcgtttgtggggcgttttctctttccatcctcaattctggcgctgattcttttcaggatacattctaaccttggaaagaagatgccaataaaaccagtgtaggggaagggcagccaatgagaggcagcaatggatgttaaatttacaattgtggtttgtctttttggctgtggttctttagataagcatgtgatttctgttcttcatgactaagaattgaatttagactttacagagttactggtttgtaaatctttgagttgtttaaattttaatgttagagttttactgtttgatcagcacattttttttctcttttgtctataggcccgaaatgtttgagacggcgattaaggagagcacctcctctaagagccctcccagtgagtgtattttctgtattttcattgctatagaacacacgctcttaggcatgcattgtgcagctgtggtttacaaacattgtttaaagaatagccattgaggccaggcatggtggttcacgcctgtaatcccagcactttgggaggctgaggtgggtggatcacctgaggtcaggagtttgagaccagcctggccaacacggcaaaaccctgtctctactaaaaatataaaaaattagccaggcgtggtggcaggcgcctataatcccagctactcaggaggctgagacagcagaatcacttgaacccgggaggcggaagttgcagtgagccgagatcgcaccactgcactccagcctggacaacagagcaagactcatctcaaaaagaaaaaagaaaacccattcaaagttgtagttcaggctatttcacaatttttagttatttaataattgggtggctctgtgagtgtgtgatgatctcctaagtacccccaggaagagaaaaacagtgaaaggcagcccttcagggggcatcatgtcttcttgaaatgatctaccatggaaagaaagaaccttgaacaggactgagataaaacagtctcagacagcatgattattagagatgttgaccgtgttttctacaaattctgattttaaatgtatattttcaggaaaaataaattcatcacccaatgttaatactactgcatcaggtgttgaagaccttaacatcattcaggtgacaattccaggtatgatttctctgcttccatcagagtttttgggggtctcttcagggcctcttggactttcccaactagagaggtttgctcagctcatccggggactcggatacattacacgttgcctggtgctcctcccagactcctacagcagttgccttccaaatacagttgctctccaaacagcaacggcaagttttggcacttggcatgagctaaatcctgttaaccacccaaatgtctagtctgttccttaaaaaaagtctatatgagaccgggcacggtggctcacgcctgtaatcccagcactttgggaggctgaggcaggaggatcgcttgaggtcaggaattcaaaaccagcctagccaacgtggtgaaaccctgactctactaaacatacaagaaaaattagccaggcctggttgtgtgtggctgtaatcccagctacttgggaggctgaggcaggagaagtgcttgaacccgggaggtagaggtcgcagtgagccgagatggggccagtgcactccagccttggtgacagagccatactccatctgggaaaaaaaaaaaatctatataaaacagcaggtaaaggtctttataacaagaataaatttgtagcatttttagttaggcattattttaaacaatttcaaatttaattagctcaaagtgctcaaatacttaaatcattaaaaaatggaaaatgcttgaaaacattacacagagctcctaaaaattgggattaaaagtgcatcattgagcagcggcttgtacctgtagtctcggctacttgggaggcttaggcaggaggatcgcttgagcccaagagttcaaggccagtctgggcaacatcgtgagataccatctctttaccataaaaaaaaaaaaagcagtatttaagttttgggttttctctgaactgtttcagatgatgataatgaaagactctcgaaagttgaaaaagctagacagctaagagaacaagtgaatgacctctttagtcggaaatttggtaagttttgcatttgcaaagtacagttgctataagcaaagagatttgttttaataagatcttttcagcagatgatggttagatggttgtaatcctatataaaaggagttaaa

SEQ ID NO: 38473 - DNA, 2300 bp, Homo sapien
gagaaaccagcccagttgcatccgttctgggccagtgggattctgggtgtccaaggtccctgtgggccatctacggtgctaaattgaaactttttgaaaagcattttttttttgagatggagtctggctctgtcacccaggctggagtggagtggtgagatcttggctcactgcaaactctgcctcccgggttcacgccattctcctgcctcagcctcccgagtagctgggactacaggcacctgccaccacgcctggctaatttttttgtatttttagtagagacagagtttcactgtgtgagccaggatggtctcgatctcctgaccttgtgatctacccgcctcagcttcccgaagtgctaggattacaggcatgagccaccgcacctggcctgaaaaaaattcttgagacagggtctcactgtgtcacccaagctggagtgcagtgatgcaatctcagctcactccagcctcgatttctcaggctccagcaatcctccctgcctcagccccactgagtagctgggactgcaagcactcgccactacacccagataatttttgttttttttgtagagatggggtctcgctatgttgcccaggctggtctcgaactcccgggcccaagtaatcctcctgcctcagccttccaaagtgctgggattacaggtgtgagctacagcgcctggcctaaatggaaaactggtgtctaggtgccatattctcaggcttgccctcaccataacacattgaacatactccaacctctgagctagatctctgcatctctgcttaaaagcctgaggttttgcttgcacaccccaatttttttttttttttttggagacagggtcttgctgtcacccaggctggagtgcaatggtgcgatcttggctcattgcaacttccatctcctgggttcaagcaattctggtccctcagcctcccgagtagctgggattacaggtgcacgccaccacgcctggctaatttttgcatttttagtagagacggggtttcatcatgttgcccaggctggtcttgaactcctgacctcaagtgatccaccaccctcggcctcccagagtgctgggataacaggcatgagccaccgcgcctggccatgcacccacatttacagcaaccttattcactaaggcctaaagatggaagtgacccaggtgtctactgatggatgaacagatcaacaaagtgggatgtattcacacaaaggaatattattcaggggggaaaaggaaggaaattctgacacatgctacaacatgaatgaaccttgaagacatcatgctgagtgaaataaactagtcacaaaagaacaaatactgcatgagatcccacttgtatgaaatacctggtgtagccggagtcatagagacagaaagaatggtggttgccaagagctggggagttggtgtttagtgggtatggagttcctgttgggtaagatgaagagttctagagatggatggtggcaattgctgtccgtattgaaaatgtgcttaacacgattgaattgcacacttaaagatagttaagatggtaggttttgttgtgtgtattttaccacaattaataaaatttgaggccaggtgtggtggctcatgcctgtaatcccagcactttgggaggctgaggtgagtagattggttgagctcacaagtcggagaccagcctgggcaacatggtgaaacctcatctctacaaaatatacaaaatgtagctgggcttagtggcgtgcacctgtggtcttagctactcaggaggctgaggtggaaggatcgcttgaccccgggaggtagaggctgcagtgagccgagattgtgccactgtactccagccaggcagtagagccagaccttgtctcaaaaaaataaaaataaaaattaatgtttaagattttattttattttagattcaagaggtacatgtggatgtttgttacatggatatatggcatactggtagggactgggcctctagtacgcccattacccaaatagtgaacattgtacccgataagtaatttttttaaccttcctccccttcccaacctcccctctattggaatccccagtgtctgatgttcccatattttttttttttttgagacggagtcttactctattgcccaggctggagtgcagtgcaatctcggctcagtacagcctctgccacctgggttcaagtgatcctcctgcctcagcctcccgagtagctgggactacaggcatgtgccaccacacccagctaatttttgtattttttagtagagatggg

SEQ ID NO: 38474 - DNA, 2300 bp, Homo sapien
tgacaatgggaacacagcggagaacagacaaaaatcactgcctttgtggagttgagattgtgtaggggagagacagataagctttaaaaaaaaaatgctgaggctggaggatcacttgaggctgggagttcgagactagcctgaacaacatagtgagacacccctctctacaaaaagtaaaaaaaaaggccgggtgtggtggctcacgcctgtaatcccagcaatttgggaggccgaggcgggcggatcatgaggtcaggagatcgagaccatcctggctaacacagtgaaaccctgtctctattaaaaatacaaaaaaattagccgggtgtggtggcgggcacctgtagtcccagctactcgagaggctgaggcaggagaatggcgtgaacctcggagggggaggttgcagtgagccgagatcgtgccactgcacttcagcctgggtgatggagcaagattccgactcaaaaaaaaaaaaaaaaaaaaaaaaggccaggcatggtggcttatgcctgtaatcccagcagtttgggaggccgaagtgggtggatcacctgaggtcaggagttcaagaccagcctaggcaacattgcgaaaaatacaaatattagccagccgtggtggccagcacctgtaatcccagctagctgggaggccaaggcacgagaatcgctgaaccaagggggaggaggttgcagtaagccaagatcgcgccatggcactctagcctgggcgacagagcaagactccatctcgggggggaaaaaagaaagttaaaaaaaaaaaaaaattagccaggcataactgtagtcccaactgctggggaagctggggtgggaggatcttttaagcccaggagttcgaggctgtagtgagctatgattgcgcccctgcactccatcctggccaacagagcaagaccctgtctctaaaaaataaataaataaaagaaaaagagtaaaagaaaataaagtgggagggggatatgcatgctctaagatctatctaccacagattacaggcttttcacccttttgtggaaatgacaaaacctagtatgttcctacctaacagaggagggctgagggaaggtgagggagcacaactgcaattttcccctgaaaaagagttctcagcctgccctggcagatagatctcacccatcgcgtccccagattactctgccaaaggtggaagcaccaatcactttaacccagaacatttcaaaaccagacagccatgaaggaggaacctctgtggtccgggcgcgtgggccctggggttggaagtgcctcagacgcactttacattttccccgaattcacccttcgcagtccccatcaccccctctccagtgggataaatggccacctcattagctctgcacacatgaccctcccgacctgactcctggtgactatgcctgccttatctcttttctctcctccctcacattttccgctgcaacaaagccaaacacagcaccgtgggggctttcacgcttctgtgccctaggacacgctgttcctgcagcttggaaggcctctgtcctccatccgcgcgccctcactctcttgctaggaactcccattcatccttcaaaacccagcctgagtgtcccctcccccgggtcaccccctttgacctgtcaatcccctccctccgggtccccagcaagcttttcggtttggcttctccgcactctcatgaccgattgccctacatcttggcgctcccagactcgggccttctccagcaccggagtcgtctggtttgctcgctttacactccaagcacctagtaccgagcctgactgggtgccagagggcgcgcctaggctcaggctggctccacccgccccgtgcctcccctcggccttccccttagtcctgagggtgcccgcgctcctgcatttcccgtgcaccgggctgccggtagctccggccgcccagcccccgcggcagcaacagcagcaacagcagcagcagcagcagcaccgggggagcccccccaggcggactacaagtcccggcaggccgcgcgcgggccgcgcatgcgcagcggggaccggcgtttgagtggcaagttgtttgttacagcgaacaccagctgctccccccgcgccgggcgccgcgcgccgctgctccgccgctcggcccctcggctgctgctccgccggcgctgcctccctcgccccgcggctcccccttgcaacttggcgggcctcctcccttttgtccggcccggcccggccgccgccgccccccgcgcccggcgccgagctcccgggtctccgg

SEQ ID NO: 38475 - DNA, 2300 bp, Homo sapien; identical to SEQ ID NO: 38388

SEQ ID NO: 38476 - DNA, 2300 bp, Homo sapien
catgatgagccatcaaccgcagccccaggaagagcggagcccccagcggagcacctcagggtaccccctccaggaggtggtggatgatgaagtgtcgggaccatcaggtgaggggactggaggaagaagaggtggcataggattgactaagatgaaggaagggggccaggcgtggtggctcacccctgtaaccccaacactttgggaggctgaggcgggcagatcacctgaggtcaggagttcaagaccagcctggccaacatggtgaaaccccatctctactaaaagtacaaaaattagccaggtggtagtggtgtgtgcctataatcccagctacttgggaggctaagacaggagaatcacttgagcctgggaggaagaggttgcagtgagccgagatcgtgctactgcactccagtctgggtgacagagtgagatgctatctcaaaaaaaaaaaaaaaaaaaaaaaaaaaaagaagggtcagaggtcaggaaggagaacctggggagggtgtgtgggaagaatggagaaattcaggctgggtgcagtggctcacacttgtaatcccagcactttgggaagccaaggcaggcggatcacttgaggccaggggtttgagaccagcctggccaacatggtgaaaccctgtctctattaaaagtacaaaatggagctgggcattatggcaggcacctgtaatcccagctacctgagaggctgaggcaggagaataactggaatccgggagatgcatgttgcagtgagctgagattgcaccactacactccagcctgggtgacaaagcaagattctgtctcgaaacaaaaaaaaaaaaaaaaaagagggactcagagagccagggaccagggaaggatatgaggcagtgttctgaggacagagagagggaagaatggggaggggaaggagtggcacatggggttgagcagaggagaaagtcagaaaggtggcttggagaagccagcagtctgcgaggctggggaggatggagagtggtttggggtttggggtcggggtctaacgtgatcagttgcagaagcattacacggtggcctggtttctttactcagcccctggggtagatcccagccccccacgtaggtcccttggctggaaaaggaagagagaatgtttggatgaatctgatgatgagccagagaaggagctcgcccctgagcctgaggagacctgggtggcggagacgctgtgtggcctcaagatgaaggcgaagcgacggcgagtgtcgctcgtgctccctgagtactacgaggccttcaacaggctgcttggtaggaggacaccccagagagcacctccaatcctgttctttctaaagaggaaacttccaataaccacacttttccaatgggaaaaatatgccccagtgggtgagctctccatgcgggaggactctgaagtgatcactcatgagggacacttaaggagacaacagaggattaggtagacttgataaaggtcggtgcttgggataagaaagcttggttttgggccaggcgctgtggctcccgcctgagatcccagcacgttgggaggctgaggcaagaggattgcttgaactcaggactttgaggctgcagtgagctatgactgcaccactgcactccagcctgggtgacagagcaaaactctgcgtcaaaagaaaaaccaaggctgggcacagtagctcatccctgtagttccagctactcgggaggctgagacaggagaactgcttaaacccaggaggcagaggttgcagtgagccaagatcaggccaatgcattccagcctggcccacagagcaagactctgtctcaaaataaattaataaataaataaaaataaaaatcaaataaagaaaaacaaaatcaaaaatcaaaaaagtggtttcagctgtgccctctgaaacttaatgtttcttactgacttttctaaacctaagtgtctccatccatagtgagggatcccaaggccatggtcacaccctgatgtgtgactgtctcatgaggaaatgatgggaattcctttatgactctgcagtggtccctccgtgtctgctggagggggtcctggctgattcccagctctacatcctgtagattctcacacccagggcctccttcggcctcttctcaggggagtctcagagcaggagcctctctcccttgcccagtgaaagtcattctcccctctctcatccacctcacccgcggccacaatcctgagactttcccccgggaggcacacttctcctcgctgccctgctgctctcacggaaacc

SEQ ID NO: 38477 - DNA, 2300 bp, Homo sapien
cataaggaatttcaaaggaatattaagaaggtacagtaaattaatcctggttttcaagagtattggttaatgcacgtgagcaaaagatttactaaagatgtttattcttcagttgattctcttcccataatttattgagaaatgctttatttgcatttctcattaaagacttaacttcaggatgatttacttttttctttttatcacataatgtttattaggactgggaaacatagtgagactctgtctctatgaaaaattaaaaaaaaaattgactgggcatggtggcatgcacctgtagttccagctacttgggaggctgaagtgggaggatcacctgagcccaggaacttgagactgcagtgagctatgattgcatcactacacttcagactgtgagacagagtaagaccctgtctggaaaaatatatatacatatatatacattttttttattttttatttttatctttttttgagatggagtctcactttggcgccctggctgcagtgcagtggcgcgatctcagttcactgcaacctccacctgccaagttcaagcgattctcctgcttcagccttctgagtagctaccattacaggcgcgcgccaccacgcccggctaatttttgtattttcagtggagacggggttccaccatgttgtccaggctggccaggctggtcttgaattcctgccctcaggtgatccgcccacctcggcctctcaaagtgctgggattacaggcgtgagccaccatgcctgaccttatgtacttatatttttatgagaatatttctcttggttttctgataaatgagttactggaacccttatgaatttgaatgcaaatgaaacagctaaatgttatataattgttgtgtttaaaaagcagattataaaactgtctgtattatatgattacagttttataaaaacaaaacaggcctaaatgtgtatagtataaagactgaagagtcagcacttccatgttctcagcggttatccttggatgtgagatctcatgcactttttgctctcttctttgtgcctttccattttgcatgcgtatttcttataatctaaaaagttacttaaacatatgcagctaaaaactttttttacttgtaaagcgtttggtgctaattttaacttttttttttagacggagtcttctcactctgtcgcccaggctggagtgcagtggtgtgatcttggctcactgcaacctccgcctcctgggttcaagtgattctcctacctcagcctcccaagtagctgggattataggtgtgtgtcaccacacccagctaatttttgtatttttagtagagatggggtttcaccatgttggccaggctggtcttgcacccctgacctcaagtgatctgcccacctcagcctcccaaagtgctgggattacaggcgtgagccaccacgcctggcttttttttttaaagcttttttgtaagtcagccagcaagaacacaggaggaagtactcaaatctcccttacacagctgggggctgtgtcaggttttataagcatagggtaatgaggtgtgatttgattggatcttgcaataaagtaatgctgggaggtgtgatctgactggatcctgccatggggtgacaccaaaactcaatctgattggatcctggctcctgcctgggggtgtctggttcttaaatcggtccgagctcttcaggctgagctcttaggttccactccacggtggcacgcgtggttaacctgggcatgcacagggtacatgaccttcaacctgcaggtcgatggcaattggaaaacaactgacaacttcattacataaaagttgaactgattcgggtgcggtgactcacgcctgtaatcccagcactttgggaggccaaggcaggtggatcacctgaggtcgaggagttcaagaccagcctggccaaaatggtgaaaccccgtctctactaaaaatataaatattagccaggcgtggtggcgcacccttgtaatcccagctaccccagaggctgaggcagcagaatgcttgaacctaggacgtggaggttgcagtgagctgagatcgtgccattgcactccagcctgggtgacaagagtgaaactccatcaaaaaaaaaaaaagttgaactagatttggtctgatgcagttacagatttacaaaccgcgtcccaccctcctgccaacaccttccactcctcattcttgagggattagggatggaggtcatgcttctgtatcgacttcatgctgaccaggggcacttagtcccctaaagtgagagga

SEQ ID NO: 38478 - DNA, 1275 bp, Homo sapien
gatcacgaagtcaggagatcgagaccatcctggctaaaacggtggaaccctgtctctactaaaaatacaaaaaattagctgggcatggtggtgggcgcctgtagtcccagccactcaggaggctgaggcaggagaatggtgtgaacccgggaggcagagcttgcagtgagctaagatcgtgccactgcactccagcctgggcgacagggcgacagagcaagaatccgtctcaaaaaaaaaaaaaaaaaaaaaaaaaacctcttaaaacaagtacagcaagaactttgagggtctttgctaagacagcagctggcagcttcaatttggagtagggtatcaaaggcaactgtgtataaggaatagttatataactggtatccaatttctgagatgattttgacttaaacattgtgtatttcccagcatactgttggtttttctaattatgtgggaaattatgttgcttttacttttttttttgctcattgcccagcctagggtgcaatgctgcaatctcagctcactgcaacctccgcctcccaggtttaagtgattcttctgcctcagcctcccaagtagctgggattacaggcgcccaccaccatgcctggctaattttttgtatttttggtagagacagggtttcacgacgttggccaggctggtctcaaactcctgatctcaagtgatccacctgcctctgtgtcccaaattgctgggattacaggcatgagccaccgcaccggccatgctttcagttttcaagaaagaagacaccattattgccaaagattttggtaatttgagagatacaatgtatgttttctccatgtggatactagatagtaaggatgtgttgaatttgaagtgtctatccagaagtattttgggtacttgtttaaggattgtaaaacaatgtttccatttctggatataataaatgtatttgttaatataataaatgaatagattagacccataaactatttgcagtgttgagtcatttcccacagttaaaatcaggatgaaaatatatagctgaatacctgctttgtttcttgtaactgatttctttagtacagaacctgctaaggccatcaaacctattgatcggaagtcagtccatcagatttgctctgggccggtggtactgagtctaagcactgcggtgaagaagatagtaggaaacagtctggatgctggtgccactaatattggtaagtttgggagagttttaagccacaagaaatgatcagtgaatgttgttgtagtcaa

SEQ ID NO: 38479 - DNA, 2300 bp, Homo sapien
ggatcttgctctgtcacccaggatggagtgcagtggtgtgatcacggctcactgtaacctccacctcctgggtacaagcaattctcctggctcagccccccgagtagctgggactacaggcacttgccaccacgcccagctaacttttgtatttttaatagagacagggtttcaccatgttggccaggctggtctcgaactcctgacctcaagtgatccacctgcctccgcctcccagagtgctaggattacaggcgtgagccaccacacccggccacaaatgtcattttatgttaattttggttgacatctgcctcgtccactagactagaactctctgagggtggaaactgggcctcttttgcttcccattctaccccagcacctagtatgatgcttggcatgtgatgttcaggaagtatctgtggagtgaatgaatgaactaggactcagctactctgtacctaagaccagaacacttcccggtccttactggcttgctttcctaacagtgtggctcctttctttggttcaggtgaatgtgccccgctgcttacacttctcaggagtggggaaggtgcgacaggctgcatgcggtggcacgggctgtgcagtgttaaacggtgagaccttctttccggtggctcattgggaagctgtaggtagattacatagggagtggtcagtgtccattggatttgcaggccgtagaccttagccttaggagggtaacatggctgggcgcggtggctcacatctgtaatcccagcactttggggaactgatgcaggaggattgcttgaggccaggagttccagaccagcctggacaacataacgagaccctgtctctaccaaaaaatggagaaattagctggaaggctgggtgtggtggctcacacctgtaatctcagcactttgggaggccaaggcgggcagatcacctgaggtcaggagttcaagaccagcctggccaacgtggtgaaaccctgactctactaaaaatagaaaaattagccagacatggtggtacatgcttgtaatcctagtacttggaaggctaaggtgggaggattgcttggacccaggaggcagaggttgtagtgagccgagattgcgccactgcactccagcctggatgactctgtctcaatagaaaaagaaaaaatgaaaaattagctgggcatggtggtgcacacctgtagtcccagctactcagaaggctgaggcagaaaggtcccttgagcccaggagttcgagctgcagtgagctatgatcatgccactgcactgggcaacacggtgagaccctgtttcaaaaaaggaagggactatggccatgggaagatggcattggattagaagatggcattacagggtgtgaatgaagttcttaacaaaaagcgaatagtctgcgatttatctgtagatacatggccacagagctgagtcatcctagagcaaacctctggagtggagagcgaactacttcattcccctcccttagcctgggccagagagactccagctctgccttctccagccaaaaaatcaaaggcagatgggagaacagccttcagctttggataacgatgaaatatctggcaccactgatgaatattaaactttctataaccaaaacatcatttctaagagttttaagaatctggcctgacattgttgatgtgtttggccttctgatcagtgtgaaacacagagctgtcattagggggagaaaacatcctccaattctctggtattcgtatgggttttctggatgatttatacgctcgtcccttccaggttactaaccctcaagatgtgggaagtttgtgttctgagccaggagagctggcgagacagactcccccagcaagaatttaagcaggggagagagaattattattctaaatctctgtctgcatgttcttgccaagcaaggaggaaaaaaacaaaacaaaaaaaaaacaaaaaaaaaccgtgtggatgtcataaaccttggtggtgtagtttgagtttctggtgagggaggttcttacttggatggacttactgacccttgtttttactgtaatgtaggagaaggacatgtttttgtctggggctatggaattcttgggaaaggtccaaacctagtggaaagtgccgtccctgaaatgattccacccactctctttggcttgacggagttcaacccagaaatccaggtttcccgcatccgatgtggactcagccgctttgctgcactgaccagtaagttaccaagcccagtggccctggtgtgagcccagcagaggttctc

SEQ ID NO: 38480 - DNA, 2300 bp, Homo sapien
ctcccgagtagctgggattacaggtggctgccaccatgcctggctaatttttatatttttagtagagacggggattcaccattttggccaggctggtctcgaacccctgaccttgtgacctgcctgcctcggcctcccaaagtgctgggatgacaggcgttgagtcactgcacctggcccaccccacttcttaattaccactacgggtccttctttgcctttgcattctacctgctgtttcttgtctaagtctaactctcccgtccctccctgcttctctgtcttccctctactattggccggcagctggtcatttcctggtccaagcacagcacccctttgtggtccatcctagcactgcatcccttgtaatgctccgggaaggacccctggtgcaggggctatagtgggtccccagcaccagcataaggggatgattttgagagttttggggcagtcaggatcgcccatggatgttccggctccagtggaattatcttttttttttttttttttttttttttgagacaaagtctcactctgttgcccagcctggagtgcagtggcacaatctcggctcactgcaacctccacctcccggattcaagccattctcctgcctcagcctcccaagtagctgggattacaggcacccgccaccacgcccaactaatttttatatttttagtagagatagggttacactatgttgaccagggtggtcttgaactcctgacctcaggtaatcctcccgcctccacctccaaaagtgctgggattacaggtgtgagccaccgcacccagccctcctgtggtattatctgaaggcccgagcgacaggacttgtcttcagaccccaggcataaaagcttctcagcagctagaactctcttgggctcagggtgatggaagaatattcagcttccattttcactcccggtctccaggttctcttcctgtgggccaagggtgaggcagggttgggatgggggctgatggggcctagggcagggatgggtcttcagctctgccctgctcacagctacccccccatggaaaatctcagagaggagaaggggaagggtgtcagtctagaacctgccggtctcaagcccatcttttcttgctggcacagccccagtgtcccgcctaccaagagggcagtagccagaagcacggtgctcctctttcctgcctgcaggatatctaatctggaggtatcagcttctgggcttctggaacttacctggagctgtgatgtccatggcaaggctctaggtttgggtcagagacccttcggccaggcaaccagcccctgacccttcccttgccatcagaaaggccccgtccaactccttccccccaccgtccccactcccaggcctggctctgcccaaggtctgggtggggatgctgggcatagtagctggcctccaagatggcccccagtcatctttacctcctggtttccacccacttatgtagttccctcccatgtcaaatcagagttgggccgtatcacaccagagcatggtagaggcaacggcgtgtgaattatgtggctaggaataaaaataacactttggtttctaacctggacccttgaatctcttgctctgggggaagctgggcgccatattgtgaggacactcaagcagccccgtgggttggcccacatggggaaggactgaggcctcctgcctacagccaggcctcacttagaagtgcatccttcagtccttagctgatttcagacaacggcaacctcatgagtgactctgagccagaatcactcagccaaacttcctgaattcctgacccacagaaaatgtgacctataaataatgatcatgttaagccgctaagtttgggggcaacttgttatacagcaccaggtaactaatacaacccctccggctctgggggcccttcctcaaattctgggtgtttttctacccgcctctagcccctggcctgtgttcccccgaccacagtgtggaggagaaagagatgagaccaggttctggctagatcagcaaaaaaccagacggccaccagccagcatcgtttttttttttcattttaattaacactttacaaagtacaaaatatactgtcttttttgggggaacattaggtaattttttttctccaacatacagtacatgaatctcgagggttttgtgtttcttcaacaagaaaataagcttgagggccccgggggggtagggataagatggcaggttctccccttcacccagatcttgggagcgatggaacgccgctgctgctgctggtga

SEQ ID NO: 38481 - DNA, 2300 bp, Homo sapien; identical to SEQ ID NO: 38461

SEQ ID NO: 38482 - DNA, 2300 bp, Homo sapien; identical to SEQ ID NO: 38460

SEQ ID NO: 38483 - DNA, 2300 bp, Homo sapien
tgagaaaccagcccagttgcatccgttctgggccagtgggattctgggtgtccaaggtccctgtgggccatctacggtgctaaattgaaactttttgaaaagcattttttttttgagatggagtctggctctgtcacccaggctggagtggagtggtgagatcttggctcactgcaaactctgcctcccgggttcacgccattctcctgcctcagcctcccgagtagctgggactacaggcacctgccaccacgcctggctaatttttttgtatttttagtagagacagagtttcactgtgtgagccaggatggtctcgatctcctgaccttgtgatctacccgcctcagcttcccgaagtgctaggattacaggcatgagccaccgcacctggcctgaaaaaaattcttgagacagggtctcactgtgtcacccaagctggagtgcagtgatgcaatctcagctcactccagcctcgatttctcaggctccagcaatcctccctgcctcagccccactgagtagctgggactgcaagcactcgccactacacccagataatttttgttttttttgtagagatggggtctcgctatgttgcccaggctggtctcgaactcccgggcccaagtaatcctcctgcctcagccttccaaagtgctgggattacaggtgtgagctacagcgcctggcctaaatggaaaactggtgtctaggtgccatattctcaggcttgccctcaccataacacattgaacatactccaacctctgagctagatctctgcatctctgcttaaaagcctgaggttttgcttgcacaccccaattttttttttttttttggagacagggtcttgctgtcacccaggctggagtgcaatggtgcgatcttggctcattgcaacttccatctcctgggttcaagcaattctggtccctcagcctcccgagtagctgggattacaggtgcacgccaccacgcctggctaatttttgcatttttagtagagacagggtttcatcatgttgcccaggctggtcttgaactcctgacctcaagtgatccaccagcctcggcctcccagagtgctgggataacaggcatgagccaccgcgcctggccatgcacccacatttacagcaaccttattcactaaggcctaaagatggaagtgacccaggtgtctactgatggatgaacagatcaacaaagtgggatgtattcacacaaaggaatattattcaggggggaaaaggaaggaaattctgacacatgctacaacatgaatgaaccttgaagacatcatgctgagtgaaataaactagtcacaaaagaacaaatactgcatgagatcccacttgtatgaaatacctggtgtagccggagtcatagagacagaaagaatggtggttgccaagagctggggagttggtgtttagtgggtatggagttcctgttgggtaagatgaagagttctagagatggatggtggcaattgctgtccgtattgaaaatgtgcttaacacgattgaattgcacacttaaagatagttaagatggtaggttttgttgtgtgtattttaccacaattaataaaatttgaggccaggtgtggtggctcatgcctgtaatcccagcactttgggaggctgaggtgagtagattggttgagctcacaagtcggagaccagcctgggcaacatggtgaaacctcatctctacaaaatatacaaaatgtagctgggcttagtggcgtgcacctgtggtcttagctactcaggaggctgaggtggaaggatcgcttgaccccgggaggtagaggctgcagtgagccgagattgtgccactgtactccagccaggcagtagagccagaccttgtctcaaaaaaataaaaataaaaattaatgtttaagattttattttattttagattcaagaggtacatgtggatgtttgttacatggatatatggcatactggtagggactgggcctctagtacgcccattacccaaatagtgaacattgtacccgataagtaatttttttaaccttcctccccttcccaacctcccctctattggaatccccagtgtctgatgttcccatattttttttttttttgagacggagtcttactctattgcccaggctggagtgcagtgcaatctcggctcagtatagcctctgccacctgggttcaagtgatcctcctgcctcagcctcccgagtagctgggactacaggcatgtgccaccacacccagctaatttttgtattttttagtagagatggg

SEQ ID NO: 38484 - DNA, 2300 bp, Homo sapien
tggagtacagtggcaagcctcatagctcactgcagcctcaacctcccaggctcaagtaatccccccaaggagctgggactacaggcatgcaccaccatgcctggctttttttttttttttttttttagaggtggagtctcactatgttgcccaggctggtctcaaactcctgttctcaagcgatcctcctgcctcagcctcccaaagtgctgaggttacaggcgtgagccactgcacctggctaggaaactgagttttttcagtggtagaggctcctagccagtggccaagggaaagagagagttctgggttcaggggctggcaggaagttagcaagacaccagggactcagctacactggctggatctcagagaagagcaactgccacagtggggacctggagcacaaggggaaactggggcagcagctgcaccacagggttggcggtacctgataagggaagaggatgacttccataagtaggcccacaggtgcccagggctccccatacccactgggtgccaggtctaaaaccatgagaccagtaccagcaccaaccactcaaggagctgagacggctgacccactctctgccctggctaggactggccccagcacccccagtggggaggcctcaatgatcccagctgccaggggcccaggaacactagcaacagaagaatggccaaagtgacagggaacccttgagaccctagagcagcaatgcctgggccgggcctgatccttcccaccagcccccagccattcctggccttctgccatgcttcctggttggtctgcaaagtgcctggggcaaataccttctgggagaagagtagagagggtatccaggctccatgggcctcaggattcctgaagtaggaggctctgatggggccaccctgctctggacagaaattccctagcctcagggacatgttgaatcttgtcacccagaggaaccaagtggctgggtggtagcccagtgcagtggctcatgcctgtaacctcaacactttgggaggccaagacaggcagatcacgaggtcaagagattgagaccatcctggctaatatggtgaaaccccgtctctactaaaaatacaaaaattagctgggtgtggtggtggcaggcacctgtaatcccagctactcgggaggctgaggcaggagaatcgcttgaacctgggaggcacaggttgcagtgagctgagatagcgccactgcactccagcccgggcaacagagtgagactccatctgaaaaaaaagaaaaagaaaaaaaaaagaaagaggctggacagcaaaataaaatggttccccagttcagcctttggaggtaccaaccgtctgttagcagagctctaagaccaaatgggctcccactccaggaacgtcccccttcccacaggggctggggagatggagtccggggctgtgctgccctctggagcagcaggtggaggccaaggcagcctcactgttctccggggccctgggaagccatgcagagaggcagaggtcctttatgtgccagatgaggctgctgtcaagggactgcaaatctgcttgaggtgtgacatatctgtttttagaacaagaacatcacatcaggaggagccggtggccagagcttggggaaaggggggatccaggtccaattcccatgtatctagggcacatgtgcacagcactgagggccactccagcccctccccagctctcagaggaccctgctcccacctgccttttgctctgctatcgggcagatggcattgtctctgctttgcaactgatgaaataggaactctggcttctgggctaggctgagagggtgcttgctgctgccattcctggcccaggtgagacattcggtcatgagcatctgtagctcttgcctgagcctctgagcctgccagggcagagcagaagcaaatgcatgaaggcccctcccccaggggctgctcttagccagtgactgatgaaaatgggtgtgtaaacagcttagccacatgaccccacacaggtgggacaaccatgggtttccacattctgtactgcctcccagaggtccccaccaggtttaagctcaattgcccacactggtaactggtaacttccttgatagcactcatttcttttttcattcttttggtgtttttttagatggagttttgctcttgtcgcccaagctggagtgcagtggtgtgatctcagctcactgcaacctccgcctcccagattcaagcaattctcctgcctcaccctcctgggattacaggcatgtgccaccacacatg

SEQ ID NO: 38485 - DNA, 2300 bp, Homo sapien
cgggtggttcatctgaggtcaggagttcaagaccagcttggtcaacatggtgaaaccccatctctacaaaaatacagaaattagtcatacgtggtggtgggtgcctgtaatcccagctactcgggaggctgaggtgggggaatcgcttgaacccgggaggcggaggttgcagtgagcccagtgcactccagcctggatgacagagcgagactccgtctcaaaaaaaaaaaaaaaaaaaaaatcagatgacccgctgtggagctgactctgttcccaaaccaggattttcatcaagctaaaaatctaggctgggctgggtggctccaacctgtaaccccagcactttgggaggccgaggtgggcagactgtttgagcttgggagttcaagaccatcctggacgacagggtgaaacatcgtctctaccaaaaatacaaaaaattagacacccgtggtggcgtgcgccaatagtcccagatacttgggaggctgagatcagagaatcgctcgaacccgggaggcggaggttgcagtgagccgagatcatgccactgtactctagcctgggtgacagagtgagactctgtttccaaaaaaaaaaaaaaaaaatagggcttaaatcgggagagtgacatgatctgatttacacttgcaaaaagatcagtgtcatgaatactcagtgttggcagagatttgaaacaaagtattctctcatatgtgctggtgggaatgcaaggtgtacaaacaccaaggaaaccccagcaccagcaatggactcagccacaccccatgacccagcagctccgctcctggtgactgttctagagaggtgtgtgtgcaggaacgttcatcacaatgttcacagtggtgctggaaggacccaagtgtccaccagcaggagaaatgaacaaatgcactgcggcatattctttttttttctttttctttttttttgagacagagtctcactctgtcacccaggctggagtgcgatggcgcgatctcggctcactgcaacctccgcctcctggattcaagtgattctctcacctcagcctcccgagtagctgagactacaggtgcgtgccaccacacccagctatttttttttttttttgagacggagtctcactcttgtagcccaggctacagtgcaaatggtatgatcttggctcactgcaagtgccgcctcctgggttcatgccattctcctgcctcagcctcctgagtagctgggaatacaggtgcccgcaaccatgcctggctactttttgtatttttagcagagatggggtgttagccaggatggtctcgatctcctgatctcgtgatccaccctccttggcctcccaaagtgctgggattacaggcatgagccatggcacctggccccatctaattttttgtatttttagtagagatgcggtttcaccatgttggccaggctgctcttaaactcctgacctcaagcgatccacctgctatggcctcccaaagcgctgggattacaggcgtgagccactgtgcctggccggaacccacaggttctttggatggtctctgaatgtcatgaaactcttttatatttaattaaaaaaatttttttgacacaaggtcttgctgtgttgcccagactggagtgcggtgtcacgatcacagctcactgcagcccctaactcctaggctcaagcaatcctcctgccacctcagtctctcaagttgttggaacacaggtgccagccacgacacctggctaattttgttttgttttgttttgttttgttttagagatgggctcttgctatgttgcctatactggtcttgaactgctggcctcaggcagtcttcctcccttggccacccaaagagatgggattacaagcatgagccactgtgcacagctgagatttttcgacttagtctttttgtacacccagtatcttatagaatatccataatatagattcataaataaaccatttccttcaatggtataaataaataaaccactgctataaatggtggaattttctgagttaagagcaatacatatgatacaaaacttgatatatagagtttcttagccaaactggaggggctggctttaggtgatccgtggactccctgaaattggggacaccattggaaatatgtgtgaactcatgggcagtttcctatgatttccagtcctcaaaatatctcttggactcaaagatgccttagggcagaggacgcgtgtacccccagtacagaatctcggacagtgaatgtcagtagacactcggcagaaaacctctgcca

SEQ ID NO: 38486 - DNA, 2300 bp, Homo sapien
cagccccaggaagagcggagcccccagcagagcacctcagggtaccccctccaggaggtggtggatgatgaagtgtcgggaccatcaggtgaggggactggaggaagaagaggtggcataggattgactaagatgaaggaagggggccaggcgtggtggctcacccctgtaaccccaacactttgggaggctgaggcgggcagatcacctgaggtcaggagttcaagaccagcctggccaacatggtgaaaccccatctctactaaaagtacaaaaattagccaggcggtagtggtgtgtgcctataatcccagctacttgggaggctaagacaggagaatcacttgagcctgggaggaagaggttgcagtgagccgagatcgtgctactgcactccagtctgggtgacagagtgagatgctatctcaaaaaaaaaaaaaaaaaaaaaaaaaaaaaaaaaaaagaagaaaaaaaagaagggtcagaggtcaggaaggagaacctggggagggtgtgtgggaagaatggagaaattcaggctgggtgcagtggctcacacttgtaatcccagcactttgggaagccaaggcaggcggatcacttgaggccaggagtttgagaccagcctggccaacatggtgaaaccctgtctctattaaaagtacaaaatggagctgggcattatggcaggcacctgtaatcccagctacctgagaggctgaggcaggagaataactggaatccgggagatgcatgttgcagtgagctgagattgcaccactacactccagcctgggtgacaaagcaagattctgtctcgaaacaaaaaaaaaaaaaaaaaagagggactcagagagccagggaccagggaaggatatgaggcagtgttctgaggacagagagagggaagaatggggaggggaaggagtggcacatggggttgagcagaggagaaagtcagaaaggtggcttggagaagccagcagtctgcgaggctggggaggatggagagtggtttggggtttggggtcggggtctaacgtgatcagttgcagaagcattacacggtggcctggtttctttactcagcccctggggtagatcccagccccccacgtaggtcccttggctggaaaaggaagagggaatgtttggatgaatctgatgatgagccagagaaggagctcgcccctgagcctgaggagacctgggtggcggagacgctgtgtggcctcaagatgaaggcgaagcgacggcgagtgtcgctcgtgctccctgagtactacgaggccttcaacaggctgcttggtaggaggacaccccagagagcacctccaatcctgttctttctaaagaggaaacttccaataaccacacttttccaatgggaaaaatatgccccagtgggtgagctctccatgcgggaggactctgaagtgatcactcatgagggacacttaaggagacaacagaggattaggtagacttgataaaggtcggtgcttgggataagaaagcttggttttgggccaggcgctgtggctcccgcctgagatcccagcacgttgggaggctgaggcaagaggattgcttgaactcaggactttgaggctgcagtgagctatgactgcaccactgcactccaacctgggtgacagagcaaaactctgcgtcaaaagaaaaaccaaggctgggcacagtagctcatccctgtagttccagctactcgggaggctgagacaggagaactgcttaaacccaggaggcagaggttgcagtgagccaagatcaggccaatgcattccagcctggcccacagagcaagactctgtctcaaaataaattaataaataaataaaaataaaaatcaaataaagaaaaacaaaatcaaaaatcaaaaaagtggtttcagctgtgccctctgaaacttaatgtttcttactgacttttctaaacctaagtgtctccatccatagtgagggatcccaaggccatggtcacaccctgatgtgtgactgtctcatgaggaaatgatgggaattcctttatgactctgcagtggtccctctgtgtctgctggagggggtcctggctgattcccagctctacatcctgtagattctcacacccagggcctccttcggcctcttctcaggggagtctcagagcaggagcctctctcccttgcccagtgaaagtcattctcccctctctcatccacctcacccgcggccacaatcctgagactttcccccgggaggcacacttctcctcgctgccctgctgctctcacggaaacc

SEQ ID NO: 38487 - DNA, 2300 bp, Homo sapien
gatacttctttccattttctgtgaggtcatctgcagtttcacatggtagacagacttaggtgagattcttagcaacatagaatgaagagtaaagaggtttgtttatttcacaagggtttattgaaggcctacgatgtgttaaatgctgtaggaaatacccactgatttctcttttcatggaggtttcccgccttctcttaacgagtgatcaattaaactgtttactgggaacttgctaagttaatgaacacacgggatacattctttggatgagcagacattggttgggcagaggggcaagaggagagcagtttagacagagacctgcttatacactgtagtgtctaagagagcttgtgatgttcaggaaacagttgttcactgtgctgcaatataggggacggccagttgcggtggctcacacctgtaatcctagtgctttggaaggccaaggcgggcagatcacctgaggtcaggagttagaaaccagcctggccaacatggtgaaaccccatctctactaaaaacacaaaaattagctgagtgtaatggtggatgcctataatcccagcaacttgggaggctgagacaggagaatcacttgaacttgggaggtggaggttgcagtgagccgagatcatgccattgcactctagcccaggtgacagggtgagactctgtcaataataataataataataataataataataataataataataataatgtaggggacttgatgaagggaaaggatcagagagattctgaaaagaaggtagtttggggcccagtgatgactagattttaagtttcatatagtaggaagtggggcactagtaatttttcaagcagaaaaattatttgaccagattcgtgatttcaaaaatagctctggtgatagagtggaggatgggttggagcagggaataaggggaaatgaaaccgttataaaactcttaaagtgggctgggcatggtggctcacgcctgtaatcccagcactttgggaggctgaggcgggcggatcacgaagtcaggagatcgagaccatcctggctaaaacggtggaaccctgtctctactaaaaatacaaaaaattagctgggcatggtggtgggcgcctgtagtcccagccactcaggaggctgaggcaggagaatggtgtgaacccgggaggcagagcttgcagtgagctaagatcgtgccactgcactccagcctgggcgacagggcgacagagcaagaatccgtctcaaaaaaaaaaaaaaaaaaaaaaaacctcttaaaacaagtacagcaagaactttgagggtctttgctaagacagcagctggcagcttcaatttggagtagggtatcaaaggcaactgtgtataaggaatagttatataactggtatccaatttctgagatgattttgacttaaacattgtgtatttcccagcatactgttggtttttctaattatgtgggaaattatgttgcttttacttttttttttgctcattgcccagcctagggtgcaatgctgcaatctcagctcactgcaacctccgcctcccaggtttaagtgattcttctgcctcagcctcccaagtagctgggattacaggcgcccaccaccatgcctggctaattttttgtatttttggtagagacagggtttcacgacgttggccaggctggtctcaaactcctgatctcaagtgatccacctgcctctgtgtcccaaattgctgggattacaggcatgagccaccgcaccggccatgctttcagttttcaagaaagaagacaccattattgccaaagattttggtaatttgagagatacaatgtatgttttctccatgtggatactagatagtaaggatgtgttgaatttgaagtgtctatccagaagtattttgggtacttgtttaaggattgtaaaacaatgtttccatttctggatataataaatgtatttgttaatataataaatgaatagattagacccataaactatttgcagtgttgagtcatttcccacagttaaaatcaggatgaaaatatatagctgaatacctgctttgtttcttgtaactgatttctttagtacagaacctgctaaggccatcaaacctattgatcggaagtcagtccatcagatttgctctgggccggtggtactgagtctaagcactgcggtgaagaagatagtaggaaacagtctggatgctggtgccactaatattggtaagtttgggagagttttaagccacaagaaatgatcagtgaatgttgttgtagtcaaga

SEQ ID NO: 38488 - DNA, 2300 bp, Homo sapien
atcgcttgtgaccaagagttcaagaccagtctgggcaacagagcaagatgctatatctactacaggcatgcacctgtagtctcagctacttgggaggctgagagaagaggattgcttgagcccaggaggcaacagagagctgattgtaccactgcaccccagccgaggcaacagagagctgattgtaccactgcaccccagccaaggcaacagagaccttgtctctaaaaaacaaaaacaggccgggtgcagtgtcttatgcctgtattcccagcactttgagaggcagaggcgggtggatcatttgaagtcaggtgttcaagaccagcctggcaaacatgacgaaaccctaaaatacaaaaattagccgggagtggtggtgggtgcctgtaatctcagctactcgggaggctgaggcaggagaatcgcttgaacctgggaggcagaggttgcagtgagccgagatggagccactgcactgcagcctgggtgacaagagcgaaactctgtctcaaaatattaggaaaaaaaaagagagagagcctcttttccatctccccgccacagagttgtcttcagtaatttcattcccttttttcctgaggattcactgggtttctgggtcccagaggggaagttctcttcaaggtacagaaaccacgactccgcagagaaccgcagagaaccgcagagatggcagcatgaccagaccacggacaggtgtgtagaagctgctgggctgaaacttgggctgaacttccgctgcaggttgacttattcccatcagcaccaaagccgctggagggggtcatccactagcaaatgaagtgggggcacggattggaggctgtttcagaaggtcccactgagccacggactcaaggcctggccacagccctcccaagcgaggcccagatcatatttcaccacgctcagaaaaccttgccagctcatttcagtccacagtgactttgctttctttaggatctctcttgcactgtccaactcagagaatttcaaatctgaatggattccaatgatggagctaaatcaggcctcacctcagttttttaattacaatcaatagggctgggtcccagcatctgtgtcttaatgttcctccatgtgatcctcatgctgaaaggctggtatttgaaaatccctttttttggggagtgaagggtttttttagagacaggcctcactctgatgcccagcctggaatgcagtggtggatcacagctcactgcagcctcgaactcctggccgcaagaaatcctcccaccttagccaaccaaagtgttgggattgcaggagtgaccactgtgtccagccaggaaagcccttctgtttcacttgaatgatatttctgccgcagacctacagcccttgttgtattaaacggcatcattgcaggaaaagaaaaggtgagaggtgactgttttgcttttttctgaacatatcagaccaaacctgggctgtctggcactttttttttttttttttttgagtcggagtctcactctgtcgcccaggctggagtgtagtgtcgtgatctcggctcactggaacctccaccttcccggttcaagtgattctcctgcctcagccccacaagtagctgggattacagaagtgcactcccacgcccagctcattgtttctgtatttttacagaaaaacagacaggtttcaccatgttggccaggctgatctcaacctcctcacctctggttatctgtcggcatcagcttccaaaagtgctgggattacaagtgtgagccgccgcacctggtttgcccattttttgacaatgtatcaacatcatctaagatgggcactgcctcagtgtagtgtgtctagacaaggtggccggaacagagaggaatatgcataccaggcttaaagacgggttaaatcagagcttttcattccacaaaagagcaattttaatgaggtcagaacatggatgttctaatatttgaaagcctgttaactaggagagagagtaaagtgatttgttgtaggaggacacacccagctctgacggtttaaagcgtcatgaatgcaaatttgaactccagaaaagcagagcttcctaacaatgggacttccacagcaatgggatttccttccgcattcagtttgtgcctttcccatgagcgagagactcctaggagagccgcagcccgttaggaagccatgtgggaactcatccacaggttctttttgttttttttttttgttgtttttttttgagatgtagttttgctcttgttgcccaggctggagtgcaatgg

SEQ ID NO: 38489 - DNA, 2300 bp, Homo sapien
gccgcaggaagagcggagcccccagcggagcacctcagggtaccccctccaggaggtggtggatgatgaagtgtcgggaccatcaggtgaggggactggaggaagaagaggtggcataggattgactaagatgaaggaagggggccaggcgtggtggctcacccctgtaaccccaacactttgggaggctgaggcgggcagatcacctgaggtcagtagttcaagaccagcctggccaacatggtgaaaccccatctctactaaaagtacaaaaattagccaggcggtagtggtgtgtgcctataatcccagctacttgggaggctaaaacaggagaatcacttgagcctgggaggaagaggttgcagtgagccgagatcgtgctactgcactccagtctgggtgacagagtgagatgctatctcaaaaaaaaaaaaaaaaaaaaaaaaaaaaaaaaaaaaaagaagaaaaaaaagaggggtcagaggtcaggaaggaaaacctggggagggtgtttggaaagaatggaaaaattcaggctgggtgcagtggctcacacttgtaatcccagcactttgggaagccaaggcaggcggatcacttgaggccaggagtttgaaaccagcctggccaacatggtgaaaccctgtctctattaaaagtacaaaatggagctgggcattatggcaggcacctgtaatcccagctacctgagaggctgaggcaggagaataactggaatccgggagatgcatgttgcagtgagctgagattgcaccactacactccagcctgggtgacaaagcaagattctgtctcgaaacaaaaaaaaaaaaaaaaaagagggactcagagagccagggaccagggaaggatatgaggcagtgttctgaggacagagagagggaagaatggggaggggaaggagtggcacatggggttgagcagaggagaaagtcagaaaggtggcttggagaagccagcagtctgcgaggctggggaggatggagagtggtttggggtttggggtcggggtctaacgtgatcagttgcagaagcattacacggtggcctggtttctttactcagcccctggggtagatcccagccccccacgtaggtcccttggctggaaaaggaagagggaatgtttggatgaatctgatgatgagccagagaaggagctcgcccctgagcctgaggagacctgggtggcggagacgctgtgtggcctcaagatgaaggcgaagcgacggcgagtgtcgctcgtgctccctgagtactacgaggccttcaacaggctgcttggtaggaggacaccccagagagcacctccaatcctgttctttctaaagaggaaacttccaataaccacacttttccaatgggaaaaatatgccccagtgggtgagctctccatgcgggaggactctgaagtgatcactcatgagggacacttaaggagacaacagaggattaggtagacttgataaaggtcggtgcttgggataagaaagcttggttttgggccaggcgctgtggctcccgcctgagatcccagcacgttgggaggctgaggcaagaggattgcttgaactcaggactttgaggctgcagtgagctatgactgcaccactgcactccagcctgggtgacagagcaaaactctgcgtcaaaagaaaaaccaaggctgggcacagtagctcatccctgtagttccagctactcgggaggctgagacaggagaactgcttaaacccaggaggcagaggttgcagtgagccaagatcaggccaatgcattccagcctggcccacagagcaagactctgtctcaaaataaattaataaataaataaaaataaaaatcaaataaagaaaaacaaaatcaaaaatcaaaaaagtggtttcagctgtgccctctgaaacttaatgtttcttactgacttttctaaacctaagtgtctccatccatagtgagggatcccaaggccatggtcacaccctgatgtgtgactgtctcatgaggaaatgatgggaattcctttatgactctgcagtggtccctccgtgtctgctggagggggtcctggctgattcccagctctacatcctgtagattctcacacccagggcctccttcggcctcttctcaggggagtctcagagcaggagcctctctcccttgcccagtgaaagtcattctcccctctctcatccacctcacccgcggccacaatcctgagactttcccccgggaggcacacttctcctcgctgccctgctgctctcacggaaacc

SEQ ID NO: 38490 - DNA, 2300 bp, Homo sapien
tgaaaacagactaatggacccttctggttgaaggaatgtagccattctgcttgtttaagtatttcctttctattcatctctatttcccgggaggtgtttatccaagtgcaataggagatattggtgactgcagagtcccctcagtgttctgctagtaaatagttgaaggttgatcagtgatctccagcattttcagtctggcatggaaaagcccccatgtaactggtaaaggtatcagtaagcaccaggaggtatctaaatccaccaggagccataggcatcatgttgatgtccatttaccagtcttccctggcaagattctctgaattgtactgccttggccaaaagaggtatgggaggggctgggcacagtggctcacgcctgtaatcccagcattttgggagaccaattcgggtagatcattagaggtcaggggttcaagaccatcctggccaacatggtgacattccatctctactaaaaatacaaaaagtcagcggggtttggtgttgggtgcctgtaatcccagctactcgggaggctgaggcaggataatcacttgaacctgggaggaggaggaggtggcagtgagctgagatctcgccattgcactccagcctgggcaacaagagcgaaacttcatctcaaaaaataaaacaagaagtctgggtgtggtggctcgtgcctgtaatcccaggactttgggaggccaagatgggtggatcatgaggtcaggagttcaagaccagcctggcctagatggtgaaaccctgtctcgagtgaaaatacaaatattagctgggcatggtggcacacacctgtaatctcagctactcagaagtctgagacagaagaattgccaaaacccgggagggagaggttgcagtgagccgagatcgcgccactgcactctagcctgggcgacagagcaagactccgtctcgaaagaaagaaagagaaaggaaattccccagggaagtacctcggcttatttcatgaagaggtactgaaggaagcagaggcatgtggaggacttccccacctcgtgcagctatttgggccgtggcgtctgaaatttcttatttcagagtcacccctttgatgaccttggcagtggactgcagtcatctgtttaggcctctccatggcccgtgtcaatgccgatatttctgtctgttgcacatttgatttccttgttgttggcatttagaaggccccctgtttcccagatcacaccacgggcatggaccgcagagattgcatcttgtgagtctgtagaaacagtcaaggccttgtcctctcttaggtccagagctcaggtgaatgcagattttcccggccatctgtgctgaagtccctgtggggaggctcctggctggtttcctgtaggtagacagctacacatcctgcccttcattggcttcttttcatgaagctcctgctgtctacaaaacatgtctcccttttcttcttgaaccacatctctgttattgaaactctagaagtcagccaggcacagtggctatgcctgtaatcccagcactttgggaggccaaggtgggtggatcacctgaggtcaggagttcaagaccagcctggccaacatggcgaaaccctgtctctaatacaaatactaaaattagccaagcatggtggccactgcactccagcctgggtgacagagcaagactctgtctcaaataaagaaagagaaagtatcatgcttttcagagttctgtgggttgttatggtgaattatcaaacctgaggacgtggtgggaacctccaaatttgcagccagttggtgagaagtacatgcggtctgtggacacccaagcttgcagctgcatctgaagcgagggcagcctagcgggggctggtggccttaacctgtggcatttgatgtaacatcagggagttgacatcagaattacgtcacacaggccaggtgcagtggctcatgcttataatcccagcaattagaaaggcaagataagaagattgcttgagcttgagtctgagcccacagtgagctatgaccgcaccactgcaccccagtctgggtgacagcacaagaccccgactccaaaaataaaaaagaaaaatcacaaagaattgcatggcagagtgcctgtctttcacagcttgaactgttgcaggaactttctttttttttttttcttttgtgatggagtctcgcgctttcacccaggctggagtgcagtggcgcgatctctgctcactgcaggctccgcctcctgggttcacaccattctcctgcctcagcctccggagtagc

SEQ ID NO: 38491 - DNA, 2300 bp, Homo sapien
cataaggaatttcaaaggaatattaagaaggtacagtaaattaatcctggttttcaagagtattggttaatgcacatgagcaaaagatttactaaagatgtttattcttcagttgattctcttcccataatttattgagaaatgctttatttgcatttctcattaaagacttaacttcaggatgatttacttttttctttttatcacataatgtttattaggactgggaaacatagtgagactctgtctctatgaaaaattaaaaaaaaaattgactgggcatggtggcatgcacctgtagttccagctacttgggaggctgaagtgggaggatcacctgagcccaggaacttgagactgcagtgagctatgattgcgtcactacacttcagactgtgagacagagtaagaccctgtctggaaaaatatatatacatatatatacattttttttattttttatttttatctttttttgagatggagtctcactttggcgccctggctgcagtgcagtggcgcgatctcagttcactgcaacctccacctgccaagttcaagcgattctcctgcttcagccttctgagtagctaccattacaggcgcgcgccaccacgcccggctaatttttgtattttcagtggagacggggttccaccatgttgtccaggctggccaggctggtcttgaattcctgccctcaggtgatccgcccacctcggcctctcaaagtgctgggattacaggcgtgagccaccatgcctgaccttatgtacttatatttttatgagaatatttctcttggttttctgataaatgagttactggaacccttatgaatttgaatgcaaatgaaacagctaaatgttatataattgttgtgtttaaaaagcagattataaaactgtctgtattatatgattacagttttataaaaacaaaacaggcctaaatgtgtatagtataaagactgaagagtcagcacttccatgttctcagcggttatccttggatgtgagatctcatgcactttttgctctcttctttgtgcctttccattttgcatgcgtatttcttataatctaaaaagttacttaaacatatgcagctaaaaactttttttacttgtaaagcgtttggtgctaattttaacttttttttttagacggagtcttctcactctgtcgcccaggctggagtgcagtggtgtgatcttggctcactgcaacctccgcctcctgggttcaagtgattctcctacctcagcctcccaagtagctgggattataggtgtgtgtcaccacacccagctaatttttgtatttttagtagagatggggtttcaccatgttggccaggctggtcttgcacccctgacctcaagtgatctgcccacctcagcctcccaaagtgctgggattacaggcgtgagccaccacgcctggcttttttttttaaagcttttttgtaagtcagccagcaagaacacaggaggaagtactcaaatctcccttacacagctgggggctgtgtcaggttttataagcatagggtaatgaggtgtgatttgattggatcttgcaataaagtaatgctgggaggtgtgatctgactggatcctgccatggggtgacaccaaaactcaatctgattggatcctggctcctgcctgggggtgtctggttcttaaatcggtccgagctcttcaggctgagctcttaggttccactccacggtggcacgcgtggttaacctgggcatgcacagggtacatgaccttcaacctgcaggtcgatggcaattggaaaacaactgacaacttcattacataaaagttgaactgattcgggtgcggtgactcacgcctgtaatcccagcactttgggaggccaaggcaggtggatcacctgaggtcgaggagttcaagaccagcctggccaaaatggtgaaaccccgtctctactaaaaatataaatattagccaggcgtggtggcgcacccttgtaatcccagctaccccagaggctgaggcagcagaatgcttgaacctaggacgtggaggttgtggtgagctgagatcgtgccattgcactccagcctgggtgacaagagtgaaactccatcaaaaaaaaaaaaagttgaactagatttggtctgatgcagttacagatttacaaaccgcgtcccaccctcctgccaacaccttccactcctcattcttgagggattagggatggaggtcatgcttctgtatcgacttcatgctgaccaggggcacttagtcccctaaagtgagagga

SEQ ID NO: 38492 - DNA, 2300 bp, Homo sapien
tgggtatgttaaaattatttctttcaaaggaaaaggctggtcaaagtgcaacggtctttacaactaattgatcacaaccagttacagatttttttgttccttctccactccaactgcttcacttgactagtgtaaggaaaaaaaaaagaggaaagaaagaaaatgctaaactatttaatctgggctagtaaatggccagaaagaactttataaaaatgaaatatacaaaatgacactagtatgtttaactaaaggtatagttacgacacttaaatttgcacgttataaataatatcaatataaaaactgatagcgtgggtccatttttaataaatatataaatattttaaactttctagatctaaagcttaaggactatggaatggatctcattgaagtttcaggcaatggatgtggggtagaagaagaaaacttcgaaggcttaagtaagttaactttctaatcctattacaaaataattgggccacatgtcttagaattttgagtaacactgtcttgggaaacacaaaaacagttttttaaagccagttactagatatcatgtatatttgttgttatagcacttgagatatcttagtccttactttacagtctctttcagctctgaaacatcacacatctaagattcgagagtttgccgacctaactcgggttgaaacttttggctttcaggggaaagctctgagctcactttgtgcactgaggtgagaaaatatttttatccattcacttgaccccttagaaaaacctctctgaaaattaattggaatcattattatttacaattttctatctcaatatctcagcttctagcttctgaattctgttttgtctcactgccaatctaagtcctagtacttctgaaatgtgagcaataaatgaatgaaatgaagcaaatagtattctttaaaaaattggttacccttattaaaacagtaacttctcaatttgaacataacatatagataataaatgatagttaccattggttttcattatcaatttttagggaaacatttcaccaaagcactatttaattacagcacagatactaaatttttataaataattacatgcacacacacatatatagacatatatatacatatatatacatatatatacatatatatacatatatacatatatatacatatatacatatatatacatatatacatatatacatatatatatacacatatatacatatatacatatatatacatatatacatatatatacatatatatacatatatatatacatatatatacatatatatacatatatatatacatatatatgtatatatatatatatatattttttttttagacagagtcgcactctgtcacccaggctggagtgcagtggcacagtctcagctcactgcagtctctgcctcccaggttcaagtgactttcgtgactcagcctcctgaagagctgggactatagcgtgcaccaccactcctggctaatttttgtatttttagtagagatggggttttgccatgttgcccaggctggtctggaactccaggcctcaagtgatctgccctccttggcctcccaaagtgctggaattacaggcacgagccaccgcaccctgccctacatatacattttaattataatatcttttggattctttaaaaaaaattttaaaaattttaaaaaattctttaaaaaaattcttttaaaaaattttgtttgaagagtaataacaaaacaaatctctatttgagaatcaataaatcttgagatcatttatggttttgcaattcaacctgaaaaatgaagtcaaagcttttatcaaaacaaagcatgtttagtgctctctgtctcactgtcttttagatgccagaccttagattttgtgatgactcctcaaccgtttagatctcggttatctcagagggatcatcagctttttaagaaaattttgagagaaaagcaagtgaagaaaagagtagtcagtgcccaacatcatggatctctcactgaacacaccatgcctggtattctctcacagtgatgtcaccatttctacctgccacgtatcggcgaaggttgggactcgactggtgtttgatcacgatgggaaaatcatccagaaaaccccctacccccaccccagagggaccacagtcagcgtgaagcagttattttctacgctacctgtgcgccataaggaatttcaaaggaatattaagaaggtacagtaaattaatcctggttttcaagagtattggttaatgcacatgagcaaaagat

SEQ ID NO: 38493 - DNA, 2300 bp, Homo sapien; identical to SEQ ID NO: 38487

SEQ ID NO: 38494 - DNA, 2300 bp, Homo sapien
cgcttgtgaccaagagttcaagaccagtctgggcaacagagcaagatgctatatctactacaggcatgcacctgtagtctcagctacttgggaggctgagagaagaggattgcttgagcccaggaggcaacagagagctgattgtaccactgcaccccagccgaggcaacagagagctgattgtaccactgcaccccagccaaggcaacagagaccttgtctctaaaaaacaaaaacaggccgggtgcagtgtcttatgcctgtattcccagcactttgagaggcagaggcgggtggatcatttgaagtcaggtgttcaagaccagcctggcaaacatgacgaaaccctaaaatacaaaaattagccgggagtggtggtgggtgcctgtaatctcagctactcgggaggctgaggcaggagaatcgcttgaacctgggaggcagaggttgcagtgagccgagatggagccactgcactgcagcctgggtgacaagagcgaaactctgtctcaaaatattaggaaaaaaaaagagagagagcctcttttccatctccccgccacagagttgtcttcagtaatttcattcccttttttcctgaggattcactgggtttctgggtcccagaggggaagttctcttcaaggtacagaaaccacgactccgcagagaaccgcagagaaccgcagagatggcagcatgaccagaccacggacaggtgtgtagaagctgctgggctgaaacttgggctgaacttccgctgcaggttgacttattcccatcagcaccaaagccgctggagggggtcatccactagcaaatgaagtgggggcacggattggaggctgtttcagaaggtcccactgagccacggactcaaggcctggccacagccctcccaagcgaggcccagatcatatttcaccacgctcagaaaaccttgccagctcatttcagtccacagtgactttgctttctttaggatctctcttgcactgtccaactcagagaatttcaaatctgaatggattccaatgatggagctaaatcaggcctcacctcagttttttaattacaatcaatagggctgggtcccagcatctgtgtcttaatgttcctccatgtgatcctcatgctgaaaggctggtatttgaaaatccctttttttggggagtgaagggtttttttagagacaggcctcactctgatgcccagcctggaatgcagtggtggatcacagctcactgcagcctcgaactcctggccgcaagaaatcctcccaccttagccaaccaaagtgttgggattgcaggagtgaccactgtgtccagccaggaaagcccttctgtttcacttgaatgatatttctgctgcagacctacagccattgttgtattaaacggcatcattgcaggaaaagaaaaggtgagaggtgactgttttgcttttttctgaacatatcagaccaaacctgggctgtctggcactttttttttttttttttttttgagtcggagtctcactctgtcgcccaggctggagtgtagtgtcgtgatctcggctcactggaacctccaccttcccggttcaagtgattctcctgcctcagccccacaagtagctgggattacagaagtgcactcccacgcccagctcattgtttctgtatttttacagaaaaacagacaggtttcaccatgttggccaggctgatctcaacctcctcacctctggttatctgtcggcatcagcttccaaaagtgctgggattacaagtgtgagctgccgcacctggtttgcccattttttgacaatgtatcaacatcatctaagatgggcactgcctcagtgtagtgtgtctagacaaggtggccggaacagagaggaatatgcataccaggcttaaagacgggttaaatcagagcttttcattccacaaaagagcaattttaatgaggtcagaacatggatgttctaatatttgaaagcctgttaactaggagagagagtaaagtgatttgttgtaggaggacacacccagctctgacggtttaaagcgtcatgaatgcaaatttgaactccagaaaagcagagcttcctaacaatgggacttccacagcaatgggatttccttccgcattcagtttgtgcctttcccatgagcgagagactcctaggagagccgcagcccgttaggaagccatgtgggaactcatccacaggttctttttgttttttttttttgttgtttttttttgagatgtagttttgctcttgttgcccaggctggagtgcaatgg

SEQ ID NO: 38495 - DNA, 2300 bp, Homo sapien
aaccaaagtgttgggattgcaggagtgaccactgtgtccagccaggaaagcccttctgtttcacttgaatgatatttctgctgcagacctacagccattgttgtattaaacggcatcattgcaggaaaagaaaaggtgagaggtgactgttttgcttttttctgaacatatcagaccaaacctgggctgtctggcactttttttttttttttttttttgagtcggagtctcactctgtcgcccaggctggagtgtagtgtcgtgatctcggctcactggaacctccaccttcccggttcaagtgattctcctgcctcagccccacaagtagctgggattacagaagtgcactcccacgcccagctcattgtttctgtatttttacagaaaaacagacaggtttcaccatgttggccaggctgatctcaacctcctcacctctggttatctgtcggcatcagcttccaaaagtgctgggattacaagtgtgagctgccgcacctggtttgcccattttttgacaatgtatcaacatcatctaagatgggcactgcctcagtgtagtgtgtctagacaaggtggccggaacagagaggaatatgcataccaggcttaaagacgggttaaatcagagcttttcattccacaaaagagcaattttaatgaggtcagaacatggatgttctaatatttgaaagcctgttaactaggagagagagtaaagtgatttgttgtaggaggacacacccagctctgacggtttaaagcgtcatgaatgcaaatttgaactccagaaaagcagagcttcctaacaatgggacttccacagcaatgggatttccttccgcattcagtttgtgcctttcccatgagcgagagactcctaggagagccgcagcccgttaggaagccatgtgggaactcatccacaggttctttttgttttttttttttgttgtttttttttgagatgtagttttgctcttgttgcccaggctggagtgcaatggtgtgaccttggctcactgcaacctccgcctcccaagtttaagccattctgctgtccccgcctcctgagtggctgggattacaggcacccaccaccatgcctgactaattttttgtatttttagaagagatggggtttcaccatgttggccaggctgctcttaaactcctgacctcaagcgatccacctgctatggcctcccaaagcgctgggattacaggcgtgagccactgtgcctggccggaacccacaggttctttggatggtctctgaatgtcatgaaactcttttatatttaattaaaaaaatttttttgacacaaggtcttgctgtgttgcccagactggagtgcggtgtcacgatcacagctcactgcagcccctaactcctaggctcaagcaatcctcctgccacctcagtctctcaagttgttggaacacaggtgccagccacgacacctggctaattttgttttgttttgttttgttttgttttagagatgggctcttgctatgttgcctatactggtcttgaactgctggcctcaggcagtcttcctcccttggccacccaaagagatgggattacaagcatgagccactgtgcacagctgagatttttcgacttagtctttttgtacacccagtatcttatagaatatccataatatagattcataaataaaccatttccttcaatggtataaataaataaaccactgctataaatggtggaattttctgagttaagagcaatacatatgatacaaaacttgatatatagagtttcttagccaaactggaggggctggctttaggtgatccgtggactccctgaaattggggacaccattggaaatatgtgtgaactcatgggcagtttcctatgatttccagtcctcaaaatatctcttggactcaaagatgccttagggcagaggacgcgtgtacccccagtacagaatctcggacagtgaatgtcagtagacactcggcagaaaacctctgccaaattgagtgctctgatgtgactttttcatcaagtcaatgttcctgggatctcttgtacatgataatctcactcttgtaaggtttcatcgtttctgcttaccctacttttctttcccatcctgatccctctcccaccagactggactctgaaacgggcatgtacagagaagaggagaccccaacatgcttcaagctttgagtggagaggacacagcctctgctgggacagggaacagagggatgcggagaccctgaagatgcttttggacagtggtctgagg

SEQ ID NO: 38496 - DNA, 2300 bp, Homo sapien
cgcagccccaggaagagcggagcccccagcggagcacctcagggtaccccctccaggaggtggtggatgatgaagtgtcgggaccatcaggtgaggggactggaggaagaagaggtggcataggattgactaagatgaaggaagggggccaggcgtggtggctcacccctgtaaccccaacactttgggaggctgaggcgggcagatcacctgaggtcaggagttcaagaccagcctggccaacatggtgaaaccccatctctactaaaagtacaaaaattagccaggcggtagtggtgtgtgcctataatcccagctacttgggaggctaagacaggagaatcacttgagcctgggaggaagaggttgcagtgagccgagatcgtgctactgcactccagtctgggtgacagagtgagatgctatctcaaaaaaaaaaaaaaaaaaaaaaaaaaaaaaaaaagaagaaaaaaaagaagggtcagaggtcaggaaggagaacctggggagggtgtgtgggaagaatggagaaattcaggctgggtgcagtggctcacacttgtaatcccagcactttgggaagccaaggcaggcggatcacttgaggccaggagtttgagaccagcctggccaacatggtgaaaccctgtctctattaaaagtacaaaatggagctgggcattatggcaggcacctgtaatcccagctacctgagaggctgaggcaggagaataactggaatccgggagatgcatgttgcagtgagctgagattgcaccactacactccagcctgggtgacaaagcaagattctgtctcgaaacaaaaaaaaaaaaaaaaaagagggactcagagagccagggaccagggaaggatatgaggcagtgttctgaggacagagagagggaagaatggggaggggaaggagtggcacatggggttgagcagaggagaaagtcagaaaggtggcttggagaagccagcagtctgcgaggctggggaggatggagagtggtttggggtttggggtcggggtctaacgtgatcagttgcagaagcattacacggtggcctggtttctttactcagcccctggggtagatcccagccccccacgtaggtcccttggctggaaaaggaagagggaatgtttggatgaatctgatgatgagccagagaaggagctcgcccctgagcctgaggagacctgggtggcggagacgctgtgtggcctcaagatgaaggcgaagcgacggcgagtgtcgctcgtgctccctgagtactacgaggccttcaacaggctgcttggtaggaggacaccccagagagcacctccaatcctgttctttctaaagaggaaacttccaataaccacacttttccaatgggaaaaatatgccccagtgggtgagctctccatgcgggaggactctgaagtgatcactcatgagggacacttaaggagacaacagaggattaggtagacttgataaaggtcggtgcttgggataagaaagcttggttttgggccaggcgctgtggctcccgcctgagatcccagcacgttgggaggctgaggcaagaggattgcttgaactcaggactttgaggctgcagtgagctatgactgcaccactgcactccagcctgggtgacagagcaaaactctgcgtcaaaagaaaaaccaaggctgggcacagtagctcatccctgtagttccagctactcgggaggctgagacaggagaactgcttaaacccaggaggcagaggttgcagtgagccaagatcaggccaatgcattccagcctggcccacagagcaagactctgtctcaaaataaattaataaataaataaaaataaaaatcaaataaagaaaaacaaaatcaaaaatcaaaaaagtggtttcagctgtgccctctgaaacttaatgtttcttactgacttttctaaacctaagtgtctccatccatagtgagggatcccaaggccatggtcacaccctgatgtgtgactgtctcatgaggaaatgatgggaattcctttatgactctgcagtggtccctccgtgtctgctggagggggtcctggctgattcccagctctacatcctgtagattctcacacccagggcctccttcggcctcttctcaggggagtctcagagcaggagcctctctcccttgcccagtgaaagtcattctcccctctctcatccacctcacccgcggccacaatcctgagactttcccccgggaggcacacttctcctcgctgccctgctgctctcacggaaacc

SEQ ID NO: 38497 - DNA, 2300 bp, Homo sapien; identical to SEQ ID NO: 38490

SEQ ID NO: 38498 - DNA, 2300 bp, Homo sapien
cataaggaatttcaaaggaatattaagaaggtacagtaaattaatcctggttttcaagagtattggttaatgcacatgagcaaaagatttactaaagatgtttattcttcagttgattctcttcccataatttattgagaaatgctttatttgcatttctcattaaagacttaacttcaggatgatttacttttttctttttatcacataatgtttattaggactgggaaacatagtgagactctgtctctatgaaaaattaaaaaaaaaattgactgggcatggtggcatgcacctgtagttccagctacttgggaggctgaagtgggaggatcacctgagcccaggaacttgagactgcagtgagctatgattgcgtcactacacttcagactgtgagacagagtaagaccctgtctggaaaaatatatatacatatatatacattttttttattttttatttttatctttttttgagatggagtctcactttggcgccctggctgcagtgcagtggcgcgatctcagttcactgcaacctccacctgccaagttcaagcgattctcctgcttcagccttctgagtagctaccattacaggcgcgcgccaccacgcccggctaatttttgtattttcagtggagacggggttccaccatgttgtccaggctggccaggctggtcttgaattcctgccctcaggtgatccgcccacctcggcctctcaaagtgctgggattacaggcgtgagccaccatgcctgaccttatgtacttatatttttatgagaatatttctcttggttttctgataaatgagttactggaacccttatgaatttgaatgcaaatgaaacagctaaatgttatataattgttgtgtttaaaaagcagattataaaactgtctgtattatatgattacagttttataaaaacaaaacaggcctaaatgtgtatagtataaagactgaagagtcagcacttccatgttctcagcggttatccttggatgtgagatctcatgcactttttgctctcttctttgtgcctttccattttgcatgcgtatttcttataatctaaaaagttacttaaacatatgcagctaaaaactttttttacttgtaaagcgtttggtgctaattttaacttttttttttagacggagtcttctcactctgtcgcccaggctggagtgcagtggtgtgatcttggctcactgcaacctccgcctcctgggttcaagtgattctcctacctcagcctcccaagtagctgggattataggtgtgtgtcaccacacccagctaatttttgtatttttagtagagatggggtttcaccatgttggccaggctggtcttgcacccctgacctcaagtgatctgcccacctcagcctcccaaagtgctgggattacaggcgtgagccaccacgcctggcttttttttttaaagcttttttgtaagtcagccagcaagaacacaggaggaagtactcaaatctcccttacacagctgggggctgtgtcaggttttataagcatagggtaatgaggtgtgatttgattggatcttgcaataaagtaatgctgggaggtgtgatctgactggatcctgccatggggtgacaccaaaactcaatctgattggatcctggctcctgcctgggggtgtctggttcttaaatcggtccgagctcttcaggctgagctcttaggttccactccacggtggcacgcgtggttaacctgggcatgcacagggtacatgaccttcaacctgcaggtcgatggcaattggaaaacaactgacaacttcattacataaaagttgaactgattcgggtgcggtgactcacgcctgtaatcccagcactttgggaggccaaggcaggtggatcacctgaggtcgaggagttcaagaccagcctggccaaaatggtgaaaccccgtctctactaaaaatataaatattagccaggcgtggtggcgcacccttgtaatcccagctaccccagaggctgaggcagcagaatgcttgaacctaggacgtggaggttgcagtgagctgagatcgtgccattgcactccagcctgggtgacaagagtgaaactccatcaaaaaaaaaaaaagttgaactagatttggtctgatgcagttacagatttacaaaccgcgtcccaccctcctgccaacaccttccactcctcattcttgagggattagggatggaggtcatgcttctgtatcgacttcatgctgaccaggggcacttagtcccctaaagtgagagga

SEQ ID NO: 38499 - DNA, 2300 bp, Homo sapien
ggcatgaaccactgcgcccggcccccgttctccttactgggtatgttaaaattatttctttcaaaggaaaaggctggtcaaagtgcaacggtctttacaactaattgatcacaaccagttacagatttttttgttccttctccactccaactgcttcacttgactagtgtaaggaaaaaaaaaagaggaaagaaagaaaatgctaaactatttaatctgggctagtaaatggccagaaagaactttataaaaatgaaatatacaaaatgacactagtatgtttaactaaaggtatagttacgacacttaaatttgcacgttataaataatatcaatataaaagctgatagcgtgggtccatttttaataaatatataaatattttaaactttctagatctaaagcttaaggactatggaatggatctcattgaagtttcaggcaatggatgtggggtagaagaagaaaacttcgaaggcttaagtaagttaactttctaatcctattacaaaataattgggccacatgtcttagaattttgagtaacactgtcttgggaaacacaaaaacagttttttaaagccagttactagatatcatgtatatttgttgttatagcacttgagatatcttagtccttactttacagtctctttcagctctgaaacatcacacatctaagattcaagagtttgccgacctaactcgggttgaaacttttggctttcgggggaaagctctgagctcactttgtgcactgaggtgagaaaatatttttatccattcacttgaccccttagaaaaacctctctgaaaattaattggaatcattattatttacaattttctatctcaatatctcagcttctagcttctgaattctgttttgtctcactgccaatctaagtcctagtacttctgaaatgtgagcaataaatgaatgaaatgaagcaaatagtattgtttaaaaaattggttacccttattaaaacagtaacttctcaatttgaacataacatatagataataaatgatagttaccattggttttcattatcaatttttagggaaacatttcaccaaagcactatttaattacagcacagatactaaatttttataaataattacatgcacacacacatatatatacatatatatacatatatatacatatatatatacatatatatacatatatacatatatatacatatatacatatatacatatatacatatatatatacatatatacatatatatatacatatatacatacatatacatatatatacatatatatatacatatatatatacatatatatgtatatatatatttttttttttttttttagacagagtcgcactctgtcacccaggctggagtgcagtggcacagtctcagctcactgcagtctctgcctcccaggttcaagtgactttcgtgactcagcctcctgaagagctgggactatagcgtgcaccaccactcctggctaatttttgtatttttagtagagatggggttttgccatgttgcccaggctggtctggaactccaggcctcaagtgatctgccctccttggcctcccaaagtgctggaattacaggcacgagccaccgcaccctgccctacatatacattttaattataatatcttttggattctttaaaaaaaattttaaaaattttaaaaaattctttaaaaaaattcttttaaaaaattttgtttgaagagtaataacaaaacaaatctctatttgagaatcaataaatcttgagatcatttatggttttgcaattcaacctgaaaaatgaagtcaaagcttttatcaaaacaaagcatgtttagtgctctctgtctcactgtcttttagatgccagaccttagattttgtgatgactcctcaaccgtttagatctcggttatctcagagggatcatcagctttttaagaaaattttgagagaaaagcaagtgaagaaaagagtagtcagtgcccaacatcatggatctctcactgaacacaccatgcctggtattctctcacagtgatgtcaccatttctacctgccacgtatcggcgaaggttgggactcgactggtgtttgatcacgatgggaaaatcatccagaaaaccccctacccccaccccagagggaccacagtcagcgtgaagcagttattttctacgctacctgtgcgccataaggaatttcaaaggaatattaagaaggtacagtaaattaatcctggttttcaagagtattggttaatgcacatgagcaaaagat

SEQ ID NO: 38500 - DNA, 2300 bp, Homo sapien
tttgagacagagtctcaccctgtcacctgggctagagtgcaatggcatgatctcggctcactgcaacctccacctcccaagttcaagtgattctcctgtctcagcctcccaagttgctgggattataggcatccaccattacactcagctaatttttgtgtttttagtagagatggggtttcaccatgttggccaggctggtttctaactcctgacctcaggtgatctgcccgccttggccttccaaagcactaggattacaggtgtgagccaccgcaactggccgtcccctatattgcagcacagtgaacaactgtttcctgaacatcacaagctctcttagacactacagtgtataagcaggtctctgtctaaactgctctcctcttgcccctctgcccaatgtctgctcatccaaagaatgtatcccgtgtgttcattaacttagcaagttcccagtaaacagtttaattgatcactcgttaagagaaggcgggaaacctacatgaaaagagaaattagtgggtatttcctacagcatttaacacatcgtaggccttcaataaacccttgtgaaataaacaaacctctttactgttcattctatgttgctaagaatctcacctaagtctgtctaccatgtgaaactgcagatgacctcacagaaaatggaaagaagtatctctaaaaataagtttatttggcaacacactacaggctacaggttcacttctgattttttttctttttttttttgagatggagtcttgctgtgtcacccaggctagactgcagtggtgcaatctcagctcactgcaacctctgtctcctgggttccagcgattctcctgcctcagcctcccaagtagctaggattacaggcgcctgccaccacgcccagctaatttttgtatttttagtagaaatgggatttcaccatgttggccaggctggtcgtgaactcctgacctcatgatccacttgccttggcctcccaaagtgatgggattataggtgtgagccaccgcacctggtccacttcagatatttagatacagacggcaagtgtatttaaatgtctcaatacatttaaatgtagttacctaaatatatctaatatatttaaatgcagagagcaaatttgcgtttacaaatctgacatggaattcaactgtgctagccaagattcggtgtagcttaccagccagaaatcacataccctaagaggtaaaaatgcattgcattttttaaaactgagcagctacgcaaattaggatgtgtctggacgctctactgtccccaaaataacctcaatttttttttaaaaggccaggcacagtgcattacgcctgtaattccagagctttggggggccaaggcgggcggactgcttgagctccggagttccagaccagcttgggcaacatagcgaaatccccgtctctacaaaaaaataaaataaaaattaaaaataaaataatataaaaataaaaataaaaggggagagagaacaggtagaaaggaaatgcattcagtctatggggatttcacgttccggcttcaagtccacggccctgtgatgggatgtgggcagggcctgagacaggccgaacccaactcttcacagggccgaattctttgcccgcagcccagcaccccgaaggagcttgcctcggcttcaaggcgcacctaatgggcaccggatcgctggggcgctgaggatgccgctccggggcctccacgaggcggcctcccacgcgcctcggccatgttccccccatttccagggaggtcggaagccgtggttctcaaagagggcgagcgagaggggcgaccgcgagcccagctcacctcgagctctcagctctctccaaggatgcaacaccggatccgcctcggggactgggaaagtgccctcaacggctcccacaggcgccccgcctcctgggctcccattggctgctttcgacgttgtgctccaccctttccgggcggggcggaaaaaatacttcccgtctctccttttcgcctagtggctctgtcaaaggtcgagtccgtgacgtcaaagagcctggaccaatcagagcacaccggactgcgttttttttccgaacgcccgcagcagggtcagaagggaggtggtcgccctccgtcgtggtctggcgtgtattccgagccttggtgtctggcggtttccgagcgttggtgtctggcggtttccgagcgttggtgtctggcggtttccgaccgttggtgtctggcggtttccgaccgttggtgtctggcacgcgccaccctct

SEQ ID NO: 38501 - DNA, 2300 bp, Homo sapien
gcactaggattacaggtgtgagccaccgcaactggccgtcccctatattgcagcacagtgaacaactgtttcctgaacatcacaagctctcttagacactacagtgtataagcaggtctctgtctaaactgctctcctcttgcccctctgcccaatgtctgctcatccaaagaatgtatcccgtgtgttcattaacttagcaagttcccagtaaacagtttaattgatcactcgttaagagaaggcgggaaacctacatgaaaagagaaattagtgggtatttcctacagcatttaacacatcgtaggccttcaataaacccttgtgaaataaacaaacctctttactgttcattctatgttgctaagaatctcacctaagtctgtctaccatgtgaaactgcagatgacctcacagaaaatggaaagaagtatctctaaaaataagtttatttggcaacacactacaggctacaggttcacttctgattttttttctttttttttttgagatggagtcttgctgtgtcacccaggctagactgcagtggtgcaatctcagctcactgcaacctctgtctcctgggttccagcgattctcctgcctcagcctcccaagtagctaggattacaggcgcctgccaccacgcccagctaatttttgtatttttagtagaaatgggatttcaccatgttggccaggctggtcgtgaactcctgacctcatgatccacttgccttggcctcccaaagtgatgggattataggtgtgagccaccgcacctggtccacttcagatatttagatacagacggcaagtgtatttaaatgtctcaatacatttaaatgtagttacctaaatatatctaatatatttaaatgcagagagcaaatttgcgtttacaaatctgacatggaattcaactgtgctagccaagattcggtgtagcttaccagccagaaatcacataccctaagaggtaaaaatgcattgcattttttaaaactgagcagctacgcaaattaggatgtgtctggacgctctactgtccccaaaataacctcaatttttttttaaaaggccaggcacagtgcattacgcctgtaattccagagctttggggggccaaggcgggcggactgcttgagctccggagttccagaccagcttgggcaacatagcgaaatccccgtctctacaaaaaaataaaataaaaattaaaaataaaataatataaaaataaaaataaaaggggagagagaacaggtagaaaggaaatgcattcagtctatggggatttcacgttccggcttcaagtccacggccctgtgatgggatgtgggcagggcctgagacaggccgaacccaactcttcacagggccgaattctttgcccgcagcccagcaccccgaaggagcttgcctcggcttcaaggcgcacctaatgggcaccggatcgctggggcgctgaggatgccgctccggggcctccacgaggcggcctcccacgcgcctcggccatgttccccccatttccagggaggtcggaagccgtggttctcaaagagggcgagcgagaggggcgaccgcgagcccagctcacctcgagctctcagctctctccaaggatgcaacaccggatccgcctcggggactgggaaagtgccctcaacggctcccacaggcgccccgcctcctgggctcccattggctgctttcgacgttgtgctccaccctttccgggcggggcggaaaaaatacttcccgtctctccttttcgcctagtggctctgtcaaaggtcgagtccgtgacgtcaaagagcctggaccaatcagagcacaccggactgcgttttttttccgaacgcccgcagcagggtcagaagggaggtggtcgccctccgtcgtggtctggcgtgtattccgagccttggtgtctggcggtttccgagcgttggtgtctggcggtttccgagcgttggtgtctggcggtttccgaccgttggtgtctggcggtttccgaccgttggtgtctggcacgcgccaccctctcttgctttggttgcgccatgccgatgtaccaggtaaagccctatcaccgggtctgcgcccctctccgtgtggagcccacctgcatgtactggctccccaacatgcacggcaggagcggcggcccagcacttggcactggccacttgcaggtaggagcgcggggcaccccgcccactgcgcacgcgcggcggccgggtgctggcccgggtgcccctaggccggatagagtgcttcccaaccgattcgcg

SEQ ID NO: 38502 - DNA, 2300 bp, Homo sapien
atggcaaaaccccgtctctactaaaaatacaaaaattagccaggtgcagtggacagtgcctgtaatctcagctactcatgaggctgaggcctgagaattgcttgaacccaggaggccaaggtggcagtgagctgagatcatgccactgcactccagcctgggtgacagagtgaaactccgtctgaaaaaaacaaaacaaacaaacaaacaaaaaaccagaccatattgtttagggatacttagctgacaaaataatagagacaagcatgacataattaccataaaaatcaggccctggggtgctggtggggaaggtttaagtggaaagaatggagcggtgacaatgtgtgtcaacctgggaggtggtgaccctggggttcgctttgtaattcctcaaaatgagcatttatgtgctattcacttttcagaggatagaattctgaactaaaatgtttaagcagccatacgcaaaaaaaaaagaaaaaatatggatagatttttattttaattaaaacatttaaaaaatagagacaaggcagctgggcgtggtggctcacgcctgtaatcccagcaatttgggaggccgaggcaggcgaatcacgaggtcaagagatcgagaccatcctggctaacacggtgaaaccaagtctctactaaaaatacaaaataaagttagccaggcgtggtggcgggcgcctgtagtcccagctactggggaggctgaggcaggagaatggcgtgaacccgggaggtggagcttgcagtgagtcgagatcaggccactgcattccagcctgggcgacagagcaagactccaactcaaaaaaaaaaaaaaaacatagagacaagggtcttgctatgttgctcagggtggtctcaaactctccgggctcaagcaatcctcccgcttcggtctcccaaagcgctgagattccaggcgtgaaccaccgcgctcgaccaggaaaaaaatatatatatatataatatacaatatattttataatatattatgtcatatattacacataatatacaatatgtataatacgcataataaaggtatatttaatatatataaagatatatatgtatataataatttttttttttgagacggagtttcactcttgctgcccaggctcgagtgcaatggctcgatctcagctcactgcaagctccgcctccagggttcaaaccattctcctgcctcagcctcccgagtagctgcgattacaggcgcccgacacacgcccggctaatttttgcatttttagtagacacggggtttcaccatgttggccagactggtctcgaactcctgatctcaggtgatccgcccgcctcggcctcccaaagtgccgggattacaggcgtgagccacggcgcccggcctgaataaatcttttaaaacataaaaatctgggtgagcccctggccggccggcacagatgccggggtggggccgcgaatcggttgggaagcactctatccggcctaggggcacccgggccagcacccggccgccgcgcgtgcgcagtgggcggggtgccccgcgctcctacctgcaagtggccagtgccaagtgctgggccgccgctcctgccgtgcatgttggggagccagtacatgcaggtgggctccacacggagaggggcgcagacccggtgatagggctttacctggtacatcggcatggcgcaaccaaagcaagagagggtggcgcgtgccagacaccaacggtcggaaaccgccagacaccaacggtcggaaaccgccagacaccaacgctcggaaaccgccagacaccaacgctcggaaaccgccagacaccaaggctcggaatacacgccagaccacgacggagggcgaccacctcccttctgaccctgctgcgggcgttcggaaaaaaaacgcagtccggtgtgctctgattggtccaggctctttgacgtcacggactcgacctttgacagagccactaggcgaaaaggagagacgggaagtattttttccgccccgcccggaaagggtggagcacaacgtcgaaagcagccaatgggagcccaggaggcggggcgcctgtgggagccgttgagggcactttcccagtccccgaggcggatccggtgttgcatccttggagagagctgagagctcgaggtgagctgggctcgcggtcgcccctctcgctcgccctctttgagaaccacggcttccgacctccctggaaatggggggaacatggccgaggcgcgtgggaggccgcctcgtggaggccccggagcggcatcctcagcgcc

SEQ ID NO: 38503 - DNA, 2300 bp, Homo sapien
gagagcgtttcttttcttaaagcgtgttcttttcttaaaggtatcacaggagtgattatgcctttattgattgatggagcagatgaggagaggcattgcatgacatgggaaggaagcttagatgtgggtggcaccttgttcacccgtgttattttttagctccatcttgacaattatacttaattattttttccctctctgtttctttttttataattttattgaagttctaatatctgaaagtgtacaaagcgtatatgtagtttaaaaaataaaaatgagatatcacccagatctctagccccagctcaagaaatgaaacattaatagtgctgtagagatcctttgtgtaccttctttctaccctacctcacagtccccttattacccataggtaaacactagggtgaactttgtgttaatctttctcatctttcattatagtgttaccactatgaatgtgttctttaattatgtaaatgaatccattattcaggcttctgtgatttaattatttcagttaagattgtttgagatttatccacattaacatgtagttttatagtttctgggaaaatatttaaaattttcaaacatacagaattttgctagttatattttcgttatttgatttctaactttattgtgttgtagtcagggaatgtggtgtttgaaatttatgtaggggctgggcacagtggctcacatctgtgatcccagcacttggggaggctgaggcaggcagatcacttgaggccaggagttcgagaccagcctggccaacatggcgaaaccccatctctactaaaaatacacaaattagctgcatgtggtggcatttgtctgtaatcccagccacttgggaggctgaggcatgagaattgcttgaacccaggaggtggaggttgcagtgagctgagattgtgccacggcactccagcctgggtgacagagtgatactctgtctcaaaaaaaaaaaaaaaaaaaaaaagacatttatggagacttagccttatggcctagtattgagttggcacaatcattttatcttttctgtttctttttccccctttgcttgctttcctctggatttcttatcttctacaaggacctgagcacattttaattccagttgtcttttccaccttacatgcagttgtacagtgtgttagttttttatttgaaacggagtcttgctctgtcaccaggctggagtgcagtgacgcgatcttggctcactgcacctccgcctcccgggttcaggcgattctcctgcctcagcctgccaagtagctgggactacaggcacccgccaccatgcttggctaatttttggccaccatgcccagcctgaatgaactttcaaaattggtttttaaaagaggtatggaggccgggtgcagtggctcacacctgtaactccagcactttgggaggccaagacgggcagatcacttgaggtcagaagttcgagaccagcctggccaacatggtgaaaccccatctctactaaaaatacaaaaaggtagctgggcgtggtggtgcacctgtaatcccagctactcaggaggctgaagcaggagaatcacttgaacccgagaggtagaggttgcagtgagctgagattgtgccgctgcactccagcctgggcaacaggtggagtggagaattaggctgtacaaggctggtgtttaactattttatggtttggtaacagaaagaaaatatttactaactgggtatggcacatttttgtagtcctagctacttgagaggccaaagtgggaagatgacttgaacccaggagttcaaggccagcttgggcaacacagcaagagaccccatcccttaaaaaaaagagaaaaaatatttacatgtattttactatatatatagtatttacatcgggaggaagaaatgaaaggcatggggtacatggcatttcaagaaaataaattcttccatgagagggagttaactggtaggatggaaagtgagtttggagagagggtggctctaagagtcaacttatctgtctgtgtctagggatgtccttcctgagatccgtgctatctgcattgaggaaattgggtgttggatgcaaagctacagcacgtctttcctcaccgacagctatttaaaatatattggttggactctgcatgataaggtgggattcgagtcagtttccctttccgtttccttcatctttttcctgtcctaggacacttcaccttttcctgggcctgccactgagatattttacctagtgaccaatgattaacccatcaaggcgctga

SEQ ID NO: 38504 - DNA, 2300 bp, Homo sapien
caggtaccagccaccacgcccagctaatttttgtatttttagtagagagggggtttcaccatgttggtcaggctggtctccaattcctgacctcaagtgatccgcccacctcggcctccaaaagtgctggggttacaggcgtgagccactgcgcccagcctcctttcctttttctttcctcccactctgtcatcttttatcaatgacaacttttaaagatcccatgactggtcacagtgagaactctcttttgcagtcatcctttgcaatgataatatatgcctgtaaactaaggctttaatttttttttttttttgagatgaggtctcactctgttgcccagtctagagtgcagcagtttagtcatagctcactgcagcccgaacttctgggctcaagcgatcctccttccatgcctgagtagctgggactacaggcatgtgccatcatgcctagctagtttatcgttattattttttgtagagacagggtctcactatgttgcccaggctggtctcagactcttggcctcaagggattctccctcgtcagcctcccaaagtgctgggattacaagcatgagccaccaagccaggcctatttatggtttctgatcatttttatttctttaaaagaagtgtatagctgggcacagtggctcactcctgtaatcccagcactttgggaggccaaggcaggtggatcatttgaggtcaggagtttgagaccagcctgaccaacatggtgaaaccccatctctactaaaaatacaaaaagttagccgagcgtggtggtggacgcctgtaatccctcctgctactcgggaggctgaggcaggagaaccacttgaacctgggtggcagaggtggcagtgagatgagattgtgccactgcactcaagcctgggggacagagccaggctctgtctcaaaaaaaaaaaaaagaaaaagaaaaaagaagtgtacactacagcaaagcatgtctgatgccagtgggctatgttggggtgggggtaagggtgtcaatttgacctgggggttctgaaagtctcaggaaaggcagatgggggagggcccgaggcatccacagctttgagtgtcctggtgtctaagcaggagccatggagaaggtgggaggtgtgagttaggatcagctggagatcggtgctcttttgtccaagagaatgaagttgtcttcaggtatgatttggtttggaaacaagataaaagagattggccgggcacggtggctcaggcccgtaatctgagtactttgggagaccaaggtgggtggatcacgaggtcaagagatcaagaccattctggccaacatggtgaaaccccgtctctactaaaagtacaaaaattagctgagcatggtggcgcatgcctttagtcccagctacttgggaggctgaggcaggagaattgcttgaacctgggaggtggaggttgcagtgagccgagatcgtgccactgtactccagcctggtgacagagcaagactctgtctcaaaaaaaaaaaaaaagaaaaggaaaaaggtggccaggtgcagtggctcacacctgtaatcccagcacgttgggaggccgaggcgggcagatcgccagaggttgggagttcgcaaccagcctgaccaacatggtgaaaccctgtctctactaaaaatacaaaattagtcaggcatggtggcgcatacctgtcatcccagctacttgggaggctgaagcaggagaattgcttgaacccgggaggcagaggttgcggtgactggagattgcgccattgcactccagcctgggcaacaaaagtgaaacttcgtctccaaaaaaaaaaacaccaaaaaacaaaaattagctgggcgtggtggtgcatgcctgtaatctcagctactcagggaggctgaggcaggagaatcgcctgaacccgggaggtggaggttgcagtgagccgagatcgtgccactgcgctccagcctgggcaacagagcaagactccatttcaaaaacaaacaaacaaacaaaccaacaaacaaaccgaaattttagggacagatggattttttctctggaatattgacttcaacccagccacatgtggatatgcttagaacagcagggctcagtctgaagttgggaccatatctgttctcaaaacatgtggatccctgaggccagacaccaggtgcccgccattggtgtcagggccctactcctctccctgcagtgcaaggggccagtcctcaaggcaggggttcctcctctctggacacacagagaaagaggaggcggggaaacagc

SEQ ID NO: 38505 - DNA, 2300 bp, Homo sapien
cagtgatgcctcaagctaagccaatcaaagccttccctgggattgtctcaaggagtccgcagtgagattctgggtctcagtactgggaaagggtgaggctgaggctgcctgctgtcctgggggcctcaccctgccaccaacaggaagccacacagagggaagcagaaatgagacgcagccagtgagggcagggtacaaaggtgagatcccggagagacagatgctgggacatcatccttgggtactggttccaacagtgcctgcagatggagccaccctcggagagtccacaacagcagccaatccattctatgcgtgtctgagctactttaagtcgggtttttgactgtttgaatgagagtctcatcttggctaggcaccatggcgcaacaactggggaggtggaggtaggaagattgcttgaggccaagagtcccagagcagcctgggcaacctatcaagacgctgtctttacgaaaagaaaaaaaactagctaggtgtggtggtgcgtgcctgtggtcccagctactggggaggctgaggtgggaggattgcttgagcccaggaagtggaggctgcagtgacctatgatggcaccactgtactccagcctgggtgacagagcaagaccctgtctaaaaaaaaaaaaaaaaaaagaagtcccaccgaataccttcatgcagtgaaggtcaccccatctgaaaaataaagcctgggcacttgggcttggtattggtggcctttgcaaggtgtaagatgcgttcccctccttgggccccccttaagcttgtcctgtacatttcatttacaaaggactttcacaagcatgaatggaggtgaccccaccacaccccaggtttcggataaggaaaccgaggcttcagtaggaagtactgtaccccacgtcacgcaggcagtgggggatgagaatgaacttgagcccctcatctgactccaccccccactctcaccttcactcccctgctctccctcttcccccgaggactgactgttcctgacctctgcacttgggcatcttcaccgtgcagtgtgactcaaatgcttccttctctcctctgctgattcagaccagctcagtgtgtgccacctcccctaggcgctttctgtagaagccccttctcctgccctggtcctgcacctgcctcaggtgttgacacctgagctcccgatgcttagggctgggtggctgccacccatcttgttacccagtgtgcagaattgggtgctggaggcacgagcctgctctatacctatttttaaaatttttaaattattattattatttgagacggagttttgttcttgttgctcaggctggagtgcaatggcacgatctcggctcaccgcaacctctgcctcccaggttcaagcgattgtcctgcctcagcctcccgagtaacttggattacaggcatgtgccaccacgcctggctaattttgtatttttaatagagacggggtttctccatgttggtcaggctgctctccaactcctgacctcaggtgatctgcccgccttggcctcccaaagtgctgggattacaggcatgagccactgcgcctggccaattattattattttttgagacggagtctcaaatctgttgcccaggctggaatgcagtggcacgatcttggctcactgcaacctctgcctcctgggttcaagcgattctccctgcctcagcctcccgagtagctggggttacaggaatccaccaccacgcctggctaatttttgtattttttagtagagatggggtttcatcatgttggccaggttggtcttgaactcctgacctcaggtgattcgcccgccttgtcctcccaaagtgctggaattacaggcgtgagccaccacgccaggcccctctttagatctgctttttttttttttttaaacaggatcttgctctgttgcccagactggagtgaagtggcacgactatagcccactgcagccttgaactccgggctcaagtgatcctcccgcttcagcctctccagtagctgaaactacaggcacacgccaccacgcccagctaatttttatttttattttgtagagatggggtttcactatgttgccccggctggtctaaaattcctggcctcaagcgatcctcctgcctccgccttccgaagtgctgggattataggcttgagtcaccaccgtgcccagcatacatctgctttctgaatatttgagaggcggaaggcacaaggcgtgacaattgatgggatttgggatgtaaagagcaagagaggactcaagcaca

SEQ ID NO: 38506 - DNA, 2300 bp, Homo sapien
caaggtgggaggattgtttgagccgagaaatttgagaccagcctggcaacatgatctctacaaaaaatatagaaattagccaggcgttgtggtgccagcctgtagtcccagctacccaggaggctgaggaaggaggatcgcttgagtccaggagtttgaggctgcagtgggctatgatcacatcactgctctccggcctgggcaacagtgcaaggtcatgtctcaaaaaaaaaatcccagctggctttttttttttttttgagatggagtcttgctctgttgcccaagctggagtgcagtggcggacgatcagcctcagggcaggccatctagaagaattaccaaaaacaccaacccatttgtctctctataaagtgctgacatttgtgctctgcaacgtacagctgagagagcacaaaacttgtctgactcagcacagtctaggaagtcaagcagctcaatcttgaacaggacagtggtgtttggggggatcaagggaggggagcccagcgttccataggcgtagttcggtttgaacagaaacctggccagctctcctctctgcatgctcagaaggcccagctccatgccccacaatgtaatatctgtaagaagggacaaagaaggtgggtgaagcttgctcagtatcctgcttaatgctatcagtttcttccccctctaagtcagcagtactctggcctccatgtctccctcacacagttccctcttcctgcaatgtcttcctcctgagcctgtgcccagcttctagtgatagaaattttattcaaacttccgggctcagttcaaatgccccctcttccaggaagccttccctgaacttcccagctagaattaatcatgccttcattaagcacacccacaacactgctttcacctcccaggcactcatccgattctaccaagtgagctgagtgcaggtcagtctcctctactacattgtgaggtccttaagggtggagatgttctaatcttctgagtacaacctctcttttcaccatgtattgtgggaagtaagcattcgtcgatttttacttaataaatgaacaaagaaacattcccagtggtgagttaagtcagagtgcaaagattataccttgcccattaagccatctcccaaatgcctaggtctcaaggggagagaacatggctgttttaccaaaacccagcctcagcaaagtcaattcaaagaacctgcgctctgagcagtcttcccagcctgaggcatggtgcctcatctcgctcctaaacaatcccttcttctccagctcctactctgaatttaccctctccaagtttcattagccgaggagttttcctaaagtaattagaatcgaagggtctgtccaagtgttccaggtatccatagtatttcactagaatagaggaaagaatgtaaggaaaatggacccaaaacacccacgccaccataatatcgagtctctcatgatcacacagaaacaatgcgatcagatgagcttaagctgcccgacaccacgaggtacaggaataaatctctctgcattttaggagcctacccttcggctcagaggttcaagagcttcatggaagcatcacgcaaaggggacataggggtccttagctttcctcttaaaaaaactaattcatggcagaagcagcggctcacgcttgtaatcccagctactggggaggctgaggtgggaggatcacttgggaccaggagtctgagaccagcctgggcaacatagaaagtgccccatctctacaaaaatattaaaaattagccgggcatggtggattgcgcctgtaaatctcttatttgggaggctgaggctggagaatcacttgagcccaggaagcagaggctgcagtgagctatgttcgcaccactgcactccagcctggggaactgagcgagaccccgtttcaaaaacaaaaatccacttcaaacaaagcatttccaaccccattaaatgctttttgaaaatgaggcctctctcttcccaacagagtgcgatgacatggatcctgcggacaaaccgccccagggcgtacctagcaccgaagcatcaggcgccactaggtctccagctccttctcggatgacgtccttcagcacgccccggtcccccgagatgtccagcatcctctgacttaaccgctcgtacagggactgatggagaatgaaagccaggcctcagagccgcagacccacccggccacccctcagcgtctacgcccccgaaacgtctgggccctcacctggccgggggcgtcgtccccttccaggactccctggt

SEQ ID NO: 38507 - DNA, 2300 bp, Homo sapien
tgctcagaaggcccagctccatgccccacaatgtaatatctgtaagaagggacaaagaaggtgggtgaagcttgctcagtatcctgcttaatgctatcagtttcttccccctctaagtcagcagtactctggcctccatgtctccctcacacagttccctcttcctgcaatgtcttcctcctgagcctgtgcccagcttctagtgatagaaattttattcaaacttccgggctcagttcaaatgccccctcttccaggaagccttccctgaacttcccagctagaattaatcatgccttcattaagcacacccacaacactgctttcacctcccaggcactcatccgattctaccaagtgagctgagtgcaggtcagtctcctctactacattgtgaggtccttaagggtggagatgttctaatcttctgagtacaacctctcttttcaccatgtattgtgggaagtaagcattcgtcgatttttacttaataaatgaacaaagaaacattcccagtggtgagttaagtcagagtgcaaagattataccttgcccattaagccatctcccaaatgcctaggtctcaaggggagagaacatggctgttttaccaaaacccagcctcagcaaagtcaattcaaagaacctgcgctctgagcagtcttcccagcctgaggcatggtgcctcatctcgctcctaaacaatcccttcttctccagctcctactctgaatttaccctctccaagtttcattagccgaggagttttcctaaagtaattagaatcgaagggtctgtccaagtgttccaggtatccatagtatttcactagaatagaggaaagaatgtaaggaaaatggacccaaaacacccacgccaccataatatcgagtctctcatgatcacacagaaacaatgcgatcagatgagcttaagctgcccgacaccacgaggtacaggaataaatctctctgcattttaggagcctacccttcggctcagaggttcaagagcttcatggaagcatcacgcaaaggggacataggggtccttagctttcctcttaaaaaaactaattcatggcagaagcagcggctcacgcttgtaatcccagctactggggaggctgaggtgggaggatcacttgggaccaggagtctgagaccagcctgggcaacatagaaagtgccccatctctacaaaaatattaaaaattagccgggcatggtggattgcgcctgtaaatctcttatttgggaggctgaggctggagaatcacttgagcccaggaagcagaggctgcagtgagctatgttcgcaccactgcactccagcctggggaactgagcgagaccccgtttcaaaaacaaaaatccacttcaaacaaagcatttccaaccccattaaatgctttttgaaaatgaggcctctctcttcccaacagagtgcgatgacatggatcctgcggacaaaccgccccagggcgtacctagcaccgaagcatcaggcgccactaggtctccagctccttctcggatgacgtccttcagcacgccccggtcccccgagatgtccagcatcctctgacttaaccgctcgtacagggactgatggagaatgaaagccaggcctcagagccgcagacccacccggccacccctcagcgtctacgcccccgaaacgtctgggccctcacctggccgggggcgtcgtccccttccaggactccctggtttaacgcgcttccccccatgtcctagctgccctccctgtggcgtgagccttcggcctggtgcgccccgctgcccttcctggctgtgactctggtggggttccgaaggcccctttatgcccggcagacccctaccgacggcggcattacattctggggccacgaggaggcactcatcgtttcgttccaaccgccgccaacggccctggccctcgcgagctctggaactacagaggtcgcacggtgagttgccaggtgtggcccgtaatcggagcgcacaaaacatgatgggacacgtaacgggaccacacagggcacattgggcacttgcaggggcgcgaggtggcggcacgtaatgggagcgcgctgagcatgatggggcatgtgcgggagcgccaggcggggcatgtaaccagagcgtgcggggcatgatggggcacggacatggggggttaggtggggcacgtaattggagctcgcggggcaggatggggcatctaactggagcgacagagagcacgatggggcacttacaggggccggaggctgggtacgtaatgagagcgag

SEQ ID NO: 38508 - DNA, 2300 bp, Homo sapien
cttccttctctctctctttttttctaatacaaactggcagatgatggttcgatctctcgaatttttttttttattttattgttttatttactttagtagagacaggggtctcactttgttgcctgggctggttttgaactcctggcctcaagcaatcctcctacctcagcctcccaaagtgctgggattacaggtgtgagccgccgaacctggcctctttttttttttttttttaaaagatttgaaggtatctttatttacttatttagattttttaaatcgaggtataacatatacaagtgtgcaaatcttaaccacacagcttgataaacacttgatgtatatacgtgcactctcaagagcaagatgtacagtgtttccagaaagctccctcctgcctccttccagtcataactcctaacaaggacagccactgtccttattaccatgttgtcatgtggcctgtttttgaatgtcacataaacagcatcatatagaatgtacccttttgtgtctggtttctttcactcaataatattaaattgtgagtttttttttaatgtgaagtctttcaacgtttagaaattcaatgacactctgttatacaggttttgtttgtttgtttgtttattgagacagagttttgctcttgttgcccaggctggagtgcagtggtgcaatcaggctcactgccacctccacctcccggattcaagtgattctcctgcctcagcctcccaagtagctgaggttacaggcgcctgccaccacaccggctaattttttgtatttttagtagagaggcggtttcatcatgtgggccaggctggtctcaaactcctgacctcgagtgatctacccactctggtctcccaaagtgctgggattacaggtgtgagccaccgcgcccagcctgttacacagttaatgaatattatggtcataatatactgctgtggtttgaatgtatcctcctaatttcatgtgttggaaacgtaacccccaatggggcagtattgaaagttggctgtagcctacgcctataatcccagcactttgggaggtcaagactggaggatcgcttgaagccaggagttcaagaccagcctaggcaacaaagctacaaaccatcttaccagcaaattaaaaactaaaaaataaattagctgggcctggtggtgcacgtctgtaatcccagctacttgggaggccgaggcaggaggatctcttgagcccaggaggtggcggctgcagtgagctgagatccatcactgaactccagcctgggctcagagcgagcctctgtcaatcaatcaatcaatcaatcaatcagtgtcttgtctgggcctaaattctctagaatacaatggaagagggaaagtgaaagaaggtggaagtaacccacagctgggagccctgaaccctgctggtggcaggtggctctcgtgtcctcaccaggttgccctgcaatcacatgctgcatcctttttcctgaacctgccccacgtgccccaccacgcagccactccgagggctccttcaagggcggcagccctgtcactcacgtgttccaaaagtgcttcccctgtgccctgacggcctcgccatgtgtcccatcatgccccacgcgctcccactgtgcgccccacctcgcacccgtgccccatcatgctctgcgtgctcgttaggtgccccatcatttcccgctcgctctcattacgtacccagcctccggcccctgtaagtgccccatcgtgctctctgtcgctccagttagatgccccatcctgccccgcgagctccaattacgtgccccacctaaccccccatgtccgtgccccatcatgccccgcacgctctggttacatgccccgcctggcgctcccgcacatgccccatcatgctcagcgcgctcccattacgtgccgccacctcgcgcccctgcaagtgcccaatgtgccctgtgtggtcccgttacgtgtcccatcatgttttgtgcgctccgattacgggccacacctggcaactcaccgtgcgacctctgtagttccagagctcgcgagggccagggccgttggcggcggttggaacgaaacgatgagtgcctcctcgtggccccagaatgtaatgccgccgtcggtaggggtctgccgggcataaaggggccttcggaaccccaccagagtcacagccaggaagggcagcggggcgcaccaggccgaaggctcacgccacagggagggcagctaggacatggggggaagcgcgttaaaccagggagtcctggaaggggacgacgc

SEQ ID NO: 38509 - DNA, 2300 bp, Homo sapien
acgcacaggatgggagctccctggtgtcacgtgctcaccccttcctgttttttgtttgcagttctggtttgtttctttttctttttttctttctctctctcccgcccccttcccttcctctctctctctctccccctccctcgcccgccccccctttctttttcttctttctttttggagacagcgtctcactctgttgcccaggctggagtgcagtggtgtgatcatggctcactgcagcctccaactcctaggctcaagcaatccacccacctcagcctcccgagcagctgggactacaggtgcacaccaccatgcccagctcattttttatattttgtagaaatggggtctggttatgttgcccaggctggtgttgaattccttggcctccaacgatcttcctgcctgggcctcccaaagtgctggaattataggcatgcaccactgccctacgccccttgtttgtgtctggacactcccctgtttgcactctctggtgcatgagagtggggacttcattttgtcccctggtgtatttcagtgcctggagccatgcctggcacattgtaaatgtccaaaatgctgaatcagtgaattcctgcctttataggccatcaccaaacctagcagatcattctttaagatgagtaataataatacctgactgggtgttatatatataaaacacctgttataaaacacgtgactgggtggcttatgcctataataacagcactttgggaggctgaggtgggtggatcacttgagtccaggagtttgagaccagcctgggcaacatagtgagaccctgcctctacaaaagtttcaaaattagcctggttggccaggcgcagtggccactcctgtaatcccagcataaagctggagggagcatgggtgggggcgagatagggccagcgaggtaagctgcggctggggcatggagaggccagtgtgacccgggaatggatttggagtttattcacaggatgagggagaaaggcgggggctggagtgttttaagccagtgatgacatgctcagatctctctggcagaggggagctttgagggtgaggcaaaaggacagtgagagatgaaggtgccaggacctaagttggtgggaactgggacaaaggcctggggcagaccaaagacaaatttcaaacagaaaaaaaccctgacaactgtgtgtggcaaggagggtgagggatggggaggttgactccagctctgtaattcccccttgcacagaggaagtgatcgcaggggaggatccggcgtgggcaggtggagcgggaggtgcctggggatgtgcagtcgggttgaggggtgtgcagaccaggacagcggtggggctcagggcaagaggtgtggagggtccttcctcttggtggtcactgaagtcccctttggtggagaagaccaacccaggagagtctacatagtgataagggaagacactgatgatgaccccaaggggtaccaggcttaaaatctggattgagagagagagagccctgaaaaaggaatagaaagaatcctcagagcaggaacaccggctgagtgtggcctcccggaaatcagagagacagactgaaggaggagatcacgtgtgtgaaatgtctctgaggactgaaaagtgttaaatgtagcagtaagaactgattatcttggcaagagcaggtttaggggagtatggaaggtggaagccaactgcaggtgaggaagccgagtttatgttttattagttgatgggaaggagggagggaacaggctgggagattgtctgtcctttgtagttaggatccagcagctcagcttgggtccctgttttagatttgggcttaatttttttttttttggtagagacagggtctcactattttgtccaggctggactcaaactcctggcctcaagtgatcctcccgtctcggcctcccaaagtgctgggattccaggcatgagccactgttcccggccagatttgggttttgatgatcccgaggctcttctctgttgcaacacagaatacaactaaattgcactcctttattgccctctttaaggtgttcccgttgcctcctgtttattgagatcttgagatgctcgattgatgggtgcattgatttgcataacttagttcttctcacggggaaggaatgagtcccgtctgtctgcctggggagggtgacattggaatgctgttcttaggcctctgtgagatgttctgatgcctcattctccagagcaaggactctgtccgtttatgccagcaagtgcttgattctttaccca

SEQ ID NO: 38510 - DNA, 2300 bp, Homo sapien
aagagaggccttcctctgcctctctcttatagggatacttgtgatgccatgcaggacctgcccagataatccaggataaccttctctccaaatccttcccctgatcactcctacagatctcttccatagaaggtgacatttccaggctctaggaattaggacctgctctctctgggtggccgttgttcactccaccaccccaggtttccccatcctaccaaaagacacagcagcattgtgtcaactgcccaaactgaaaacctatgagttattctcgacctgacctttttcctgagcaagttctgtggatttaacttagcggtcacactgccaacttcaaccgaactccactgccaccaactcagtccaggccaccagttcttgtttaggtgactgccatgacccccattggtctctccctgcctcaactctgtcccctccatcctatatccccacactgtaaccagactgattatttatttatttatttattttttggggaaagaagcttgctctatcccccaggctggagtgcggtggcacaatctcagcttactgcaacctccgcctcccaggttcaaacgattctgcctcagcctcccaagtagctgagattacaggtgtctgccacaatgcctggctaatctttgtatttttagtagagacgggttttgtcatgttggccaggctggtctcaaactcctgacctcaagtgatccacctgccttggcctcccaaagtgctaggattacaggtgtgagccaccgcacctggccagactgatctttaaagaagtatacatgaacacagcactccatgacttaaaacccttaagaggactaccatttatctcaagataaaagaacaaaatcctcactgggcacagtggttcatgcctgtaatcactgctttgggaagccgaggtgggaagatcactttaggccaggagttcgagaccatccatgggcaacatggtgagaccgcatttctacaaaagataaaattagctgggtgtggtggtgcacgtctgtagtcccagctacttggagggtgaagtgggaggatcacttgagccctggagttcgaggctgcagtgagctatgacggtgccactgcactccagcctgggtgacggagtgggacctcatcaaaaacaaaaccgttattgtggctttgaggcctggatcataactacatcatttaatttggccaaaccggcccatttcaggtacccaaataccccacgtgctttcttgcttggctctgggactaatgtggttactggtgcagggtgagtggcaggtatcatgaaccacattgtggacctggagttgctaggaccttttctgccattacacagaaaaatcctccctgagaacacagccattggaggacacatggcagaggaagataagacaataaacagagacacataattatggccagcgtgggggctcacgcctgtaatcccaaaactttgggaggccgaggtgggcagatcacctaaggtcaggagttcgaggccagcctggccaacatggtgaaaccccgtctctactaaaaatacaaaaattagccgggcgtggtggcacgggcctgtagtcctagctactccagagggtgaggcaggagaattgcttgaacctgggaggcggaggttgcagtgagccaagatcgcgacactgcgcgacagagtgagtctttttgtctgaaaaaaaaaaaaaaaatatatatatatatatacacacacatacacacatatatatacacacacacatatatatatgaaatgaccaatacacatgtgaacatattcaacgcaataactgcggttaaacagcagtaaaatcccattatttatccatcagattgacaaagactgaagaactggagaagaagtggcgaaacgggctcgcagcgtcgcattccctaccccagcaggtgcgcccgcagcgtcgcactccctagcccggcaggtgcgcgatcacacacacaccctgcagggggacttcgaccggcacttccggtcccggaagggcatgcccttggaccccggaagtccgggcgggggcagagccgggtgcgctttgcgacagagccgtaaaggcgcgcgggaacatggggctgtacgctgcggtggcaggcgtgctggccggcgtggagagccgccagggctctatcaaggggctggtgtactccagcaacttccaggtagcgggcccgggcgccacaagtaggggtggggggtgaggaacccggggtggggtgggacgggcccggatggggtcgggaggtggggc

SEQ ID NO: 38511 - DNA, 2300 bp, Homo sapien
ccgctgccgtgcacggcgggactggagcaagtcgctcacctgaaatgagtatgagcagaccttccctgggttacgaattgagatgggatgaaaatgctttaacttcgagtgttttgaaggattaaataaccgaagtacaaagtagtagtagcggagacagtaaggaagtcgggcgtggcggcgcgcacctgtggtcccagctactcggaaggctgaggggggaggatcacttgagcccaggagttcgaagctgcagtgagctgttatgtggccactgcacttcagcctgggcgacagatctagaccccattctaaaaaaaaacaaaaaccccaaacccacacccacgaaagggtaatgttggcaagaagttgggtgcagaggtctactggtgaacatctgtggggaaagggtctaaggctgggaagcgagacgccaggttccgatcctgttgtgtagttaatttctggtgtggtcttgagtaaggtaccccacctttatctgtaaccatctagtcaggtgatctctttagccattccagtgcccgggctctattagagttagttctaaggcattcatacttcttgcttagggcgtttctgtctttgatccctcatccccaggtgctagtgtatgagttgttgggaaagggctttcgagggggtgggggccaatggaaggctctgttgggacggcaccaggcgaggtgttgagttggctcggctcaaggttcttcggggtgtgagctggcatgaggacctgttggaagtgggatccaggcctggtccaggtgagctggaaggagttgaggggcgggggaggtggggaactttgctcctgcctactcactgctcattgcgtcctacctagcctcccagctgcctcgatttgtgcgtgtgaacactctcaagacctgctccgtttatgtagttatttcaagagacaaggtttctcctatcagggtcgggcttccaggtgagagcttagagccctggctgtcctcatctagggaggtgtctggggtactgggaagagaagtggttggatagttgtgactttgctctctgggctttgttcctacctttccagcagtttctccatctccaaggtttgttttcctcgcatcccttaaacatcgaactcctaggagccccatcctacattcttccggagctctccgttttttctctaactttagctcctgcctcccacctggtgattctcaccgcccagtgtagacttcccttttgcattcttccctccttaggttcacatgaatgcaccacagatgccacagtcgctgcattcatctttcctctcagactttacacttagtacatccccagtttaatctaacagatgtcaccgttttccacccatttggtcaagccagaaaccgagtcatcctaggtgcttccttcccctccctccaatcatttactcctccaccttgagcatctttctcagctccacttttttttttttttttttaggactgagtctcgctctgtcactctcaccgaggctggagtgcagtggcatgatcttggttcactacctccaaggttcatgcaatgctccttcctcagcctcctgcgtagctgggattagaggctcccaccaccatgtccagctaattattgtatttttagtagagatgaggtttcaccatgttgaccaggctggtctcaaactcctgacgtcaggtgatctgcccatcttggcctcccacagtgctgggattacaggcgtgagccacagtgcccggcctccactcctttctcttaattcccccggacactgcctaggttaagcactcatttcttattgggatgaccacaagaacttcccagactggtctctctgcttccagactgtctcactgcattttccttgaggttgactgtaggaagctctaaaggcagatctgatgcattactcctctgctaagccttttttttttttttttttttgagagagttttgctcttgtttcccaggctggatggagtgccctggcgcgatctcggctcaccgcaacctctgcctcctgggttcaagcgattctcctgcttcagccttctgagcagctgggattatgaaggggtggcctgcccctccacatctgtgggatatctcatcaggtgggacaagagactgagaaaagaaataagacacagagacaaagtatagagaaacaacagtgggcccaggagactggcacttagcataccaaggacctgcaccagcactggtctccgagttccctcagtttttattgattattattttcattatctcag

SEQ ID NO: 38512 - DNA, 2300 bp, Homo sapien
cccgggctctattagagttagttctaaggcattcatacttcttgcttagggcgtttctgtctttgatccctcatccccaggtgctagtgtatgagttgttgggaaagggctttcgagggggtgggggccaatggaaggctctgttgggacggcaccaggcgaggtgttgagttggctcggctcaaggttcttcggggtgtgagctggcatgaggacctgttggaagtgggatccaggcctggtccaggtgagctggaaggagttgaggggcgggggaggtggggaactttgctcctgcctactcactgctcattgcgtcctacctagcctcccagctgcctcgatttgtgcgtgtgaacactctcaagacctgctccgtttatgtagttatttcaagagacaaggtttctcctatcagggtcgggcttccaggtgagagcttagagccctggctgtcctcatctagggaggtgtctggggtactgggaagagaagtggttggatagttgtgactttgctctctgggctttgttcctacctttccagcagtttctccatctccaaggtttgttttcctcgcatcccttaaacatcgaactcctaggagccccatcctacattcttccggagctctccgttttttctctaactttagctcctgcctcccacctggtgattctcaccgcccagtgtagacttcccttttgcattcttccctccttaggttcacatgaatgcaccacagatgccacagtcgctgcattcatctttcctctcagactttacacttagtacatccccagtttaatctaacagatgtcaccgttttccacccatttggtcaagccagaaaccgagtcatcctaggtgcttccttcccctccctccaatcatttactcctccaccttgagcatctttctcagctccacttttttttttttttttttaggactgagtctcgctctgtcactctcaccgaggctggagtgcagtggcatgatcttggttcactacctccaaggttcatgcaatgctccttcctcagcctcctgcgtagctgggattagaggctcccaccaccatgtccagctaattattgtatttttagtagagatgaggtttcaccatgttgaccaggctggtctcaaactcctgacgtcaggtgatctgcccatcttggcctcccacagtgctgggattacaggcgtgagccacagtgcccggcctccactcctttctcttaattcccccggacactgcctaggttaagcactcatttcttattgggatgaccacaagaacttcccagactggtctctctgcttccagactgtctcactgcattttccttgaggttgactgtaggaagctctaaaggcagatctgatgcattactcctctgctaagccttttttttttttttttttttgagagagttttgctcttgtttcccaggctggatggagtgccctggcgcgatctcggctcaccgcaacctctgcctcctgggttcaagcgattctcctgcttcagccttctgagcagctgggattatgaaggggtggcctgcccctccacatctgtgggatatctcatcaggtgggacaagagactgagaaaagaaataagacacagagacaaagtatagagaaacaacagtgggcccaggagactggcacttagcataccaaggacctgcaccagcactggtctccgagttccctcagtttttattgattattattttcattatctcagcacaaggaatgcggtaggagagcagggtgataataaggagaaggtcagcaaaaaaacctgtgagcaaaggaatctgtgtcataattaagttcaaagggaggtactatgcctggatgtgcacgtaggccagatttatgtttccctccgcccaaacatctgtggagtaaagcataacaaggcagcattgctgccaacatgtctcgcctcccgccatagggtggtttttctcctatctcagaattgaacaaatgtacaatcgggttttataccgagacattcagttcccaggggcaggcaggagacagtgcccttcctctatctcaactgcaaggctttcctcttttactaatccacctcagcacagaccctttacgggtgtcgggctggggcacagcctctcatcccatgaggctatatttcagactatcacatggggagaaccttggacaatacctggctttccagggcagaggtccctgcagcttttcacagtacattgtgcctctggtttattgagactagagaacggcgaagactttta

SEQ ID NO: 38513 - DNA, 2300 bp, Homo sapien
ctcctgcgtagctgggattagaggctcccaccaccatgtccagctaattattgtatttttagtagagatgaggtttcaccatgttgaccaggctggtctcaaactcctgacgtcaggtgatctgcccatcttggcctcccacagtgctgggattacaggcgtgagccacagtgcccggcctccactcctttctcttaattcccccggacactgcctaggttaagcactcatttcttattgggatgaccacaagaacttcccagactggtctctctgcttccagactgtctcactgcattttccttgaggttgactgtaggaagctctaaaggcagatctgatgcattactcctctgctaagccttttttttttttttttttttgagagagttttgctcttgtttcccaggctggatggagtgccctggcgcgatctcggctcaccgcaacctctgcctcctgggttcaagcgattctcctgcttcagccttctgagcagctgggattatgaaggggtggcctgcccctccacatctgtgggatatctcatcaggtgggacaagagactgagaaaagaaataagacacagagacaaagtatagagaaacaacagtgggcccaggagactggcacttagcataccaaggacctgcaccagcactggtctccgagttccctcagtttttattgattattattttcattatctcagcacaaggaatgcggtaggagagcagggtgataataaggagaaggtcagcaaaaaaacctgtgagcaaaggaatctgtgtcataattaagttcaaagggaggtactatgcctggatgtgcacgtaggccagatttatgtttccctccgcccaaacatctgtggagtaaagcataacaaggcagcattgctgccaacatgtctcgcctcccgccatagggtggtttttctcctatctcagaattgaacaaatgtacaatcgggttttataccgagacattcagttcccaggggcaggcaggagacagtgcccttcctctatctcaactgcaaggctttcctcttttactaatccacctcagcacagaccctttacgggtgtcgggctggggcacagcctctcatcccatgaggctatatttcagactatcacatggggagaaccttggacaatacctggctttccagggcagaggtccctgcagcttttcacagtacattgtgcctctggtttattgagactagagaacggcgaagacttttaccaagcatactgcttgtaaacgttttattaacaaggcatgtcctgcacagccctagatcctttaaaccttgattccatacaacacatgtttttgtgagctcaaatttggggcaaagtcacaaattaacagcatctcagccaaccaattgttcaaggtacaggtcaaaatggaatttcttatgtcttccctttctacacagacacagtaacagtctgatctctctttcttttccctacaggattgcaggcatgcagcaccatgcctggctaattttgtatttttagtagagacgggatttctccatgttggccaggctggtctcaaactcctgacctcaggtgatctgcccaccttggcctcccaaaatgctgggattacaggcatgaaccaccgcgcccggccatgctaagtcctttcttggctccattgtgctgtccctcctgcttcctctccaggtccatctgccacagtgctacgtgcaccagcgtgccagcaacagtggctggtctctgccccgtgcctcctccactgggctcacacctgtcttattttgtcctttggtggctctgagaagcagcctctgcccctctccctttcccttactctttgtaagatcctcttccttctgccctaccatgttgcttggacaccagggtggaatagcagagaacggctgcttgtgtttgaattccagctctgccacttcgatagatttctgaactgagacatgtgactctctaggcctatttctgcatgggtcggagagtgggcgggactgctttactgagttatagtgaatgtagttttaacctaagcgcctcacatgactaactcctcatccatcaagaatgagctcagctctcacttccccactcctcacccccctgtaaagtaacctttctccaaggttatgcttcaacaggaatagctaacatttattaaattgtggcacgtaagtatcttggatatattggctcattgaatcctcacacctactattttacagagatgccagtggggcttgagattgaatcacttgcccaggc

SEQ ID NO: 38514 - DNA, 2300 bp, Homo sapien
atcccatgaggctatatttcagactatcacatggggagaaccttggacaatacctggctttccagggcagaggtccctgcagcttttcacagtacattgtgcctctggtttattgagactagagaacggcgaagacttttaccaagcatactgcttgtaaacgttttattaacaaggcatgtcctgcacagccctagatcctttaaaccttgattccatacaacacatgtttttgtgagctcaaatttggggcaaagtcacaaattaacagcatctcagccaaccaattgttcaaggtacaggtcaaaatggaatttcttatgtcttccctttctacacagacacagtaacagtctgatctctctttcttttccctacaggattgcaggcatgcagcaccatgcctggctaattttgtatttttagtagagacgggatttctccatgttggccaggctggtctcaaactcctgacctcaggtgatctgcccaccttggcctcccaaaatgctgggattacaggcatgaaccaccgcgcccggccatgctaagtcctttcttggctccattgtgctgtccctcctgcttcctctccaggtccatctgccacagtgctacgtgcaccagcgtgccagcaacagtggctggtctctgccccgtgcctcctccactgggctcacacctgtcttattttgtcctttggtggctctgagaagcagcctctgcccctctccctttcccttactctttgtaagatcctcttccttctgccctaccatgttgcttggacaccagggtggaatagcagagaacggctgcttgtgtttgaattccagctctgccacttcgatagatttctgaactgagacatgtgactctctaggcctatttctgcatgggtcggagagtgggcgggactgctttactgagttatagtgaatgtagttttaacctaagcgcctcacatgactaactcctcatccatcaagaatgagctcagctctcacttccccactcctcacccccctgtaaagtaacctttctccaaggttatgcttcaacaggaatagctaacatttattaaattgtggcacgtaagtatcttggatatattggctcattgaatcctcacacctactattttacagagatgccagtggggcttgagattgaatcacttgcccaggctcccactgctggtaaacagtagagggggctcctgacccatcagtctggcttgacaacccattccctcaactgcggatcccggattcccttatcaccctgttgatttctccatagctgtggtaacatttgttgcatgaatggaccgttgaaatagggcctggcagggagaaattcaggaaatgaatgaatggttcttccctggcagccttgatgacttacaagccctcaaggggaagcattttctcctggactccttgatgccggagctgctggtgtttcccgcccagacagatctgcatgaacacccactgtaccgggccggacacctcattctgcaggacagggtaggcaagaggaatagaaaagggaagaatgtgtaggcacgggaagggcctagcctggggtctctgtttacccggcccctgtgctctgcctgccaggccagctgtctcccagccatgctgctggacccccgccaggctcccatgtcatcgatgcctgtgccgccccaggcaataagaccagtcacttggctgctcttctgaagaaccaagggtgagtgccacaggaggaggaggaggaggacatggggtttgattttgtgcctttcagtgggtaataaaggctgaaaggatgactttcgcttaactctttcctgctgtaccaaagtagttcacggtatttgccccaagctaagctttccccactgcaggtgtgagatgtggatcccttagcccttggggcagagaccccaggccagttacctctgaccctgggccctttaaatataggccgtttcaatattgtgtgtcctggcttaacctgcatgttctggttgtctgtgtcagctgtgacaggcccttagctgctccgtgcatgctcagctcacccctgctctgccctctgccctaggaagatctttgcctttgacctggatgccaagcggctggcatccatggccacgctgctggcctgggttggcgtctcctgctgtgagctggctgaggaggacttcctggcggtctcccccttagatccgcgctatcgtgaggtccactatgtcctgctggatccttcctgcagtggctcgggtgagatggtgagaaggcgtg

SEQ ID NO: 38515 - DNA, 2300 bp, Homo sapien
taacatttgttgcatgaatggaccgttgaaatagggcctggcagggagaaattcaggaaatgaatgaatggttcttccctggcagccttgatgacttacaagccctcaaggggaagcattttctcctggactccttgatgccggagctgctggtgtttcccgcccagacagatctgcatgaacacccactgtaccgggccggacacctcattctgcaggacagggtaggcaagaggaatagaaaagggaagaatgtgtaggcacgggaagggcctagcctggggtctctgtttacccggcccctgtgctctgcctgccaggccagctgtctcccagccatgctgctggacccccgccaggctcccatgtcatcgatgcctgtgccgccccaggcaataagaccagtcacttggctgctcttctgaagaaccaagggtgagtgccacaggaggaggaggaggaggacatggggtttgattttgtgcctttcagtgggtaataaaggctgaaaggatgactttcgcttaactctttcctgctgtaccaaagtagttcacggtatttgccccaagctaagctttccccactgcaggtgtgagatgtggatcccttagcccttggggcagagaccccaggccagttacctctgaccctgggccctttaaatataggccgtttcaatattgtgtgtcctggcttaacctgcatgttctggttgtctgtgtcagctgtgacaggcccttagctgctccgtgcatgctcagctcacccctgctctgccctctgccctaggaagatctttgcctttgacctggatgccaagcggctggcatccatggccacgctgctggcctgggttggcgtctcctgctgtgagctggctgaggaggacttcctggcggtctcccccttagatccgcgctatcgtgaggtccactatgtcctgctggatccttcctgcagtggctcgggtgagatggtgagaaggcgtggctgagggactcggaggtccacagcagcttagacctggagtcatctgttttggtcttagttctgacactttaatgggcttgggaccctggagcaaaagttctcctctgtgaggcaaggatttcaggagcgaggatttcaggactgaggcagcctgtgaagctgtgtaaccgagacacgcttttccttaggtatgccgagcagacagctggaggatcccggggcagggacacctagcccggtgcgtctgcatgccctggcagggttccagcagcgagccctgtgccacgcgctcactttcccttccctgcagcggctcgtctactccatgtgctccctctgccaggaggagaatgaagacatggtaccagatgcgctgcagcagaacccgggcgccttcaggtacagggcgggcgccagggtcgtggaggggggggatggggtgaactgctctcttacccagcattggggctgtttctcttgcaggctagctcccgccctgcctgcccggccccaccgaggcctgagcacgttcccgggtgccgagcactgcctccgggcttcccccaagaccacgcttagcggtggcttcttcgttgctgtaattgaacgggtcgagatgccgacgtgagtgagtgggggcatgcttgggaggcgcaggatggtactggcacatctaacatctacacttctctagctcagcctcacaggccaaagcatcagcaccagaacgcacacccagcccagccccaaagagaaagaagagacagcaaagagccgcagccggtgcttgcacaccgccttgcacatagcagaggctccaggctgactccttcctggtgggaaaggaagatgcctgtcctctccgtggaggaccctgggccctcaccgcaggcagcagtttgcattttgaaaggttattgggtcccttcctcgggctgtgttcttgctggtgagcaaaagtgttgcctgcagaaataaaatgcagaacgtactctacgatagatcacagttttttattcttaatgtcacaagcaggagaaaaatctcacattcatactaaaaattccaactagactcaacaggaatgaagtctctatttgtaatggaaagtcccagcctcccgctgccgtccagtgtgtgtactgtacacatccacactcactctcactcagggttcccggaccggctgtcctgcctgcggaactgaggtaaacaagctcaggtactgacactaggagggtctaccttacataaggtacaggtagaagcttgattgattgctaggcccaggcccacccagaccctcc

SEQ ID NO: 38516 - DNA, 2300 bp, Homo sapien
ggtggaaataatgaacacttccttgatttactgtacaggcctgtagtgtagacttagctgagtttattgactgactcttggatcccaggctctgtggtaggcatggggaggacgctgaaatactgaataccatcatctttgaagtgtttattccaatttcacattttctattcttcttccagaatctgctggagcagcaaccactgaggccctctcacctccaaagacacccagcctcctacccccgctgggtttatcacagtcagggccgccagggctgctccccagcccctcctttgactccaaacccccgaccactttgctggggctgatccctgctccatccatggtaccagccactgacaccaaggcacctccaacccttcaagcagagacggctaccaaaccccaagccacatctgccccgtcccccgcccccaagcaaagcttcctgtttggaacacagaacacctcaccttccagccctgccgcccctgctgcatcttcagcatctcccatgttcaagcccattttcacggctccacccaagagtgagaaggaaggccccacaccgcctggcccttcagtcacagccacagcgccctccagctcctccctccccacgaccaccagcaccacagccccgaccttccagcctgtctttagcagcatggggccacctgcatctgtgcccttgcctgctcccttcttcaagcagacaactactcccgccactgctcccaccacaactgccccgctcttcactggcctggccagcgccacctctgctgtggctcccatcacctctgccagtccatccacagactctgcttcgaagcctgcgtttggctttggcataaacagtgtgagcagcagcagtgtgagtaccacgaccagcaccgccactgccgcctcacagcctttcctcttcggggcgccccaggcctctgctgccagcttcaccccggccatgggctccatattccagtttggcaaacctcctgccttgcccacaaccaccacagtcaccaccttcagccagtccctgcccactgccgtgccaacggccaccagcagcagcgctgccgactttagtggttttggcagcaccctcgccacctccgccccggccaccagcagccagcccactctgacgttcagtaacacgagcacccccacgttcaacattccctttggctcaagcgccaagtccccgctcccatcatatccgggagccaacccccagcccgcatttggggccgctgaggggcagccaccgggggccgccaagccagcccttacccccagctttggcagctctttcacttttggaaactctgcagccccggccccggctactgcacccacacctgcacctgcgtccacgatcaagatcgtgcctgcgcacgtgcctacgcccatccagcctacctttggcggtgccacgcactcggcgtttggattgaaagccacggcttccgccttcggcgctcccgccagctcacagcccgcctttggcggctccactgctgtcttctccttcggtgcagccaccagctccggctttggagccaccacccagaccgccagcagcgggagcagcagctcggtgtttggcagcacaacaccatcacccttcacgtttgggggttcggcagcccccgctggcagtgggagctttgggatcaacgtggccaccccaggctccagcgccaccaccggagctttcagctttggagcaggacagagtgggagcacagccacctccacccccttcacagggggcttaggtcagaacgccctgggcaccaccggccagagcacaccgtttgccttcaacgtgggcagcacaactgagagcaaacctgtgtttggaggtaaggaggggcgtggacttgggctaccgggccggacactgaaaagctgtgcctgtgaagcctgtggtctcggggagcttatgctgtggcagtgaagagacaggcactgaatatagaactcagtgagatgccagggcatgatacatgttttgctaacgtagtaatgactggaggagccattgtggatttaactggtcaaaggccttctgagtacttaacaattgtaagctgaaggttgggcgcagtggctcatgcttgtaatcccaatattttgggaggccaaggagggtggatcacttgaggacaggagttcaagaccagcctgggcaacttggcgaaaccctgtctctactaaaaataccaaaaaattagccgggcatggtggtacccacctgtaatcccagctgctcgggaggctgaggc

SEQ ID NO: 38517 - DNA, 2300 bp, Homo sapien
accaaaaataaaattctaagcccccacaactgactcagtggactcccctgttggccaacaggatccaaaataaacatggaaaactaatttaggtcatgatgggaaggagggggttggatatgccttgtcataattctcctcccgtcagagtttaggcacagctgaccaacattatgatctctattagaatagacatcataggactgacaaaacaggctctttttatcagtaagatacccatctccaaccagactctgatatagcatcacatgacagatagcagtccctgaagtaaatcacagtattttaccccataacatattttctttgacaaactttaaaatagtcctgcaaagccatctctttgggggaaatttgcattctgtagagaatctctttgccttacagaaaagactccaggtcttttctggagagtctgacaccttttaagatccaataagagatatttatcatctattctctctgaagcctgttctgaggcttcacctacataacaagaaccttggtttccacaatcccccttatcttaactcaaacttttccttcttttttttccctccctctttttccttccttcctctctctctttttctctctctctctttcttttcttctctgttgcccaagctggaatgcagtggtgccatcatggctcactgtagcctcaacttcccaggctcaagcgatcctcccatctcagcctcctgagtagctgagtctacaggcatgcaccaccacacctggataattatttttttttttgtagaagtgggggtctcgctgtgttgcccaggctgtccttgaactcctggcctcaagggatcctcccagctcaccctcccaaaatgctgggaatacaggcatgagccaccgcaatggcccatttctttatgtagtcttccagctgttcagccaacacttaactctgaaccaactgccagtctttcaatctactagtgacctgaaagcctttcctggctgacccaacatatacttcccatgtattgatttatgtctttgcctgtaactactgtctccctaagatgcataaaaccaagctgtaacccaactactttgggctcacgttctcaggaccccctgaggctgtgtcaccagccatggtcactcaaataggaggcccagaataaaactctttatagactttgactctttttggtcaacataacctaaccctaaacataatcctcctggggaaggtaggatcacaggtatctcttcctcgttcagtttgtgtgtgtatgtccttatttctctacggtttttaggcattcgctgtgtgatctagaaaagctatggagtctcgctttgtcgccaggatggagtgcagtggcgtgatctcggctcactgcaacctccacctcccaggttcaagtgattctcctgccttagcctcccgagtagctgggcttacaggcacgcgccaccacgcccagctaatttttgtatttttagtagagacagggtttcatcatgttggccaggatgatctctatctcttgacctcgcgatctgcccgcctcggcctcccaaagtgctgggattacaggcttgagccactgcgcccagctacaaattctattttctttttgttccttggaaagcatcgctgggcatttatcctgtcccagtatttgagtgaaacttctcagcatttcagagcagtgaccatgatacaccctttcctttccttctccttatgggaaactccgttctaacccagaggacttgggctccaggacccagtaacggagccctggatttgaccctaaaagggagtaaagacaaaggtgaagttcagtccggggttcagggctgccaaagctcatagcctggagcttcttaacctttaggcagggtagagacatttaagacggccccaaaactgggggagcgcgtaggctcctgggaaatagagtccgttacttgtcctgggacccgcggtgggtgtcccgggaggcggacttccggtgcactcctgcgcttgtgcacctctccctgcgtgcgtgttcgcacatgcgcgccacctccgcactgccctcgcttcctgtgcctcttcaggtcatcgcttgctctcgttcccaggctttggcttctagtggacgagaatcaccgagtctgcggggctggatgctgaccgcccggaccagcacctaggcgggcgggagctgtgcggcccagggttcgcgcgggccgggtagaggctcgagctgggacccccgagcgtgaaccccggagccggcggcgctggggccagaggg

SEQ ID NO: 38518 - DNA, 2300 bp, Homo sapien
tgtgctgccttgaccaaaagaggtatgggaggggctgggcgcagtggcttgtgcctgtaatcccaacattttgggaaaccaattcaggtggatcattagaggtcaggggttcaagaccatcctggccaacatggtgacatcccatctctactaaaaatacaataagttagctgggtttggtgttgggtgcctgtaatcccagctactcgagaggctgaggcaggataatcgcttgaacctgggaggaggaggtggcagtgagctgagatcgtgccattgcactccagcgtgggcaacaagagtgaaacgtcgtctcaaaaaataaaacaaaagtccgggcgtgatggctcacacctgtaatcccagcactttgggaggccaagacgggtggatcacgaggtcaggagttcaagaccagcctggcctagatggtgaaaccctgtctctactaaaaatgcaaatattagctgggcatggtggcatgcacctgtaatctcagctactcagaagtctgatgcaggagaattgctaaaacccaggagggagaggttacattgagccgagattgcgccactgcactctagcctgggcgacagagcaagactccgtctcgaaagaaagaaagagaaaggaaattccccagggaagtacctcggcttatttcataaacaggtactgaaggaagcagaggcatgtggaggacttccccacctcgtgcagctatttgggccgtggcatctgaaatttcttatttcagagtcacccctttgatgaccttggcagtgaactgcagtcatctgtttaggcctttccatggcccacgtcaatgccgatatttctgtctgttgcacatttgatttccttgttgttggcatttagaaggccccctgtttcccagatcacaccacgggcatggaccacagagattgcatcttgtgagtctgtagaaatggtcaaggccttgtcctctcttaggtccagagctcaggttaatgcagattttcccggccatctgtgctgaagtccctttggggaggctcctggctggtttcctgtaggtagacagctacacgtcctgcccttcattggcttcttttcatgaagctcctgccatctacaaaacatgtctcccttcttgaatcacatctctgttattgaaactctagaagtcgaccgggcatggtggctatgcctataatcccagcattttgggatgccaaggcgggtggatcacctgaggtcaggagttcaagaccagcctggccaacatggcgaaaccccgtctctaatacaaatacaaaaattagccaagcatggtggccactgtactccagccttggcgacagagcaagactccgtctcaaaaaaaaaaaataaaataaaagagaaagaaagtatcatgcttttctgcattctgtgaattgttttagtgagttatcgaacttgagggcatggtgggaacctccagatttgcagccagttggtgagaagtatatgtggtctgaagacacccaaacctgcaggtgtgtctaaagcgagggcagcctagtgggggctggtggccttaacctgtggcatttgaggtaacatcagggagttgacatcagaattgcatcacataggctgggcgcggtggctcacgcctgtaatcctagcactttgggaggccaaggcgggcagatcacgaggtcaggagatcgagaccatcctggctaacacagtgaaaccccatctctactaaaaatacaaaaaattagccaggcatggtggcgggcgcctgtagtcccagctactcgggaggctgaggcaggagaatggcatgaacccaggaggcggagcttgcattgagccaagatcacgccaccgcactccagcctgggtgacagagcgagactccatcccccccccacaaaaaaaaagataaaaaacagaattgtgtcacaggccagatgcagtggctcatgcttataatcccagcaatttgaaaggcaaggtaacaggatcgcttgagcttgagtctgaggccgcagtgagctatgaccacaccactgcaccccagtctgggtgacagtgcaagaccccaactccaaaaagaaaagagaaaaatcacaaagaattgcatggcagagtgcctgtctttcacagctttaactgctgcaggaactttcttttttttttttttttttgagagggggcgaggagacacaatctctgctagtgattctcctgcctcagcctcccaaatagctgggattataggcgtgcaccaccacgcctgcctaatttttgtatttttagta

SEQ ID NO: 38519 - DNA, 2300 bp, Homo sapien
caggtttcaccatgttggccaggctggtttcgaattcctgacctcaagtgatcgtcccacctcagcctcccaaagtgctgggatcacaggcgtgagccacggcatccggtctgaattgcctttttttttttaaaaaaaaaaagtccgggacaggagattttgcgctgtcacacaggccggagtgcagtggcccagtcataactcactgcagcctccagatcctggcctcaagcaatcatcctgcctctgcctcccaaagtgctggaattataggtgtgagctaccacacctggcctcagctgagttgcctttgaaacattcccatgaagatgcaaagtttaactcagagaagtcagaggtcatgggaattgaatcgtacctaaagccataacagaaggaaagagtacaagaaaagaaaagggtccataatggagccttgaggattttctctatttaaaataactgaggccaggcacggtggctcacgcctgtaatcccagcacttcggaaggccgaggcaggtggatcacctgaggtcaggagttcaagaccagcctaacatggagaaaccaccccacccccccactaaaaatacaaaattagccgggcgtggtggcgcatgcctgtaataccagctactcggaaggctgaggcaggagaattgcttgaacccgggaggcagaggttgctatgagccaagaacgcgccattgcactccaacctgggcaacaagaacgaaactctgtctcaaaataaataaataaataaataaataaataaaataaccaactttaggatgggtgcagtggctcacgcctgtaatctcagcactttgggaggccgaggtgggcggatcacctgaggtcaggagttcaagaccagcctggccaacatggcgaaaccccgtctctactaaaaatacaaaaattagctgggcgtggtggtgggcgcctgtaaccccagctactcgggaggctgagacagaagaagaactgcttcaacccaggcggtggaggttgcagtgaactgagatcgcgccactgcactccagcctgggtgagagagtgagactccatatcaaaaaaatgataataataaaaataaataaataaaaaataaaataaccaagtttaatgtatttttactacagtcagtttcttagttcatttgtactgctttaacagtacctgagacctggtaatttaaaaagaacagtagttggccgggcacagtggctcacacctataatctcagcactttgggaggctcaggtgagtggatcacttgagtccaggagttcaagaccactctgggcaacatagggagaccccatctctacaaaaaataataataataaatagccaggtgtggtggtgcacacctgtagtcccagcaacatgggaggctgaggtgagtggatccaggtacagcacttaaacactcctgacaatgagtgctgacaaagaaaaactgagcaaaagtggaattcgagagaactcgaatttagcccagctaaattttgtatttttagtagagacagggtttcatcatgttggccaggatggtctctatctcttgacctcgcaatccgcccgcctcggcctcccaaagtgctgggattacaggcgtgagccaccgcgcccggctacaagttcttttttctttttgttccttggaaagcatcgctgggcatttatcctgtcctagtatttgagtgaaacttctcttagcatttcagcgcagtgaccaagagacaccctttcctttccttctccttatgggaaactcggttctaacccagaggacttgggctccaggacccagtaaggcagccctggactaaaagggagtaaagacaaacgtgaagttcagtccggtgttcagggctgccaaagctcatagcctggagtttcttatcctctaggcggggtagagacatttaaaaccgcccctaaacttgtgaggcgcataggctcatgggaaatagagtccagtacttgtccggagaccagcagtgggccctgggaggcggacttccggtgcactcctgcgcgtgtgcacctctcccggcgtgcgtgttcgggcatgcgcgctgccgccgcactgccctcgcttcctgtgagtcttcaggtcgccgcttgctctcgttcctagggtttggcctgcagtggacgagcatcgcatagcctgcggggctggatgctgaccgcccgggccagcacctaggcggacgcggagctgtgcagaccagggttcgcgcgggccgggtggaggctcaagcggggaccccggagcgtgag

SEQ ID NO: 38520 - DNA, 2300 bp, Homo sapien
aaaactaaaagtcatacgcaaataattcataccagaagtctaaaacagtgtttatagtaagactattaagtttgtggatactaagagatcctggataacatgtaaaggaacgttagtccaagaatagtgggcaagagttaagagtctgatcttggctgggtgtggtggctcacacctgtaatcccagccctttgggaggctgaggcaggagggttgtgtgaggccaggagttgagaccagcctgggcaacatagtaagaccccgtctctatcttatttaaaaaaaaaaaagggccggtggctcacgcctgtaatcccagcactttggaaggcccaggtgggcagatcacaaggtcaggagtttgagaccagcctggccagcatggtgaaaccttatctctattaaaaataaaaaattaaggccgggcacggtggctcacgcttgtaatcccagcagtttgggaggccaaggcaggcagatcacgaggtcaggagatcgagaccatcctggctaacacggtgaaaccctgtctctactaaaaatacaaaaaattagccaggcatggtggtgggcgcctgtagttccagctactcagagaggctgaggcaggagaatggcgtgaacctgagagagggagcttgcagtgagccgagatcacaccactgcactccagcctgggcgagagagcaagactccgtctcaaaaaaaaaaaaaaaattagctaggtgtggtgacgcacgtctgtaatcccagctacttgggaggttgaagtagaagaattgcttgaacctgggaggtggagagtgcggtgagccaagatcacgccactgcactccagtctgggcgacaggacgagactccgtctcaaaaaagaaaaaaaacaaaacaagacaaacaaaaaaaaaaaaacaaggtgattcactaatcaccttctctacctccactgtttcttccggcaagatttacattcagtcttgggttagtaggtgcacctgtgttcatttccctctggcttttctccatgggaataatattcagagtccatgtctaggcaatagaggctatctagacttacagatggagctctcacctgagaatccatctcttggcgtttgatctgtgtcagcgtcatgcttgagaagtccatgttgtctgcaaggatggaaacaagaaggtctcatcaaattctaccctggctgactggcacctgagaggcagccaatgccaatgctctgtggaaacgcctggcttgccatttgtcaacactgcatgaaagtaactgagggggccggacaacggtggctcactcctgtaatcctagctctttgggaggctgaggtgggtggatcatgaggtcaggagtttgagaccagcctggccaacatggtgaaaccccgtctttactaaaaatacaaaaattagctgggtgcagtggtgggcgcctgtaattccagctacttgggaggctaaggcaggagaatcacttgaaccctggaggcggaggttgcagtgagccaagattgcgccattgcactccagcctgggcaacaagagaaagactccatctaaaaaaaagaaaaaaaaatggcagggcgcggtggctcacacctataatcccagcaaactttgggaggccaaggtgggcagatcacctgaggtgaggagttcgagaccagcttggctaacatagtgaaaccccgtctctactaaaaatacaaaaattagccaggcgtggtggcgggcgcctgtaatcctagctactcgggaagctgaggcaggagaatcgtgtgaaccagggaggtggaggttgcagtgagcagagatggtaccactgcactccagcctgggcgacagagtgagaccctgtctcaaaaacagaaataaagaaaaaataaaataaaaagatgaaaaatatgaaagaatttagacacagtcctgtgggatttggttgggatcacagggaaggatgcagagaagagctcaacagggtgggtaagaaaagggtccctttggaaaggctacctgtctcttcgatctgtgatttgccggaaatggttgaggccacaacgccggcagtggcctggttcactccccgagaggcctgctgcagctgggctaggttggggctgtccttatcagctttcacctaccaggacaaagcagatttaggttcatacaacacctagagcaacaaggactgaatcagataattgctctgatggttcttagcaaacatatgtgggccaaacggcaatcaccaatcagcttctcaaaatctgctgactatagtcagctcctga

SEQ ID NO: 38521 - DNA, 2300 bp, Homo sapien
aggccctcatcatctctcatctacgctagagtctccccactgatttcctcccttccatcaggcccccataatccatccccacaatacaagctcctcagtgcacacatctgagcaaaagtcttcagtggctccttagtaaccgcaaatgcccacccctctttcacttctctattgaatgtgtgaatttttaccaaacgctcttattaaaaaaaataaaaacaaaaacaaaaaaaaaacaggcagggcagggtggctcacacctgtaatcccagtgctttgggaggctgaggtggtaggatcatttgagcccaggagatcatgaccagcctgggcaatccagcaacatacccctcactacaaagaaatatgtatatatttttttgagacggggtctcgctctgtctcccaggctggagtgcagtggcgcgatctctgctcactgcaacctctgcctccctggctcaagtaatcctcccgccttgtgagtagctgggactacaggcttgcaccaccacgcccagctaattttaaaattttttgtacagatggagtcttgctatgttgcccaggctggtttcaaagttcagagctcaaacgatccgcctgcctcagcctcccaaagcgctgagattacaggtgtaagccaccgcacctggccaaatttacaacacacacacacacacacacacacacacgaatcaccaaattgttaggcctaaaggtgccattcattactccgagtttcaaataacttttaaaaaatacatctatgccgggtgctgtagctcatgtctgtaatcacagtactttgggaggccaaggtgggaggcttgcttgaggccacgagttcgagaccagtctgggcaacatagaaagactccatctctgcaaaaaagatagccaggcttggtggcgtgcatctgtagtcccagctactcgagaggccgaggcaggaaaatcgctaggacccaggagctcaaggtcccagtgtgttacgatctgcactccagcctgggcgacagagggagactgactccaaatgaaaccaaaaaaaaaaaaaaaaacaaacaaaaacaaaaacaaaaacacacctaaattggagtttaacggaaaacttttaactttctccagcactcctgctaagcatcacacttctctctgcttgctggtaccctggctgacgtctgagcaggatgggacgcgcggctcagagcctaagataaaccgaaagtgtctacagggctttctaccaacaaataagctctgacgggttcctttgatgaggtttgggaggcaggtcccgggaggtgcccgcggactcagccccgaactccgggacctgggctctgcgatccttgcagagggcatgggcaggggcagaatggagaagtgcaggacggggaagcctgggagctgggtgggggcggccacccattgagccggatccggccaggcgcccacgctgcgccccgcccgcggggctgcgctttcccgggctgcggccgcagggctggtcagtccggcgctcccgggtcccaggcccggaaggagctaacgggctattcgcaggcgggctgggattcccccgggggaggccccactgcccggcccgcgtcatccccgcccatctccacgggccgtcgcgggatagccccctgcaggagcgggcagggtagtgggcggcgcttggcggagggcagcacgctcggggcgcgcggggactgcggccgaggggaggagagggcggtgcgcgggcgggggcggggcgagcgagggcatatcagggcagcccgcccaggccacgccccatccaggcctcgccccgtccgcaccccgccccggccctgcctagaacggcgggaccacggtgactgacaggactccagaccagtcaccacgcgcctcgaggccccgagaggctagtcggggccgagccagcggaggggctcctgaaggggcgggggcgggcggggaagccgttcggcgaggggcggggtctctggaagactggcagaactcacagccaatggcaggcgggagccgtcccgttagcgccggatccccgcgggtagggcggggcgggcggcgccgtggggatcccggggcagccgagggcccctgactcggctcctcgcggcgacatggatcggatggccagctccatgaagcaggtgcccaacccactgcccaaggtgctgagccggcgcggggtcggcgctgggctggaggcggcggagcgcgagagcttcgagcggactcaggtgaggacgggggaccccggggcatccctggggcaccct

SEQ ID NO: 38522 - DNA, 2300 bp, Homo sapien
aaaatacaaaattagccgggcgtgatggcgcatgcctgtaatcccagctacttgggaggctgagtcacgagaattgcttgagcctgggaggcagaggttgcagtgagccgagattgtgccatagcactccagcgtatgcaacaggagcaaaactccatctcaataaaaacaaaaacaaaaacaaaccaccctctcatgatcatccagactgttgtgcctggtttgagtgacaggcaactcaccatctatcctcttcccacctacaacagctctgactatcacaaacttctgttaagttcttttaaaaatttggctgaagccaggtgtggtggctctcccctataatcccagtgctttgggaggctggagtaagcagatcgccttgaagccaggagtttgagaccagcctggcaacctttgggctctacaaatttctttttttttgtgacagagttttgctcttttttcttaggctggagtgcaatggcacgatcttggctcactgcaacctctgccccccaggttcaagtgactctcctgcctcagcctcccaagttgctcggattacaagcatgagccaccacaaaattagcccggctaatttttgtatttttagtagagacggggtttcaccatgttcgccaggctgatctcaacctcctgacctcagacgatccccctgcctctgccttccaaagtgctgggattacaggcgtgagccactgtgactggccccacacacacacacaaaataataataataattgaccaggtatggccagacgtggtggctcactgtaatcccaacatttttgaaggccaaggtgagacagtcacttgagccaagagtttaagaccaacctgggccacatagagagacctcatctctatttttttttcttttttgagacagtcttggtctgtcgcccaggctggagtgcaatggcgggatctcggctcactgtaacctctgcctcctgcattcaagcgattctcctgcctcagcctccctagtagctgggattacaggtgcccgccaccgtgcctggctaatttttttatttctagtggggacggggtttcaccatgttgaccaggccctctctctcactatatatatatattatttgttgttgtttgtttgttttgttttgttttaagcctcgggtgattgtgatgatctgtcaggtttgggatctgttagatctctcaaatgcccccagccagccctggccctacaggtgtggccccaagaagatgggctggcacctgcctggaccctgtttttaaatatccattgtcgaggttgggctactctatgatcacatcttgagaccatccagagctccacacagagataagcaatgcttagaaaggaaacaaaactttgcccaagagccagaaacctatcttcaacaaccaattgtgctataaagtaacttagttcagttcactggaatattacttaatttcctctgctttttctttttaaacaagaaagtgttgactcagccaacagcactgggaaccagactccctggggcctgcctgcccctgctcttctcccaaattctcttctttttttgtccctgttgatggaattcaataaagggatctctaccatctgtcacttgtttttttttgttgtttgtttgtttgttttttttttttttggcagagtctcactctgtcgcccaggctgcagtgcagtggtgccatctcagctcactgcaacctccacctcccaggttcaagtgattctcctgcctcaccctcaggagtagctgggattacagttgcctgccaccatgcccggccaatttttgtgtttttagtagagacagggtttctccatgttggccaggctgatcttgaactcctgacctcaagggatccgcccacctcggtctcccagagtgctgtgatcacaggcatgagccaccacgcccagtgccagattatctttcttcactgtctaatttcattcctatgagtattagtttacttttcctttgttgggtcaaaagtgctgcttctgttcccaaccacagaattctctggaattgttttcagggccgtctcagtctcataaaaggggatcaggcaggaggagtttgggagaaacctgagaagggcctgatttgcagcatcatgatgggcctctccttggcctctgctgtgctcctggcctccctcctgagtctccaccttggaactgccacacgtacgtagctggcccattcccctcctggggttccttcccggaccgcctgggagtggatggaaatgagtatctccaa

SEQ ID NO: 38523 - DNA, 2300 bp, Homo sapien
aagactctgtctctaaataaataaataaaaataaaaacaaagtagccaggtgtggtggtgcatgcctgtggtcccagctgcttgggagggtgaggtgggagaatcacttgagcttggggaggtggaggctgccgtgagctgtgatcacacctctgcactccagcgtcggtgacagagtgagaccctgtctcaaaacaaaaaaaggatggaaaaaaaaccttacttacttgttgaacttctgggctgaagcaatcctcccgcctgggagtgctgggattacaggcatgagtcacccaggcctggcttcttttcttataaggacatctgtcatgttggatcagagtcccatccttatgacctcattaaaacttacagcctggcacagcagctcacgcctgtaatcccagcactttgagaggccgagaagtgggaagcccagatggcagcctagaccctgggaaccacagcagatgggggctcctgggagatccacacagaggaatctggagcccaggaagcaacctggagggtacagggaaggggcttcagccacagggaagggcctggagggaagagagcaggagccagggccgccagctatgggctgacatcaagggcatactcaaggtcctgactgagggggcctcggacacaagtaccaagagggagtttcagccaggcgtggtggctcacacctgtaatcccagccctttgggagctgaggcgggtggatcacgaggccaggagtttgagaccagcctggccaacatgacaaaaccttgtctctactaaaaatacaaaaattagccaggtgtggtggcgggtgcctgtaatcccagctactcgggaggctgaggcaggagaattgcttgaacccgggaggcagaagttgcagtgagccgagatcgtgccattgcactccagcctgcgtgacaagagcaagactctgtctcaaaaagaaaaaaagaaaaaaaaaaaaaaaaggaggagtttcagcagaagccatttatagacagacatgcctcttgggtgaagggactcaaatttttttttttttgaaatggagtctctatcgcccaggccggagtgcagtggcgtaatcttggctcactgcaaactccaccttccaaactcaagctattctcctgcctcagcctcccgagtagctgagactacaggcactcactatcacacctggctaatttttgtatttttaatagagacgggatttcaccacattggccaggttggtcttgaactcctgacctccagtgatctgcctgcctcggcctcccacagtgctgggattactggtgtgagccaccatgtccagcctcaaatgttttataaacagggtataatcacttacccatacaggaggaaagctgataaataaaactatattaaaatccattagaagacatccataagaggccaggcacagcagctcctgcctgtaatcctagcactttgggaggctgaggtgggaggatcacttaagtccaggagattgaggccaggaattcaagaccagcctgggcaacacagcaagaccccatctctacaattttttttttaagttagcagaacatggtggtgcatgcctgtagttccagctactcagaaggctgaggtgggaggactgcttgagcccaggatcttgaggttgcagggagctatgattgcaccactgcaaagaaaagaaaaagaaaagaaagagagagaaagaggtatggagggagggagggagggaggatggaaggaaggaaggaaggaagaaagaaagaaagaaagaaagaaagaaagaaagaaagaaaggaaggaaggaaggaaggaagggagagagacagaaagagagagagagaaagaaagaaagaaaaagaaagagaaaaggagggagagagctggggaagaaggaagaaaagaagggaaagaaagaaagagaggtagggaggaatggagggaaggaaggaaggaagggagggagggagggagggagaaccgtaagacgtagaaaggcaatctgtgggatgggagattatttctgcaatacatctgtactgggttgaataatataccccaagaattcattgtccacccagaacctcagaaatgtgagttatttgggaatggctgtttgtaaatgtccttacgtaagccaagaggaggtcttgacttggggtcccaggggtaccgcagatcccagggactggagcagcactagcaagctctggaggatgagccaggagtctggaattgaggctgagccaaagaccccaggtaagggtcagggactttgt

SEQ ID NO: 38524 - DNA, 2300 bp, Homo sapien
tgttacccaataattacaaagggctgtagagcctccgtggcagtcagccacatgggagtggcaggtgaagggagtctctgatcatgaggtcctgacctgggatcctggaatcgggggtggagtgaggtgggagccatgtcccactctgcctcataaagttgcctcagtcccttacaactgaactggacgttatgacttacaggcttccgcgtagttgccagtgccttctgtcctccaacctcagtgcagctgtcagctatgagtccctcctgaactttcctcctggcacaattggccagttttcccgtggtttttttgttttctttttattttttttttaaagacggggttttgctatgttgagcaggctggtcttgaactcctgggctcaaataatcctcccaccttagcctcccaaagtgctgggatgacaggcatgagccacctcacccagcctttctttttttttttttttaagagacaggattatgctctgtcacccaggctggagttcagtggtgctcacctagctcactgtagcctcaaactcctaggctcaagtgatcctgccccctcagcctcccaagtagctaggactacaggcgcataccaccgtgcctggctaatttttctatttcttttggagacagggtcttgctatgttgcccctgctggtctcaaactcctggcctcagtcaatcctcccgcctcagcctcctaaagcattgggattacaggcatgagccaccgctcccggcccctggtttctcctatgtttcccttcctcccacccaccacccccataccttgtcctgggtcagggtccccaaagcagacccttggcagggattcatgggcttgtggtttattaagagatgcttccacgagagaccatcgggggactgggaatctggtcggcgcgggaaggggccaagcaaagtccggctgcacagagagtcacagatttgaccgagttggaaactcaggaaacagggtaggtcatgctggatctggagtcggcatccctctggcagacattggccacctcagaggatgtgaatttccaggcatttcccacttccctagaatcttggtgactaagtggctccggcaacttgagggtacaggcgatggctgttgggacttcaaggccaccgagagctgatggaaagcggtcctgacagcatctgctttgctctgtcaagacttgtcatggactgattgattgattggttgattgattgattttaagacagggtgttgctctgttgcccagcctggagaggcagtggtgtgatcacagctcactgcagccttgaactcctgggttcaagtcatccttccacctcagcctccccaagagctgagactacaagcctgcaccaccacgcctggctaatttttttattttttatagagatagggtcttgctttgttgcctaggctggtctcaaagtcctggcctcaaatgatcctcccacttgaaacttccaaagcacagggattacaagcatgagcccccgtgcccagctgacctctcattgtctgttacacacacttgatcacaaatctgtctccccattagagtcctcccagtgcctggcacagaccacatgcctaataaataattgggtgaatgaatgaatgaatgaatggaagggagaagatagggatgactctgcccattttcagctgaagtaactgaggctcagggaggtgagtgacttatccaggatcccacagggagtggccaacacagccaggatcccatgggccttctgacaatgcatccaacacctttgaacttggcctaggtggggtgatgtcccctcccccagttctttcgttcggagcccaagataacccttgactcagctgggcaacaacgggacaacaacttcctctttccagaccacaggcctcaggattttcaaggaagcgtggagggggctcgggggcgtgtttccttctagttgccccataaagggcagagggagggagtttggggtactctgcaaggacccgagctatttatccctaggtcctttcctcctgcacgtcagctttgagccccgagctggtgcttctgctctctgagacatggcaggcctgatgaccatagtaaccagccttctgttccttggtgtctgtgcccaccacatcatccctacgggtaagacctccgacaggatgcagttccaagggcatggctgggatggcacagtggggggtgcaggactgaccagcctggggctggagggaagcgctggggaaagggtggcccagtgaatggactggcg

SEQ ID NO: 38525 - DNA, 2300 bp, Homo sapien
ctacaaaaaagaagcagctagctaggtgcggtagcacgcacctgtggttccagctacttgggaggctgaggcaggaggataccatgagcccgggaggtcaaggctgcagtgagctatgattgtgctactgaagcaggacacacaagccccaaaatttagcctccttccttcagagccagcaggagcttctaagctatggggggcagcagttacagctgagtcaaaccaaagcctgcagccaagggcaaggagctgataacactagggtgggtgtgtggggaaggagccaaatacttctaccatgtgaggggagggagtactgggcagggtcactggagaaagcgaaaaaggtagtacccttgaaggtactgctgggcacagtggctcatgtctgtaattccaggactttgagaggtcaaggcaggcttatcacctgaggtcaggagttcgagaccagcctggccaatgtggtgaaatcccatatctactaaaaatgcaaaaattagctgggcgtggtgatgcacacctgtagtcccagctacttgggactcgggaggctgaggcacaagaatcacttgcatctgggtggcagaggtggcagtgagcagagatcacgccactgcactccagcctgggtgacagagtgagactcttgtcaaaaaaaaaggaaggtctaccttaaacagctgttctccagcaaaagcacttttcaaactgtaaagtgctgaaatagatctcggttatgagtgttctattacatccctaacttttgagtcccttccattgaatccctctcccgtttcctgtcccttttccttttttttttttccgagatacagtcttgctctgtcacccaggctggagcgcagtggtgcgatctcggcttgctgcaacctccgcctcctgggttcaagcgattctcctgcctcagcctccggagtagctgggattacaggcacgcgccaccatgccgggttaatttttgtagttttattagagacggggtttcaccatgttggccaggctggtctctaattcttgacctcgtgatccgcccgcctcggcctcccaaagtgctgggattgcaggcgtgagccaccgtgcccagcctcctgccccttttcttcaatatgaagataaagctgcccctggctgtactggaggccaattccgggccatagcaggaggaactgagttctaattctgtctttgccatgtaactgaattacccagggccctccctagtcctgtttcctctttggtgtaatagggatgaatacagatgggaagatcgtgatatgaaagagttctgtgagctgtaaggcataataatcatgaggtattattacaggaccaacaggtgcctaggcccgctgtgcaataacagaccagttacactgaggaagcagggttatcagcagaaaaagggtttaaagatggcagggtgcctaggaggagacgcagggagaccaacaaatccatcttccccaaggagttccgggctgggattttaaagggcattgtgaagggtgaggggctggaaaattggggtcatcgactggtcagggtaagggggttgaaatcctcaggatatggaaactgcagtccccattgagtcttgcttctgtgggctccttcagaacaactggtgtcagtaattatgctggtatgcgggacctgaaagaatatctccaagggaaaacgtttcataatgttcaagttgttatctatggagttaaggggaattgtaatcttgtgacagggtctacgtgattctaggacagacgatgggcacctatcatagctgatacacagagctatgagcaagcaggtcggagagcaaggtgacctagtgatgaacgcagagtgtgctgcaagcttcgtttattttcgtttttccccctcccttcttccctgattaatttcctaaagtttataggagcagtttcagtaccagcccgagtaggatggaatcaaacacggtgctggaacattcctacccggaagtggccccgacccccctccccccgtcccggcctcccacgcacggggggggggggggggggggctgatcggcgctaccggattggacaacttggcatggggcggggcctctgggaggcgtggcctccggccggctcctctgctgttgccaagggaaactgccgcgaggaggcggaaggagcagaggaccggcagccggcgtcgaggcggggcgcgggaacgacggcggccatggcggcctcggggcccgggtgtcgcagctggtgcttgtgtcccgaggtgccatccgccacctt

SEQ ID NO: 38526 - DNA, 2300 bp, Homo sapien
aggaacacaggaaatttgcatatctcctgctgttttgcaaagcacacacactgatatgtattaatttcgtttaaccctcacaaggatcccatgacgtaggacctgttattggcccgttatctagataagattgaggtttcatgcagagaatcgcagagctgttgcgtcatgcaattgagataggaatctatatttttttttttattctgtgatgttttggaactagagccttcgggtagataatctccaaatcatgtacagttgcttctagaatcttttcatgtttatacttggaatttcagttttggaaatactcaacaaataatgaagtactcttcagataatgaagcctctggtgatggccagactgaggtatatggttccatagcctgcttccccactccaatctaaaactgttccccccaccctaggtatacatagcaccacctcacagacagaagcaaaatgccaacctaaccttaacctcccactttctggggttcactgcttccctgggtgtgggtttcgtggatatgtgagcgttagagacgtaagggacctttgaagtcctcaatctaactcttgttactttacagtgaggaaactgacgcctagaggacctgtgacatgattaaactcagccagcctggatgtaatagagccaagattccactccaagtctttagactcccaagtccaatattaccatcagttctttggtctctctccttgagtttagtcgtatttgggcatgcagggacataaaaatacttaagagataaccacttctaaaatttttttagagatagggtcttcgtcttacccaggctggagtgcagagatgcaatcatagctcactgcagcgttcaactcctggaatcaagcgagcctcctgcctcagcctcccaagtagctgggactacaagtacacatcatcacacctgactaatttttaaattttttttaaagacgggggtctcactatgttacctaggctggtcttgaactcctgggctcaagtgatccttccacctaagcctcccaaaatgctgggattacaggtgtgagccaccatgcctggcgataactgcttttagaaaaataaaaggccaggaatgatggttcgtatgtgtagtttcagcactttgggaattcaaggcaggaggatcactggaggccaggagttcaaggctagcctgggcaacgtagcaagactttgtctctacaaataaaaatttaaaaaaaggaaaaggaggattctttgatgtcttattacatataaagcatcagtttacctgtgagatcggataagcactttctgaggagacttataatttctataatctttattgttaatgatagtgttataattcttacagctgcaaaataattcatggtcccttttttcttcctctgaacagccactatggaaggaggggtcaggattacagcagaggagactggcacacagagtgttaagtgacacccactcaatccaccccgaagctgttacacttaattaaccctcaaactgcccagtgaggtaggtcagtatgaaaacctgaaaaaggattataaagcactttacaaattcagagactgccctctaccgaaaagtattatttttttccctctggaagtcagttaccgctaagagttgcaccaggcctggggaagtgtagggattagatattcatgcctctcctttgaggctctgggtccttcattgttgaacgcactgcttgtattgcctcctgctgcgactcactggctctcacttctctgtcacggaggggggctctctgcctttcctaggcggcttataacctggcttccctcctgggagcaacccgccgccaggcctctaacccgactccctctgcagtttacaggctggtaacctacatctttgtctacgagaatcccatctccctgctctgcggcgctatcatcatctggcgctttgctggcaatttcgagagaaccgtgggcaccgtccgccactgcttcttcaccgtgatcttcgccatcttctccgctatcatcttcctgtcattcgaggctgtgtcatcactgtcaaagctgggggaagtggaggatgccagaggtttcaccccagtggcctttgccatgctgggagtcaccaccgtccgttctcggatgaggcgggccctggtgtttggcatggttgtgccctcagtcctggttccgtggctcctgctgggtgcctcgtggctcattccccagacctctttcctcagtaatgtctgcgggctgtccatcgggctggcctgtatcct

SEQ ID NO: 38527 - DNA, 2300 bp, Homo sapien
gtccgcgctgaggagcagagcctacctgaggtttgcagagcgagcagggcatgaatctgcttctctgctgccctccgccaaccgagcagggaaactgataatgtctggaagcttctctggccgctgtgggtcctgccctgtctggggatgggaggggaggggtttccagcatgttgggggtaatgctttcacttatgcttaatgagctgtgctctccatcctcctaacagccagaggacatggttagtaccctcccaccctccctccacagcccccctctctttccatggaagggttggtcctcaggatcctgctgatccccagcttgtcaggccatgctgggctgggggcctcctctgcgcccctgaagtgctgcttcgccccatcacagctttgcagggcactgaatgacaaatgtttttttttgagagggagtcttgctctgtcacccaggctggagtgcagtggtgtgacctcagtttgctgcaacctctgcctcctgggttcaagcaattctcttgccttggcctcccgagtagctgggactacaggcgtgtgccaccatgctcagctaatttttttttttgagatggagtctcactctgtcactcaggctggagtgcagtggcatgatctcggctcactgcaacctccgcctccctgcctcagcctcccggatagctgtgattacaggcgcccaccaccacgcccggctaatttttgtaaatagagacagggtttcaccatcttagccaggctggtcttgaattcctgacctcgtaatccaccagccttggcctcccaaagtgctaggattacagatgtgagccactgcgcccggccaatttttgcatttttagtagagatgggatttcaccatgttggccaggctggtcttgaactcctgacctcaagcgatccgcccacccagacctcccaaagtgctggaatgacaggcgtgagtcactgagcccggcctgaatgataattattttccatttcttctgctccaatgagctccccaagggcgggcatcacctattcatccgttcattccactcatatttattgagtgccaggccccatgctaggggctccctgcgcacatggggctcatcatcattgagcctccggcttggcacagaatcagtgaatggtttccggacatgggcatattagtggatgatttgacaggcaaatgggagaaggggttgggatggcctccagagcttccaaaatgcacgtgagggtgagaaagggtcccactgtgagctgactccaggctgtgttgtgcattgtggccagactaaggaaaagtcccaaggaacaaagagatttaaaaaccagggccacacacagtggcacaccctctcaccccagcgcaggccccttcttgctcatgtctgaggcccccccaggcgtgggcccgtcacggccccaccctcaccaggctggatgggcttggggttctgtcttatacatgtccaaagacctaaaacctatcagaaagccagtctagaatgggccatccagctcctgggataaatgaaggccacgtgttactaggtccacaaaacaccaggcagctggcatgccttctcaacacagcctgccgtgaggagccccagctgtcctcaagggctggccaggtgagtgacagctcagccacactcatcagtgccctgcactgtctcatagaggccccccgcccctcactcctggttcctggtcaacatggccaacaggagacactggtggtaaagccagcgtcttctcccgtcttgcttcagggacatcgccagcagtgcccatgtccttcttggcacagccctgccagcagccctcctaactgtagtcccagcttctgggctctggcaacacccctctctctcagggcagcagtggctcctgctggtacccatctcagttgcctgctccccacgagacccccattcctgacccactgggccctggtcacctgcctgacctggccctggtgcatctctcctctctgccgccacaccacacattgccactgcccagatctcagcgcactccctcttccccagccagaccacaaaggaagcacacgccagcacggcaggtcagaggctgtttctttatacaaaggcagacaacatggacacctcagcatgctgctgcagttcatgggggcccatcccaccgcttctggggagaggaatcggggtgggggcgcccgcagcaggggagagacactacacaggcctgggaccgccaagcacaccagctgcgagctcctgaagggcagacacatggac

SEQ ID NO: 38528 - DNA, 2300 bp, Homo sapien
gttcctggacataggaaacctggcacctgggccatggtaataatctctttatataggattttgctattttcacaatattttaaagatgaagagtggatgggaatggtggctcacatctgtaattcctgcactttgggaggccgaggcaagggatcccttgaggccaggagttcaagaccaggttgggcaacatagcgagactctgtctctacaaaaaatttaaaaattaggctaggtgcagtgctcacacctgtaatctcagcactttgggaggccaaggtgggaggactgcttgaggtctggagtttgagaccagcctgggaaacatggcaaaacaccatctctacaaaaaaatttcaatcaactttctttaaaatgaaaaataaaaatacaaaaattagccagttgtggtggcgcatgcctgtaattccagctactagggaggctgaggcaggaggatcacctgagcccaggaggtcgaggctgcatcccagcctcagcgacaaagggagaccctgtttcaaaaaataagtaacatatatgttattatataatatatattatttatataatatataaatataacaaatataacatttatataatatataaatgttatatttatgtattattttataaattaacttttttttttttgtgagacggagtgtcactctgtcggccacactggagtgcagtggtgtgaactgggctcactgcaacctctgcctccggggttcaagtgggtctcctgcctcagtctccccagtaggtgggattacaggcacccgccaccatgcccagctaatttttgtatttttagtagagacggggttttgccatgttggtcaggctggtctcgaactcctgacctcaggtgatccgcccacctcagcctaccaaagttctgggattacaggcgtgagccaccgtgcctgggctatttttaaaagatggagaaggggctctgagagaagtgagttgcacagtgttgcaaaaggaattcacagcacagctagtaataatagtagtagtagtaataataacaatggcgatgagaacacttagtaatgccgtgctctaaatcctttaggaacaaaggttataccacttaatcttcatgaccctgtaaagtagaaaccatagcaggaggcagaggtgggcttcactccccaaccaaggctgccagacttttcaaaccccagaagctctctgtatccccccactcctcttccatccagggcttgcctcctgcttggtcacttcccacccccaacaggccggccttcaaaagcgagctctaggcagcgtgtgggacctcacgcctgtaatcgcagcgctttgagaggccgaggagggaggatcacttgagaccagttcgagaccaacctgggcatcatagcgagaccgcatctctgcaaataaaataaaataaaattagctaggtgtggtggcgcgcctgtagtcccagctactgggaggctgaagtgggagaatcgcctgagcacaggagttgaaggctgcagtgagctgtgactgcaccactgcaatccagcctgggcgacagaacgagaccctgtctctaaaaacaaacgcgcgccctccgccgtcaggctggatggagggaacccagggagacgacttgggcctgaagcctcgccaatttcaggtgaggaaacagggccgtggaggagacaatgtggcgatcacaagcaagcggcggcccgaaggaggaggctagaccggcgggcgcacagccacagttctgcagtgatccccgggaaggtgggcagccggcccggtgacctgcagggtccgagctgtagaagccgcagccgccgtctccaggcgactccgccacccccggaaccacgcactttcatttctctgccgggcgacccagccgagccgcgagggggcgtggccgggccgggccgtaccaagagcgcaaatttgcagggggaagcgcggggctccgggaatgcacgcgcggctcgagtgggcggggcggcggcccaatggccacgcccccacccccgcggccggcgaaggcggtggtagcgcctcagtggtgtgggcctgagccctgcccaggtgcccgcagagagcagccgggctgccagcggtgagtgctatctttcgcggcgacggcggggtgggtgaggtcgggccccaagactcggggtttgccgggcgcctcagttcaccgcggccgcctggctctctgcgtcggggtgggccctcgggcctgggcactgcgcgtctggcccgacgctcgggcggaaggcatggctcccacc

SEQ ID NO: 38529 - DNA, 2300 bp, Homo sapien
tatgagggaactaggctggtgacatgggggttcccccacctccctcccggacggggcggctggccgggcggggggctgacccccccacctccctcccggacggggcggctggcggggcagaggggctcctcactgcccagtaggggcggccgggcagaggtgcccctcacctcccggatggggtggctggccgggcggggggctgacccccccacctccctcccggacggggcagctggccgggcggggggctgacccccccacctccctcccggacggggcagctggccgggcggggggctgacccccccacctccctcccggacggggcggctggccgggcggggggctgacccccccacctccctcccggacggggcggctggccgggcggggggctgacccccccacctccctcccggatggggcggctggccgggcaaaggggctcctcacttcccagtaggggcggctgggcagaggcgcccctcacctcccggacggggcagctggccgggcggggggctgacccccccacctccctcccggacggagcggctggccgggcgggggctgacccccacctccctcccggacggggtggctgctgggcggagacgctcctcacttcccagatggggtggctgctggacggaggggctcctcacttctcagacggggcggttgccaggcagagggtctcctcacttctcagacggggcggccgggcagagacgctcctcacctcccagatggggtcgcggccgggcagaggcgctcctcacatcccagacggggcggcggggcagaggcgctccccacatctcagacgatgggcggccaggcagagacgctcctcacttcctagatgggatggcggtggagaagaggcgctcctcacttcctagatgggatggcggccgggcagagacgctcctcactttccagactgggcagccaggcagaggggctcctaacatcccagacgatgggcagccaggcagagacgctcctcacttcccagacggggtggcggccgggcagaggctgcaatctcggctctttgggaggccaaggcaggcggctgggaggtggttgtagcgagccgagatcaagccactgcactccagcctgggcaccattgagcactgagggaacgagactccgtctgcaatcccggcacctcgggaggccgaggctggaggatcactcgcggttaggagctggagaccagcccggccaacacagcgaaaccccgtttccaccaaaaaaatacgagaaccagtcaggcgtggcggcgcgcgcctgcaatcgcaggcactcggcaggctgaggcaggagaatcaggcagggaggttgcagtgagccgagatggcagcagtacagtccagcttcggctgggcatcagagggagaccgtggaaagagggagggggagggggagggggagggaccagactttgtctcttaaaaaaaaaaaaaaaagactcccaggcataggaaagcaggcattcaccataaatctcattgttaacaggaactaccttcatagcccaaggttttaggaatacagagacactcttgccagtcaggatagtccaaggctcgtgaatatcaggagccactcaagggccaggcctggagacttggaacatgcagggtttagggcaacccccgccagccacacagctggggaaagggtttgctgcgaaatggtccactcttgcgtgcacttcctcccgcctgccccccgtgcggtgtccttgtgggattagaggatgttccagcacactgagagtcagtggctgtcattttctctgtcttccagggacccagtcccagctgctgccttagcttgcaccccaggaccaccctgggctggtgctgacaccactgggggctgtctgttatgtcagccccagtccaagactgtggctgtcttggcaggaacctggctgagtgagccccttctcctaccccgtgcagtgaccatttcctgcagccccaggggcaaggcccagcatttaggtgggcaccccagccagcctcaggggcaccctgctaccctctgctgacatctgctgtttctgtctcctaacagtttcatgatcaacatgggagactcccacgtggacaccagctccaccgtgtccgaggcggtggccgaagaagtatctcttttcagcatgacggacatgattctgttttcgctcatcgtgggtctcctaacctactggttcctcttcagaaagaaaaaagaagaagtccccgagttcaccaaaattcagacattgtaagtgc

SEQ ID NO: 38530 - DNA, 2300 bp, Homo sapien
ctgatgcattcatgccaggctgccctgtttctgcatccagcccttaagccgtgttgctggcactgtgcaagtgcctcctgtctctgaaagctgcctctgatccaagtggaaagggcccaggaccaatcgtgaagttcactttctctctttgtattcatagaggtcctgggcctatgtcaagaagtgcaaaaacaacatgtgtccaaatcggggattggtgagccagctgctggaatgggagaagactatccttggagattccatcacaaacatcatggatccgctctactgatcttctccgaggcccaccgaagggtactgaagagcctcacctgggggcattttgtgggtggagggccagagtgtgtatacccaggcttgtctggaaggagaaggcctttgctgcctgaaagtctcatgttagcctcctgtactgattcttcccaagtgcctgttcacgccacctagctgatgcgccctgctcaggttcaccaagaacccgcatccctgaggtgtcgcgggccatcccaactgcacccctgaggctgcctctggaagagcatctggctgctagagcagctgccctgcatccccctggtgacttagaccctttggaggctgcctgggggtacccagaggttgcctgtgttggttcacagaggatgtcacaatagccaccaataggcagtcccctagtcccagagataccaagcccagccttgtctagcccccaggctcctagaatgggatcacacccttgcctcatccccagcgcttcctgccatccaccccttgaaacagattttctttccctgctccccactcatttctgcctggctgtgttcaccaaggagagattctcaccccctcccccatctccctatccacgtttctagaaattcctaaggtcttaaaagttttccttttttttaccccctttccttttttttggaggcacggtcttgctgtgtctctcaggctggagtgcagtggcgcaatcatggctcactgcagcctcaacttccctgggctcaagcgatcctcccacctcaacctcctgagtgagtagctgggaatgcaggcatgcaccatcacacctggctaatttatttttatttttgtagaaacagggtcttgctctgttgcctaggctggtctcgaacttctgggctcaagtgatcctccagcctcggcctccccaaaatgctgggattacaggtgtgggccacggcacccagttggaagttgttttccaaatgcacttctccaaagctggcagcacccacagaacaaactgggcatcaggagacggcacagactaggggactggtaggggattaggatgtccatccatgcaggaccttccccaagtccattcggcaaccattccctgccaccgcgtgggtggggctgggaacagagagatgaatgccgtcccaccacttagcgcgctctgtggagggatgggggtgggagggggtgggggattcccctcaacagaagggcaggccttcaaggaggagtggggttttgccagagggggaacggctttacacacagccctggctttcctcagggtgtgagttgggacagagcccgggatggctgcagagctccgattagggacctcctggtaggcaggacacagccgctggaaagttttaagcatgaacatgatggggaatcagccttgtgttttgggaagggcagtccggtggccgcgagaagggacagtggaggtgaggcagggagaaaggaggccgctgtaaaaatccaagcgagagaagcagctctaactcccttccccaaagaggctcagcttcccaaggacgaaaatgttgcaagcaggtgtcacctccctgcaccttggtttgctctcagcatgacgggccagagccctgctggctgcaccacgcggctggcacagtcagtgcagtccaggcccgggggctgcagccgtcccagtcccggtccaggccgcgagtcccggggctagcaaccgcccttgcatacggccccgcccataccccgcccctgtcccggattggctggggtggggggcgtggcctttccccattggtgcccgtggcggcgcgagcccggaagcggacgggggcggtggcggaggagcctcgggtgggccggggttgctgcgccgtcctccactactggctactggcgctgcagccatgcagcccccgcccccgggcccgctgggcgactgcctgcgggactgggaggatctacagcaggacttccagaacatccaggttagcgccgctgcggacgccgggtcgccc

SEQ ID NO: 38531 - DNA, 2300 bp, Homo sapien
ggaaaagcaggccccagagacagagtcggaggaagtgagccaaaggtggtggtcaccgtctttggagactgtgctgtagtttccagaccccaccaccgcctcctgacagcctagttgccgtatgagcagacctgttacccttacaggaccactagggcacctctcaggggtctagcaggcttaggtttggggacatggaattgatagcaagatctaaggcaaggagcagggatgtggacggctggatctaggcctctgatccatacctgctctccctaaaatatagaggtactagcgatggaggccaggcgccgtggctaatgcctgttatcccagcactttgggaagttgaggcaggtggatcacctgaggtcgggagtttgagactaagctggccaacgtggtgaaaccccgtctctataaaaatacaaaaattagcctgtcatggtggtgcatgcctgtagtccttgctactggggaggctggggcaggagaattgcttgaacttgggaggcgaaggttgcagtgaggtgagatcacgccactgcaccccagcctcagcaacagagacactgtcacaaaaagaaaaaaaggtgatagtagatactagtgatgatcaaggcaaagttaggaggttatgatggccctggtctcctcctcctcttccctctttctttcttctgtgccagtgggacctggtgtccctctgagttaagagacagatttcaggcccacttctgcagcctccacagctctgggggtgttgtgacctgggactgtattacccagctttgtcaaggttcaggccacagagaatgtgtcaagctgggattgaggaaagactgtaccaaatcccttaagatcctgacccttggctgggcgcagtggctcacgcctgtaatcccaccactttgggaggctgaggcgggaagatcacttgagcccaggagttcgaaaccagcctggaaaacatagtggaaccctgactctacagaaactaaaaaaaattagttggccgggtgcggtgactcacgcctgtaatcccagcacttcgggatgccaaggcgggtggatcacgaggtcaggagttcgagaccagcctggccaacatggtgaaaccccgtttctactaaaaatacaaaagttagctgggaatggtggcacatgcctgtagtcccagctacttggtaggagaatcgcttgaacctgggaggcggaggttgtggtgagccgagattgcaccactgcagtacagcctaggcaacagggcaagattccgtctcaaaaaaaaaaaaaaaattaggcatgatggtgcacacttgtagtcccagctactcggaaggctgaggtgggaggctcacttgagcccaggagtttgaggctgcagtgagtgacgatcgcgccactgcactccagcctgggcaacagagtgagacgctgtctctaagagaaaacagcaaaacaaaatgtaacccaaatatgacaagagttagttagctcgccttgaggccattctcaagaatgtcattcaacggtggctcacgcctgtaatcccagcactttgggaggccgaggcaggtggatcatgaggtcaggagatcgagaccatcctggctaacacggtgaaaccccgtctctactaaaaaaaaatacaaaaaagccaggcgtggtggcagacgcctgtagtcccagctactcaggaggctgaggcaggagaatggcgggaacccaggaggcagagctcgcagtgagctgagatcgtgccactgcactccagcctggggtgacagagcaagattccgtctcaggaaaaaaaaaaaaaaaaatgtcattcaattcccaaacataaagcaggtcctgacagcctcgaagtcacataacgagtagggaggtttttctgggacgacagaggagaggctcatgtcatcccacagaaccaaacacccccacattccttcagacctctctgttcttccccattgttctcttccggaagcgagaccctgtctctacaaaaaaataaaaacttagctaggtgtggtggcatgcacctgtagcctcagctactcaggaggctgaggtgggaggatcgcttgaggctgcagtgagccatgattgtgccactgcacgccagcctgggcaacagagtgagcccctgtttcaggaaaagaaactgagagggtaggagtaaaggaatttcctaagctactgccatgtgtcaggcccactgctaggcaatttatatcatttagctcttgaatgatcctatagctttgccagtgtgtattatctcagcttac

SEQ ID NO: 38532 - DNA, 2300 bp, Homo sapien
atacctggctctgaggtgctctcagttacaagacagaggagtaaataattaccagaagatgcagtcagtgataagataaacaaaggacactgcttgccctaatgtccccactccaaaataaatgatctattcactgtcccctgaatactggcctatgcttattttttcccgctaggattttatttggccttttttctcctcctttcctgtctaaacatttcccattgttaaatgctcaggccctagtgcccctcctttgagaattctgattccaaggcaagggatctttccctcctctggagttgaatgttccattgagaaacacctactcttccagcatgtctcagcttatctgctgtgtgtgtgtgtgtgtgtgtgtgtgtgtgtgtgtgtgtgtgtgtgtgtgtgtgtgtgtgtgtgtgcgcgcgcgcgcgcgcgcgcttttgagccggagtttagctcttatcacccaggatggagtacaatggcacaatcttggctcacagcaacctccacctcctgggttcaagggattctcctgcctcagcctcctgagtagctgggactacaggcacacgccaccatgcccagccaatttttgtatatttagtagagatggggtttcgccacattagccagtctggtctcaaactcctgacctcaggtgatctgcccgccttgacctcccaaagtgctgggattacaggcataagccaccacacccggctttttttttttttttttttgagacagagtctttctccgtcgcccaagctggagtacagtggggttatctcggctcactgcaacctccctccacctcccgggttcaagcgattctcctgcctcagcctccggagtagttggggctacaggtgtacaccaccacgctgggctaatttttgtatttttagtagagatggggtttcaccatgttagccaggctggtcatgaactcctggcctcaagtgatcggcccgcctcagcctcccagagtgctgggattacaggcatgagccaccttgcctgggggtgttgtttaattttaaaaatatgtatcaggccgggcgcggtggctcacgcctgtaatctcagcactttgggaggccgaggcgggtggatcacgaggtcaggagttcgagaccagcctgaccaacgtggtgaaaccccgtctctactaaaaaaaaaatacaaaaaattagccaggtgtagtggtgcgctaatcccagctactcaggagaatgaggcaggagaaccacttgaacctgacaggcagaggttgcagtgagccaagatcgcgccactgcactccagcctgggctagagagactccgtctcaaaaaaataaataaattcatacatttaagtaataaactcattgtgagcaaggaattctactcgactttctgtctgcgtaaactctacaaatccacttggcctcagccacagtgtctttattcgtaaagcagaaacagtgggaccgtcagagcactgccgggcaggcgagagaagacaggaactgtatgaccacggaagttgttgtccctacaacctatttgctcatctggaacacagaatagtggtcctctaaagcttgcagggctggaggtcgccattatcagcagtggtgtcactaaacctgaacccaagggtctctgcaacttgggaaacgacggcccggatctgaggagatggccccttcctcccaccccgcctaaggactctcagcctccctgaccctacctttccggagctcagagtcccctctggcctccaagggcagaaggaatgggtttggctgaggtcgggggctcgggtctgggacgcgctccacctccccggctgcgcgactatggccaggctccctgtcggagcctctgcctggggccccacctggaaaaatggctcctctaaggcgcttccagcctaaagcccgtcctcttccacctcttgggtgcagactggccctcccactccgaccgcaggtcccccaccggccacacagacggctacgctagaacccagccaaacaccggggttgccaggatggtcccacagctttcctttccgactcccggaagtggccgtgatctcacgagatcccggaggcgagcgcgaccggaagtccggtcactctcgcgaggccccagagagcaggcgctgggcagtgtggaggtcgttggagtcacttccccgtcaccagctcctgtgcctgccagtcggtgcccctcccgctccagccatgctctccgccctcgcccggcctgccagcgctgctctccgccgcagcttcagcacct

SEQ ID NO: 38533 - DNA, 2300 bp, Homo sapien
gccaagatggcgccactgcactccatcctgggcaacagagtgggactctgtcaggtccatcctggccaacatggtgaaaccccatctctactaaaaacacaaaaattagctgggcacggtggtgcgcgcctgtagtcccagctattcgggaggctgaggcaggagaatcgctccaacctgggaggtggaggctgcagtgaaccgagatcacgccactgcactccagcctgtcgacagggcgaggcactgcatcaaaaaaagtaaataaaattggtaccctcttccctaacacaagcaccctacaatccccatttttcttgcatgttcatcactattttaagatactttataatgagtggggcaataagtaaaatatctagtaatttccgtgagagcagggacttctgtgttttgttcaccgctgtatttccagtacctagctcaataaatatgtcggatatctgaaggtcctaccaaaactcaacctctccctggacacccctgtcctctctttggttggctgcccctcccccacacctcatccctcctgtcctgtttactcattccctaagaccttcatcgcctccacctgtcctaagtttactcattccctaagaccttcatcgcttccacctgtcctaagtttactcattcctgtcccatatcaagtgtcacttctcacttatcttggtatcccctgcagcacccagcatagttgttggcaagcacaggtacttaatgtacttatctgtatacagctgggcccccacttcaccgcagcgcaaaagcatttggtacattcaacttacaatggggttgcctgtgggaacccattgcaagttgaaaatacacaaagttaaactcgccttttgacttaggatattaccaacttgcgatgggtatgggaagtagccatcaatccaggagcatttgtatttatttttcaaatgaactggatgtacaggaaactcgagaacttcgatgataaatttggattcccctttaaaattacctccctcttgggcgtcgtaattaaaaggcaatgcgagcacctcctgggttctcaaaattaggtttaattagattcacctggtaaaaatgcggacccccccccccccccccgcagtcttaagcttcttcaatgaacccagacgtctgttttttattagctttctggtgattctgacacactgcagagtttaagaaccaccattctagaagatggctaaaaatagcctaggctcctaggcttaagtggtcgcgggccaagtcaagcactgttaagacacctggcggcaggctcagtccgcccacagcaggagagatcctccaaaaaggttaagaggaagccgtcttcaggtcagaagcgctgaattctaatcctctggccaaatgactgtaaccctggcccagttctctagcctcggtttgtccatactatggaattaggaagtatacgatttcttttattcacgcacaactcacacggatgctgcaaggagattagctacgtcaaagcaatggaacgctgcagaaaaaaacgtaagtttactttcagatgcagagccctggtttcccaaccttgaaggcgtgcaagccaagagcaggtcctctgggaaatctgggagacctgggggaaccctgacaaatggaccggccctggagcgggactacctcgcccccttttccccggctttctcccccgcacctccaggccagtgtcagggcctgccccgggcgccacagtctccagccagtgccgggcatccctgcggtccaggctggcctggagagggtcagagctgcccgcgaaccggggacgcacgtggcccgggccggggggcctccgcctgcaggccgcccctcgtctggcctacctgggccgaggtgctgaagctgcggcggagagcagcgctggcaggccgggcgagggcggagagcatggctggagcgggaggggcaccgactggcaggcacaggagctggtgacggggaagtgactccaacgacctccacactgcccagcgcctgctctctggggcctcgcgagagtgaccggacttccggtcgcgctcgcctccgggatctcgtgagatcacggccacttccgggagtcggaaaggaaagctgtgggaccatcctggcaaccccggtgtttggctgggttctagcgtagccgtctgtgtggccggtgggggacctgcggtcggagtgggagggccagtctgcacccaagaggtggaagaggacgggctttaggctggaagcgccttagaggagccatttttccaggtggggcc

SEQ ID NO: 38534 - DNA, 2300 bp, Homo sapien
ggaggtaccacacccccaagaatctgtgaaccaggtttttgttttattttttgagacagggtctctatcccccaggctggagtgtagtggcacaatcttggatggctgcaacctctgcctcctggactcaatgatcctcccacctcagcctcccaagtaccaaacacctccacacccaatctatgttttttaaatgttttgtacagatggggtgttgccatgttgcccaggctggtcctgaactcccgggctcaagccatcctcctgcgttggcttcccaaagtgctgggattccaggcatgcaccactgcgcccggctgaaccaagtatttcttaaaacggacaataacctggtgggagtaatggtagcgagggaacagccacctgccccgatggccatggccactgaagagcccagtcctaggttggaaaatgagcctggtctgggagagggaggatcagcctcacgcacgggaaaagtaggatcagcttcatggagccgggagccaaagatccgagaggcttagcttggtggtgtataagcacacacgtgcgggcactgcacggtcaccagggacgtggggctgaagggacacagccctgctttccagaggcttgccctcaaatacaagactcctagaaatgtatgttccaatggtgcatgctaagacgggggacaaggcgactttgcagcaaacgggaacaaggcattggcctgggaggtcctggagccacgttgaaagggaatatggtgggtgagaggatgagggaggaaccagccatcggaagtttaaggattgatatgcattcttgatatgatccaggaaatttccagaatgtcaggcagccaggggtaatgacagtccacttcactgttggaggtgggggacgggatctcccaagggccaaggtaccctgtccccaactctaacagtgaagcttcaaggctgagataggactgcctaacaggactttctgtgaggacagaggagccatatgtggccatggagcatcttaaatgtggtttgtgtggcagagggatatagttttaatgttatttaaccataaatagccaaatgtagctagtggcagctatggtgcagggcaggactagggcctggggtgtgcccagccctgagagcccacgagaatgaactctgttgcctccaggacgccaggggctgcgcctctggaggtgggaggtgggatcctgcctgttgtgtccacttccgtactgcggcaatcccgggggcctctggacatacacctgcgctcacctgctcactcaaactgttttttttttttttttaaagagacagggtcttgctctgtcacgcaggctggagcgcagtggcgcaatcacagctcattgcagtcttgaactcctgggttcaagcaaccatcccacctcagcctcccaaagtgctgggatgacagccgtgagccactgtgccaggcttaaactgtctcttcgattcaagtgtctctcccattccatggaactctaaggcctggggccatgccttttgaaactctgtgacccccacacctgtaacagagtcccactaccaggccctcgggtacgtgctgccatgtctgttacagtggggcatctctaactcctcagaagcagatgtgcctgtcactcgggagtaaaacggaggccaagggtgctgcgggtgcacttcctaccatgccgcacgtataacctccaatctgccatcagaacaaaaaggcctgaagctcaagagaaatactttttggggccaaaggaagtggttctgctggctccacaatggaagcaagtcgaaagcaggctgtgcaaagcactaaggactccaggcccggcactggcaccaaaccaagccgagctcaagccacacccagcagctcagtctccgtccagcggccctagggtcaggcacctggccaggcctggactctccagggtgagctaccacgggcaacccaaaaaagtcagtgccagggaccagggccaacaacaattctgatacctcaggacttctggcactttcctcagttcttcatgtttgctaattttcccaccctttatctagtggccaacaggtaaatcctcccaggaccagttttcaggggcaaggagaaaggggaggactgggggagccccgtccaagtccagccactgagaagcccaaagaaggtgtgaacccacagtgctcttggcgagaaggaagacagcgagagccgggagacagacactggccagagtagatgcctgttgggccgagtgcctggaacccacaggaaacacaggggct

SEQ ID NO: 38535 - DNA, 2300 bp, Homo sapien
ccaaatgacatgtatatgagtaactagttgacagtgattagggctgcagtcaaggtgatcacaaagtgccatgagtgcttggccattttcactgagggaatgaggtgactgcctctgaccccaagtgtcctgccatccttttagagttaagccagacggtcagactgctgtgggcttccacaggatgtattggcgcttggcgtgtgatgtcagtggcctgtgtagatgaggtctgagacagccagttctgggggtttgttcttggccttattcatgctcttctactgtgacatccttgtgagaacccttgggagaaatttctgattttggtgtcagaatttcacctgaagaattagtttgctttcatgttttgaaccctgaattatgtgactgttttcatcttagtgatggttgctaaaaagtttagttagagacagatgtatgggctgactcttgactaatttagacatattccaggagaacatttctgtcttgtcatctgtggctctgcttcaggtctctctccatgtgtgatttttttttttttttttttttgatgtggagtctcactctgttgcccaggctggagtgcagtggtgcagtctcggctcactgcaagctccgcctcccaggttcacaccattctcctgcctcagcctcctgagtagctgggactacaggcgccagccaccacgcccagataattttgtttttgtatttttaatatagacggagtttcaccatgttagccaggatggtctcgatctcctgaccttgtgatctgcccgccttggcctcccaaagtgttgggattacaggcgtgagccaccacacccagcctaaagtttttaaagaatttttaaaatatctatcataatctgtctgtctatctatgtatctctctctctctctctatctatctatctatctgtctttactggaggtggggtctcactatgttgcccaggctggtcttgaactcctaggctcaatcgatcctctagctgcagccttccagagcactgggattacagttatttgttattctttttattttctagtctgttgtgctgaactgcatttatcttttaaatagactttaaatattctttggcagaaagtgaggaatacatacgtatgttctacatataaaatcagtaaaatcaaatacaaattatcaagcccaatgttgtaagggccatagggaaataagcgcatacacgtggttaatgacagtgtgcactgagtttctgaggagtgtggctagcaatagatacttagcactataaagttgtttattcttattaagaggttaatgccacttttggagatgtatcacagagaagtaacccaaaagaagatagtccttacaaaattatttatagctatgatgcacaacagtgaaagaggggaatcaacctaaatgcacagtggtagaggagagtcgaataagtcagttaatataatggaatgttataaagccaccaaaaatgttcagtgggttagataaatagaagtgtccataaaatacgtaaattatcaaaacatgcattaaatctatttaataatatgtagatgtagcaaaaagaatgagatggtcatggtgagactgctaggtaggaaggggtccccggaaaaactccaaccggcctgtgcagtggggtggagctccccggaaaaactccaaccggcctgtgcactggggtggaacttcaggatgtttgcactgttgatagtggggaggagcctggcacgtcttcttactgtgtaaaacccagtattctagctgctggcggaaagcactctagcagggactctggccttgtgagagtcccaataaaaccctgtcttactcactattcaaaccgtctgcgagcctaaatttttgtggccttgagacggacaaggaccccatctttagctgaactaaggaaaaatcctgcaacagtggatattggaaataatattaatggatagattttactctcctgaaggattaatataatctgtgagtacttttaggcttactgccagtacaaggagtggcttacttactaccggtacaaggagtatatatactctcttgagcttttctgtctgtttggctatttcagtgcctccagaaagggttgagaagataatggatcagattgaaaagtacatcatgactcatctctgtaaatatgcgttctgtccagaaccccagtgagcctggaagactgggtgctatgggaaatgtcatcaatccaatgctagtgaaagatgtgactggggaatgctgaaaaatgcgcacccctggg

SEQ ID NO: 38536 - DNA, 2300 bp, Homo sapien
tctgactccatcttccccactgacaggataattttctctccagttcctgtagctttttataaatatatatatatatacacatacatatatatatgtatatatatacatatatatgtatatatatatacatatacatatatatacatatatatgtatatatatacatatatatgtatatatatacatatacatatatatacatatatacatatatatatatataaaatacctttagccattataatactcatgtcctattacaattacctgcttacatgtccaccccatgctcttagccacttagcacagtgccaggaactgagaaggtgctcaacagatgttttctaggtttctcaaatgattcaacagaagactgacaaagtacctgcagagacagtgttctctcacttttgtcccttacacactctccagggtccagtgaaggtgggagtaaaaaattagcaaacaactaacttgacaagcagtagttctcagacttgaatgcacatcaatatcacttggaagactagttaaaacacagagtactgggtcccaccccagagtttctgattcagttggcctgggatagggcctgagaatttgaatttaacaagtttccaggtgatactgccaggaactacctttgagaaccactgctgtaaagaaaacaccacaattatgaaaatgcccatttcttctcatgactttactcctaatgggagactcccttttctgaatatgagggaatatcattccatgacagaagaagattatcccatggcagaaggcagaaggacaagagagtgcgagaaagcaagagggcaacaggggctgaactctcttttacaataagcccactcttgtgattactaatctattaccaaaataacattaattcattcatgagggctctcttattaggccccacatcccaactgttgaagattgagtttccagcacataaactttggaggacacatttaaactacagcagagcttttatgtaaattcaaccaacaggagatgggaaaatcaaaggcatgagaaagacagcaaggacaagcagagaagtatgtgcaggttaagggaaaaagtcacaatcaatcctgtagtgcagactactttatcaaaagcacctaaaaaagatctcagtaactcacccaactcatctccacccacatctaaagagccacacacagcaccaccaaaggcagcacaatgagaacagcgttctcctcaacagataagctgtgagtatccagacagacacccgaccttaacagctccagaacagccccaagacagctcctccctaaccaccactcaagtaaccagctgggaaagtattcagaaaacccacatcctgacacaccactaccaaacaacttaaacagcaaagaacaacccatttaaacagcaatgccagctgccaggaaaagtagggacaataagtagaggaaaagcagactccttggggtccgccaagacccagtctctcagcatcagcactttcaaatgtagaatccacacacccctggggcctgcggagctccacaaggcatgtcctcaaagataaatgagcaggcaaactggacagaaaaccactcagggtattactctttaaaatatctttacagggtcaaagacgaatgggtctacaggctatgtgcattcccaacagattctgagaatgatgtcactatccctttcaagatgtgtttaacactttgaggacacctgtattcctgccactgagcgctactgctttgctaatttgaactgattccagctcacgctgatcccagctccctagatctggtcaccattagccaagattgtcatccatattgtaacctttcaaagagtcctaaaagcagttcttctcctactcttccgagacaagtaaaaatatctgccaaagaaatgaagaaaaaagattcagagagagaatagaattaacatactaccaagagagcaaaaagtgaaggaagaggaaaaactaggaaaatcatatgtgggctcacacctatttccaaagctgagctaatatccttttgcttgtgtctaaatgaggcaccaattttaaactgctactgaaaaaaaaaagagagagagagaaagaaagaagcaggcccaggcccagtggctcacacctgtaatcccagcactttgggagaccaaggcgggtggctcacccaaggtcaggagttaaagaccagcttgtccaacatagtgaaaccccatctctactaaaaattttaaaaaattagccagatgtggtggtgcatgcctataatctc

SEQ ID NO: 38537 - DNA, 2300 bp, Homo sapien
tccagcctgggtgacaagagtgaaactccatctcaaaaaaataaaaacagatgcacagacacagacccacgggggcacatacacacataaacccatacaaagactcacaacaaacatacactcagaccaagggatgcctcttggtgtcatgcaaatgcttcctaaaatctacaccccaggcacctgatgtgcctcaccactgttccctcaagtcagggctgctgtggcacttccagtcctgcctcctgacacagccatggagacaccaatggtgagcttgaaacaggggactccatgttcctggtttctaatgtctctatttagggaaggtctctggtctcccaacgtctctaactctgaatttccttcacttagcctgctcactgaaagggggccaggagctgtgggaggaacagaccaaggtcacacagagagtaacccaatggtgacttgaactgtggaacccagactcccaacccagcaacatgaaaggctcagcatttccattctcaaaatcctctccccctggccaggcacagtggttcatgcttgtaatctcagcactctgagaagctgaggaagggaaggaggatggcttcagcccaggagtttgaggttgcagtaagatatgatcacaccactgcagtccagcctgggcaacagagcgagaccctgtctcaaaaaaaaaaaaaaaaaaaaaaaaggtctggtgtagcagctcatgcctgtaatcccaatactttgagaggccaaggcaggaggattgcttgagtccaggagttcaaggacagcctaggcaacataatcaaaccctatctctatcaaaaatttaaagttttttgttgttgttgtttttgtttttttgttttgtttttgtttttgagacaaattgaggctctgtcacctaggatggagtgcaatggagcaatcttggttcactgcaaccttcgcttctcaggctcaagccttcctcccacttcagcctcccaagtagctgggaccacaggtgcatgcatgccaccacatctggcaaatttttgtatttttcatagagacagggtttcctcatgttggcctggctggtctcaaactcctgagctcagtgatttcccacctcagcctcctaaaatgttaggattacagatgtgagccactgcatccagccaaaattttaaaatttaaaaaaataatttaaaatctcctgtctccattaggatgtctctcacactacaccctcctttttttttttttaaatttttgagatggtgtcaaaaaatgacagcctctgtcattcaggctggagtgcagtggcgccaccataggtcactgcagcctcaaattcctgggctccagcgatcctcccacctcacctccctggtgccttttattttattttattttattttatttttgaccctaagtcttgctcttgtcgcccagtctggagtgcaatggtgcgatcttggctcactgcaactccgcctcccagattcaagcgattctcctgcctcagcctcccaagtagctgagtagttgggattacaggtgcctgcgaccacgcctggctaatttttgtatttttagtagagactgggtttcaccatgttggccaggctggtctcgaattcctggcctcaagtgatcctcccgcctcagtctcccaaagtgctgggattataggcgtgagccaccgcgcccagcccctggtgccttctttaacactgggtgggaagagagtgtcctggcgaggcctctgcacaccgactgcatttcccagatccaaactaataacctcccttgccccaggcgccttccagggctgacatgcctcctctcgcaagtgggggaaacagatgtccccgggggctggggataggggcgggggtgtggggaggtgaggggcgaggggaagggggggaggggggcgaagggggcggggaggagggggagccggccgggagacggcccggcccagccgcccgggctgttgcctccgctgcgggcgttcctccaggcctgcggagggcgctgcgggcgcggggctgggccgctctggctggcgggcgagcagagaggcgcctcggtggcggtgcgctgtccagcatttcagcaagcggcggcagcacccgcggggaggcagagggtgcggggccgtgggggccgcggagctgccctgcccaactcagcccagactaggcggcagcccggaccggcgggacccgagggcctggccccagcgcccggtagatcgcggcggtcagcggtgaggtgagagcgcctgtggggcgggggcatatccc

SEQ ID NO: 38538 - DNA, 2300 bp, Homo sapien
catttctgtgttccttagtatggctttgttttggggtcagaaggactgaagggatctggtggcaccagggaggatggggctgaggattggggttgggtgagacctttgagggctaaccagaagcttctcaggcctttcatcaaaggtagagggtgctgggttggggggcttgccccagagggctggatgggatgtgacaggaagctgtgggagttgggagggggcagccctgcagatggatccagagatgtcattcaaaagcagggagattggccaggcacggtggctcacatctgtaatcccagcactttggagggctgaggtgggcagatcacttgaggccaggagttcgagaccagcctggccaacatggtgaaatcctgtttctactaaaacaaacaaacaaacaaacaaaaaatagccagacgtggtggcaggctactgtaatcccagctacctgggaggctgaggcatgagaattgcttgaacctgcaaggtggaggttgcagtgagctgagattgtgccactgcacaccagcctgggcaacagagcgggactctgtctcaagacaaaaaaaaaaaaaaaaaaaaaaaaaaaagcagggacatcatgcccttgggaaagcatttctttcctaaacccctggtgagctggcctagggctgggccagtctgggagcacacggaggaagggggcacaggaggtatgattatcaggccacaccccaatactcaagggaatgagtattgggcatgtcccaagtccagtaccaaaagacaagagcaaatcaccatttctatctggcccagacctaaggcttgaggctgccacacctgcaaacagcaacccctgccttttttttttttttttttttcctgagacggagtttcactcttattgcccaggctggagtgcaaaggcgcgatctcagcttacgcaacctccgcctcccaggttcaagcgattctcttgcctcagcctccctagtagctgggattataggcacacaccaccacgcctggctaattttgtatttttagtagagactgggtttctccatgttggtcaggctggtctcaaactcctgacttcaagtgatccactggcctcagcctcccaaagtgctgagattaaaggtgtgagccaccatgcccggctatagcaccccactttatctggggccagccacacttctgtggccctcccagactgggcagcatttgcgacccagggaggtgttcacgggccaggacttccaggaggaggaaggccggagctttggctgagtgaaagggacaaaggggtggagtaggatggaaaagtccccgccagccatggggcttaggccctagagtggaacaaatctcagatccacacctgagtatacccaggctccagggcacgaaggccacaccctccccgggccacaccatcactgtggtctctgctctctgcagatctcgaagctccaagtgcaaaagaaaagagaagaacaaagagaagaagaggtaagcgccctccctactctccagccccccattcgttctccctcccgccccagcaaactacgccttttagaatcacagaatcaggccattaaaggtagctcattttgcccagatggaaaaattaagatctagaaagaaagccaagggctcttgctgagtcagagcttgaaccaaaacccaggcctcttgccttccaatccagggtcctcccaagcccagtcctcgtgactcccaccctccttcctcccaccccacaagtcccaggatcacctgctgagggctgaggggggtcttgggaggctggggttgtctagagaaaagggggccttttactaattctcacagatgacccatatggaccagataggctctgcagccagcaccaacactgctgatgtaccttttataggagactttaggggactgatgaacactggctttcagtagggttccactgggatcctggtgggaggctgggcaacttgggggctggggggatcacggggggcagaattgaggtacaggctgatttcccccatccacgccaggcctcacacagagtccccaggccggaggtctcatcgccatagcagtggcagctcccacagcccctccctctcctcccactacagtgattccagatctcccagcaggtaggcctgggcctctgggaggctttctcctggtgggggatgagggttgcagattaaacacccccaagggctggggagcagggctggtggacagaatgtcaattcatcggtgggtagaagtttatcaggggtagccag

SEQ ID NO: 38539 - DNA, 2300 bp, Homo sapien
atcgggggggcaatgccagccccgatgcctgtcctggagcccctccccctttggcccccgccccccaccgctccgtccctcttgtgttttgcatgccaagaaccctgcatgagctgcactgttgaggccagaaggtggacacccaggagaggcagaggcagggcaggcgcggggaaccgtgtgtgcgatgctccgggactggcagcccccggctcgggcccggtgaaagccctctctccttctctccccccaccccacccgcccgctctctcaccccaacttctcgctcctcttgctctgtcctctctctgcccccactcttgtcccctgcctgtctggattttttctgtttctcgaacttctccctggcttccatccttctctctcttcgctctttctctcttcctctctctctcttctcttcccccacccccgtctctcctctgtctcttcttctcactgtctctgtccccttctctcttgcccccttttttccttctcctccctctctcctcccttgctctctcctctcaccctcgctctttcgccctctctctttctcatctctctccctctcactctgtctctctcctgctctttttctctcttcctctttctcttctctgcctcctccctctctccctctttctttcttctctctgtctttcctctctccctctctcctgtctctcttcattctctctctccgtctctttttctctgtctctcgctctttttctgtctctctgtctctctctctctcctctctttctgtctctgtctctccctctttcctctttctgtctctgtctctgtctctttctttcaatctctctctcccgtctgtctcctctcttctctctctgtctctgtctctctcgtctccctctcccccctccgtgccctgtctgcctctctccccgtcagaagcccagctcgccctcgcccagggtccgtgacaaggcggcggccgccgcacccacgccgcccgcgcgggggaaggagagcccgagcccgcgctcggcgccgtcgtcccaaggtcgcggaggccgcgcggcgggcggggcgggcaggcggcggcggcggcggcgtaggcggcggcgctcgcggtcctcggcgtccgcgccccgccgcaggggtcgccggcgcccccggcccgcgcccccccggggctcgtcgcgctcgctcagcagggcccgctccagcagcgactccggcagcggccgcggcgcccccggccccgggcccgagcccggctctgagcgaggccacggcggacacgggaaacggtgagcgtgctggacccggagctggactcccgcccccaccccgcacagggctcccctccactagcggatccctgcccacgggatccctccccgcgctgagctaccctccagggatcccaaccccctcccaccgagctacccccatggattccacccccccatgagctaccccccacggatcccaacccctcctcactgaactaccccccacggatctcaaccccccacggagctctcctccctctccacggaccccaaacccctatggaccccatggatcctcccatggatttcctccgcacactgatctcaactcccctctcacagggctccctccctcgacgaccccaactctctctagggagttaccctccctccactgacctccaaactccagggagtttccctccccacactgatcccagccccccgacggagttctccctccactgatgccaaccccccagggagctccctccccaccctgagctacccccggttatcctgacccctccccacaactgatccgtctccccttactgatcactgcccccagggaaccccctctcctcccatgaggctccccgcttactgatcactctccccccatcccgcagaacaatctcctccactgatctcccccaacacgccccctcacggggctccccctgaactgacccctgcccctcactaggctccgcgttcactgcgcactccgcgcgaactgaccacaaactacacggaccccgcccctccgccctaagccccgccccagggaaccctccccgcccccagccccctttccgggtcgctgagccctatcccgcgccgtctccctcctccagggccaaggagcggcccccgcgcgcgcggcccgccagcacctctccgtccccgggcgcgcacggccggcgcggcggcccagaagggaagagctcgtcgcgcagccccggcccgcacccccgctcctggagctccagccgctcgccctccaaatctcgctcgcgctct

SEQ ID NO: 38540 - DNA, 2300 bp, Homo sapien
cacctaagccatatggtctagcctactgctcctaggctacaaacctctacagcatatgactgcaccaaatattgaaggcagctgcaacatgagggtaagtattagtgtttctaaagatagaagatggccaggcgcggtggctcacgcctgtaatcctagcactttgggaggcccaggcgggtggattacttgaggtcaggagttcaagaccagcctggcgaacatggtgaaaccccatctgtactaaaaatacaaaaattagccagtgtcgcggcacttgcctgtagtcccagctactcaggaggctgaggcagaagaatcacttgaacctgggaggtagaggttggagtgagcctagatcaggccactgcactccagcctgggcgacagagggagactccatctcaaaataaataaataaataaataaataaaacatagaagatgtacagtaaaaacacggtaattgtttttgtttgtttgttttgagacagggtcttgttctgtcatgcggactggagtgcagtggcaccatcaggctcactgcagcctcgacctccttggctcaagtgctcctcccacctcagcctcctgagtatctgggactacaggtccacgccaccatgcctggctaatttgttctgaattttagtagagatggggtctcactgtgttgcccaggcttgttccagccttctggcttcaagtaatcctcccacatcagcctcccaaagtgctaagattacagatgtcagccactgcacccagccagtaatataattttatgggaccaccttcatatttgctgtcccttgctgacttacacatctttatgcaatgcatgactgttaccatcattatcatctctattttccagatggggaaactgaggcacaaagaatctaacttgcacaagttcatctgcttagtgatggaacaaagatgtgaattcaggcagtctggcttcaaagtccacacgcctaacaaccacaccagattactagattgcttttttcttttttctttttttttttttgagatggagtctcactctgtcacccaggctggagtacagtggtgagatctcggctcactgcaacctctgccttctgggttcaagcaattctcctgcctcagcctccccagcagctgcgattacaggcgcccgccaccacacccagctaatttttgtatttttagtagagatggggtttcaccatgttggccaggctggtctcaaactcctgacctctggtgatcctcccacctcggtctcccaaagtgctgggattacaggcgtgagccaccacgcccagcccagactgctttatttttgtatttgtatttattcatttacttattttgagacagggttttgctctgtagcccaggctgaagtgcagtggtgcaatccagctcaccacagcctctactcaccggggttcaaaggatcctcctgcttcagcctctggagtagctggggccacaggcatgcaccaccatgcccagctaatttttaaatattttttggtagaagtagggtctcactatgttgcccagactggtctcaaactcctagcctcaagggacccttctgccttggcctcccaaagtgctgagattacaggcatgagccatgcacccagcccctttttaaaatttttttgagagacaagactttgatctgttgcctaggctggagtgcagtggtgagatcatagctcactgcagcctcaactcctgggctcaagcaccagactccttttatcacattctatctcacacgcgtgtggttccaatcctgcctctgccacttctcagttgtatgccccaacccaacctgtctggctctgtcctccttaacagaaggacggccctggccacgggccacagccagcaacgcttaagcaccagggccggcgagtgccctgccgtggcacggctccagcgtcgcgctctcgaattcatttgctttccttaacgagagaaggttccagatgagggctgaaccctcttcgccccgcccacggcccctgaacgctgggggaggagtgcatggggaggggcggccctcaaacgggtcattgccattaatagagacctcaaacaccgcctgctaaaaatacccgactggaggagcataaaagcgcagccgagcccagcgccccgcacttttctgagcagacgtccagagcagagtcagccagcatgaccgagcgccgcgtccccttctcgctcctgcggggccccagctgggaccccttccgcgactggtacccgcatagccgcctcttcgaccag

SEQ ID NO: 38541 - DNA, 2300 bp, Homo sapien
cacccctgctgccgccactggctgtgcctcccccgccacctgtgtgttcttttgatacatttatcttctgtttttctcaaataaagttcaaagcaaccacctgtcactggcccaggccctggtgtttgtggaaggaagcctcaggcacctgccatttgctggctttcaggagtcatctttgctcaggcccgtgctgggccatgtgggtacactggtgtaggttgctggacacaggctgactcacatccataaagacagaggtcttagggccgggcgcagtggctcatacctacaatcccagcactttggggggttgaagcaggaggagtgcttgaagccaagagttctagaccagcctggacaacatagtaagactgtctctaaaaaataaaaattaggcagggtggtactgcacgcctgtagtcccagctactcaggaggctgaggcaggaggatcgcttgagcccaggagttgtgaagggtacagtgagctaacatcgtgccattgcactccagcctgggcaacagaacaagatcctgtctcaaaacaaccaaaagcccagagagaaagagtgagaccccatctttaaaagaaaaaaaaaaaaggtcatgattgcaaggtcacgattgcaattaaaactgtaaggtggggaaggaggaggaaataagagaagcacctgaggcttgagttctcaggagcacctaggttgggtcccaggtgaaggggcacagaggtaattgcacctcagagctgatgggaggattactatgtcaaaagcttggcatcggcttcagcacaccccaaggacaccacagtggacctggcaagctttgagatctctgtcaccgccacactccctgaggccagggcatccctgttggcagtcacaagggaactggcaagccgaaatggggtgagaacggagcccgcagagtctcggggtggggagattgggcagagccctggccaaccgacgggctcagacctgtgctgctggctgggccagcagctcttgttgcctgtgtttatttccagctggcctccctccaggtgtagacaggcttccaagggcccagttcccctctctcttgtctgcccttgccctagctgccaccctctcaccaggcccagggaaagttgaggtagaaagcagatgggggaccaggcgcggtggctcacacctataatcccagcactttgggaggccgaggcgggtggattacctgaggacaggagttcgagacagcctggccaacagtgaaactccgtctctactaaaagtacaaaaattagccgggcatggtgttgcatgcctgtaattccagctactcaggaggctgaggcaggggaatcgcttgaacccaggaggcagaagttgcagtgagccaagatccatgccactgccctccagcttgggggacaagagcaaaactccatctaaaaaaaaaaaacaaaaaacagatgggagctttggagctcagtcccaaggtcctcaaatatttgagggacccagagtctgaggctgtagcaagatactcccatgttcaaggcggagcatgcagtgagccgagatcgtgccactgcactccagcctgggcgacagaggaagactccgtctcagaagaaaaaaaaaaaaaaaaaaaaaaaaaaaaaaatactcccatgttcttttctcagcccacagtctgactttcccaggttccctaagaagggtggcaccctgcaggcgagggcctggagcatgtccacaccacccccaatatcaccccccaccaccttgctgcttttttgagaccaagttttgctcttgttgcccaggctggagtgcaatggcgtgatctcggctcactgcaacctccgcctcccaggttcaagcgattctcctgcctcagcctccagagtagctgggattataggcgtgcgccaccctacccggctaatttttgtatttttagtagagacagggtttttctatgttggtcaggtgggtctcgaactcccaacctcaggtgatctgcccgcctcagcctcccaaagtgctgggattacaggcgtgagccaccacgcccggccccagcttcttttttagggacagtctcctactgtcatacaggctggcgtgcagtagtgggatcttggtgcaccataccaaagtgttgcagcctggaactcctaggctcaaggcatctccaggagcgcgccacaagcctggctgattttttttttttttttggtagacagagtctcgctatgttgcccaggctggtctcaaactcctgagctcaagccatcctcctgc

SEQ ID NO: 38542 - DNA, 2300 bp, Homo sapien
agagtctgcaaagctcactttttttttgttttgttttttgatatggagtttcgctcttgttgcccaggctgaagtgcaatgaaacgatctcggctcactgcaacctccacctcccaggttcaagcaattctcctgcctcagcctcccaagtagctgggattacaggtgcccaccaccacacccagctaatttttgtatttttagttgagatggggttttgctacgttagccaggctggtctcgaactcctgacctcagatgatccacccgcttcggcctcccaaagtgttgggattacaggtgtgagtcaccgtgccaggccaaagctcacttctttttttttttcgagacggagtctcgctctgtcacccatgctggagtgcagtagagggatctcagctcactgcaacctccgactcccgggttcaagtgattctcctgcctcagcctcccgagtagctgggataacaggtgggcaccaccacgcccagctagttcttttgtattttttgtagagacagggtttcaccatgttggccaggatggtctcgatctcctgaccttgtcatccgcccgcctcggtctcccaaagtgctgggattacaggtgtgagtcaccgtgcccagcctttaaaaaactttttattttattatttgtttttgaaacggagtcttgctctgtcgccagactggagtgcagtggcgcaatctcagctcactgcaacctcaaaactcactccttactgacttctagcatactgtacatatctcacctattttcttgggcagggatttttgtctgttttgttcactactgtacctcgtggcttagaatagggcttggaacacagtagcttctcatagataattgttgaatacataaagtaaataaaatgtgcagtcaaaactatcaggcctgcaggcatggtggctcacatctgtaatcccagcaccttgggaggccgaggcgtgaggatcgcttgagcccaggagttcgagaccagcatgggcaacaaagctagacccccgtctctacaaaaaagcaaaacaaagcaaaaaaacccatgctatctgcaagctatgtggaataatatgaacgagaatatatcagcgtgacctcagtaggtatgtatgtcttaggaggggagagaagggctggacaaccaagccctagacgcagcccagttagatgtggagtaggctcctggtagctgaactcaatctttagcactccaccctggagaggaagaaggggttctccagggtcagccagcagacagctgcatcctttctggaaatcaaccactgtggccagccggtatttgtcgttcgtccatgttttcacctattcaggcccaagagcctcaaggtggggtggggggtttaatggaagctcgtagggggtggaggtgacagtccccagggtctggccccttaattcggccatcccgcgggcaggcaccacactgagagtctggatctacaatggacgcgcctcctgtccttcccccaccacgacctgctacgtgatctcggaaacagggtctaggactgaggcccctgccccctcctctcgtaatttcccggagaatatggggcggggcggtgaatcagcactcgcagggactgatgcagccctgatccccgccaggggtccccagcggcctcgggattcgaagcacccccccccgtcctcctgcgcctgcgcgctatgtccgctgggagttgtagtcttgaccgcccctttgtccttggtctcctcagcgcctcagtgcactgcaggttacactacaactcccaggggcccatgcgtccgagggctggcggggcgggaggctcaagggggaggcgtaagggggcgactggagaagctggggtgagggaactggggagtgaagtgaaaaaaggggagagtgggggcgcagtgggaaaggacggggtgcccggaagacgcgcagtgagcccagctggggagcggggagttctagccgcggccgggctcgggcggggcatgggcggggcttgcggacgggtgggcggggcctgccttcgtcatgcggcgtgggcggggccgcagggggttgtccgtcagtggcacgcacagcagccgcagccgcctcgcgcccggtcccgcggtcgcagctccagccgcctcctccgcgcagccgccgcctcagctgctcgctctgtgggtcggtcctctccggcacttgggctccagtcgcgccctccaagcccttcaggccgccccagtgtcctcctccttctccggccagacccagccccgcgaagatggtggac

SEQ ID NO: 38543 - DNA, 2300 bp, Homo sapien
ctactcaggaagctgaggcaggggaatcgcttgaacctgggaggcggaggttgcagtgagcggagatcgcaccattgcactccagcctgggtaacaagagcgaaactccatctcaaaaaaaagaaaagaggaggataatgagaactcaggcctgtgtatggtcctccctgatgggcaaggccttctgtactccatgtctgttggacacagaggacttctgatgagaacatgggacattagagagaaatgaaagcgtgtctgttgacagccctgtataaactgaagtgtacacctcacagcacaagtgaattacaaccactatcaaagtggggacaggcctccttggaaccccgctgcggctgggccaccagccctggaagtaacatctattctctcctccaggcagaccctcctatcctcccctgacagcccatggctgaccagagaccagaatctcagcctctgaccctgcccccttctctcctgccctaggcctgggtcccccaacgctcacagcactgccatcctcagccacaagagaggactgggcttggcagacagatccgtccggtaaagagctcagccctccaggcgggaatggtaggggtatggtgggtgcggctgggaactgggaagaatgttctggattcacaggcgggggccctggctaacaggccagggctttggccagatggtgcagaggtgggtgagacaattatgagcagacggagcaaggatgatgaaactcagagctctgaaaacttcagcggggtgggaggaggcagtaagagatttcttcaaagcacagaagtaaaatttgggatgtgggcggtggctcactcctataatcccagcactttgggaaacaggcaggaggatctgttgaggtcagttaaagaccatcctgggcaacgtagctagaccctgtctctaaatataaataaataaataaatatcttatatatattatatatatcttatatataatatatatcatatatattatacacatattttatatatttatatatatcatatatattatacatattttatatatatatatatatatattatacatacatatatttaaattgccaggcatagtggctcatgcctgtaatcccagcactttgggaggctgaggcaggtggatcacttgatgttgggagttcaagaccagcctggccaacatggtgaaatcccatccctactaaaaatacaaaaattaaaaataaataaataaaaatacaaaaattagccgggcgcctgtaatcccagctacttggaaggctgaggcaggagaattgcttaagcctggcaggcagaggttgcaaagagctgagattgcgccactgcaccacagtctgggcgagacagagcgaaactctgtatcaaaaaaaaaaaaaaaaaattagctgggcatggtgggtcgcaccagtcctagcactttggaataccgaggcaggaggatcacttgaggccaggagttctaggctgcagtgagctatgatcgcaccactgcactccagcctgggcgacagagcaagaccctgtctcgaaattaaaaaaacttttttttcaatgggatgatgctgagattgggaattgagagaccttatgagggggtcgattgagatgaaggttgagtcaaggttagcagtgcaattggaattaggataggaactatccctgggcctgaagttaggataatacctagaattagctttcggttcattcaaccaagtttcccggagatcccaacccgcgccagacaacgtggtgactctggggttgcagctgagtgggggtacgggtgtggtagggttgggggtcttggtaggcgtccccgtgccctgctgcaggacagaaggcctcctcgtccccttcgaacgccctagatgccctgtctccacagctacaggagttggcccccagccttcccgggagacagcactgctcaccaccgccgcctgggccgcggggaagaaaagtaagtggcggtgcctgggtctgcgggggatggggaagggtagggctggggctctgccgggagccggcagccccagcccagcccctctggccgcgggcctgtgcgccccgcaggtggacggctgcgactggtgggcggcccgggtccgtgccgcggccgcgtggaggtgttgcacgccgggggctggggcaccgtgtgcgacgatgactgggactttgcggacgcgcgcgtggcctgccgcgaagcgggctgcgggcctgcgctgggcgctacgggactgggccacttcggctacggccgcggcccc

SEQ ID NO: 38544 - DNA, 2300 bp, Homo sapien
agaatagatgttacttccagggctggtggcccagccgcagcggggttccaaggaggcctgtccccactttgatagtggttgtaattcacttgtgctgtgaggtgtacacttcagtttatacagggctgtcaacagacacgctttcatttctctctaatgtcccatgttctcatcagaagtcctctgtgtccaacagacatggagtacagaaggccttgcccatcagggaggaccatacacaggcctgagttctcattatcctcctcttttcttttttttgagatggagtttcgctcttgttacccaggctggagtgcaatggtgcgatctccgctcactgcaacctccgcctcccaggttcaagcgattcccctgcctcagcttcctgagtagctgggattacaggcgcctgccagcacgcctggctaatttttgtattttttttagtagagatggggtttcaccatgctggctaggctggtctcaaacacccgacctcaggcgatccgcccatctcggcctcccaaagtgctgggattataggcgtgagccaccgcgcccagcccattatccccctcttacagagaaaacagggctagcagggcaagggccatgcccagggttagcaggggctctgtcagggctcactgagacagacttctgccctcctacagcccctcttaaagtgaaaaaacaaaaaacaaaaaaacaactaatctcttgagtggggaatggggcaggagggaggactcactcgactcaggaggtggagctcagataccgggccaaattgaggactagctaaaacagggatggggtgggagtgcctctccatgagatacgcccactcgtatgccatgtcagtttaccattgccgtggcaacacctggagttacctttccatggcaacgcagacaacccaaaaattactattctagttcttaaaatatctgcataatccaccccctaatttgcatatacttgaaagtaaatagaattacgactgcagacctgcctctcagctgctactctgggcacactgcctatggggtagccctgctcagcaaggagcaggacctctgctgctgctgtgcattgccgcgtcaatgaaagctgctaacaccagctggcccttaaattctttgctgagggaagccaaaaaccctcctggactaagcctcgatttgggggcttgcctgccttgcattaactgtgtgaccatgggcaaggctctgactctctgggcctcagctttcccacctatacactgggaatgatagcccttagtttgctatgagttatgagttgtgggcaaccactttatctcttacagagcagagtccatctgtgaaatagcattattggccctattattcctctttgctgagaaaccctcccaaattggagagggcctaggtggggagaaaatactattattagagcatcaggatgacagaggggtgtgctaggtaatgctgtgagcatcagagaatgctggaatatctctggggcaattctagagtgttactccgagtgttatcctagagtgttactctaaagtggtccaggaacagtacttgctggaacattctggaggcattcttgggatattgctatagaattctcgagtattggtgaagcaatagtacagtttttttgtttgtttgttttgagatggagtctgtctctgtcaccctggctggagtgcagtggcgtcagctcggctcactgcaacctccacctcctgggttcaagcgattctcctgcctcagcctcccgagtctctgggattacaagcatgcaccaccacgcccggctaatttttgccatgttggccagactggattagtgcaatattgtttcatagccatggagtgtaccacaaggagttctgggatattcggaggcacttctagaacaggactgagatagaagtaattttggatgctgcctggagagctctggggagcatcaagacagccaaaacaccctccccatccacctccccaccgaagcctcctcctccagcattgccacagggccccgcccacctgccccggccccgcccatcgcccctagagcccgcacctgcgcagagcgcgcccgcgtcctcgtggtggccgcagttgtgcacaccccagcccaggctctggcaggctgccaggcggggctcgccgccttcgcagtgcacgttgtccagcaggatgtgtccggtgccatagccgaagaaggcgttggtggtggcggccatggccgccccgcagcccagctgacgacagaccacagcggcatccggcagc

SEQ ID NO: 38545 - DNA, 2300 bp, Homo sapien
ccaggagtacaattgctagttcatatggtgaatgtacatttagatttttaagacactgtcagactatatttcagagtatctggaccattttacattcccatcagcaatgtgtgaggaacccagtttctccatatcctcactagcatttgatatcaccaactatttttttttcaaccattctcataggtgggtggcaataactcatcatcgttctttttttttcccctaaaacagggtctctctctgtcacccaggctggagtgcagtggcacaatcatagctcactgcaggctcaacctcccaggctcaagtcatcctcccacctcagccttgcaagtaactgactacagcccagtgcgcaccatcatgcccggctatgtttctaattttttatagagatggggtctccctatgttgcccaggctggtcttgagctcttggtctcaagcgatcctcctgcctttgcttccggaagtgttgggattacaggcatgagccactactcctggccactgtttgctttaatgggaaagacgagagcttgcttaggaaccgaaaaatctgattgggaaggagcagctgaacatggaagacagatagatgtgcagatggagggaaagaggtccctgagatgacggaaggaatggaatctggacttcagggaaggggcttccccaggccaggggaggagggagggaggaaggacaggtgcgggcagcaggggcgtggagattttgcagcatggtgatggcagccttccatcaagtattttcttttcttttttttttttttttttcttttgagatggagtcttgctctgttgcccaggctggagtgcagtggtgcgatctcagctcactgcaacctccacctcccgggttcaggcgattctcccacctcagcctctcgagtagctgggattacaggcacccgccaccacacctgactaatttttgtatttttagtagagacggggtttcaccatgtcagccaggctggtctcgaactcctgacctcaagtgatctgcccacctcagcctcccaaagtgctgggattacaggtatgagccacctcgcctggtacatctagtactttctttttccaagaaataggaaacagcatcatgaccaggagtcaggaaattaagtcctgccgggcccacactcatgccacctgttttcctcccttggcctcagtcttcccagcctcaccataaaaagctgggactggtccccaatttgtttgatcctcaggagcttctcaacattttttttttttggccagtgcagtggctcatgcctgtaatcccaacactttggaaggctgaggcaggagaatcccttgaactcggggagacggacgttgctgtgagctgagatcacaccattgcactccagcctgggcaacaagagcgaaactccatctcaaaaaaaaaaaaaagaactacacaagaaggcaaaattaggctgggtgcggtggctcacacctgtaaacccagcactttgggaggccgaggcaggcggatcccttgaggtcaggatttcaaggccatcctggccaacatggagaaacccagtctctactaaaaatacaaaattagcctggcatggtggtgcatgcctgtaatcccaggtactcgggcgctgaggcacgagaattgattaagcctgggaggcggaggatgcagggagccgaaatcgtgccattgcactccagcagcctgggtgacagagagagactctgtctgaaaaaaaagaaaaaagaaaaaaaaagaaggcaaaatcagcagcccccaagtgaggttgtgaggtcctgtctatgtgggaaacccactccatacactgtggctcctgggaccatttccaaaccctcagctgagatgtgggtcgggacatcatcaggcgggactcctgggctggatcagggctacctccaaagatcaggatgcttggctgccctgcaaaggggtggagacctatccaggccttcctgaaacctgaaccctggggtgggggggctgtggggggaggaggggctgcctggccttgagagtccatgcctcccccaaccacatagctccgcctccacctgggtgccctttttctggggccgctccagctggtgccggccacctccactcccctttgcttcttgctgtccctaaggtcggatggggacaggctggggccaccagccagctccatggacagggactttgcctctgctcaccttccagctgtggaaagaaaagaagaaacgcctgtgttgatttccatttggaagatccttcctcctccta

SEQ ID NO: 38546 - DNA, 2300 bp, Homo sapien
ttttcctggggagggaggccagagagctgcaggagttacttgaggaattattccagtttagaggctcacaaacatgtcttagatttacttggggagccaggtgcctggctccccccccttctgtgaaatgggctttaataggttagaagctgataagtggtatttttttgttgttgtttttgttttttgagacagttttgctcttattgcccaggctggagtgcaatggcgcctataatcccagcactttgggaggctgagatgggaggatcacttgggcccgggagtttaaggccaccctgggcaacataatgagacccccttctctaccaaacaccacacacacacacacacacacacacacacacacaatagggtgtggtggcgcctgcctttagtctcagctacttgggaggctgaagtgggaggattgcttaaacccatgatttggaggctgcagtgagctacgattgtgccactgcattccagcctggaaggcagagcaagaccctcttttattaaccccacctgtggagcttctaaaaatcctgatgtccaggctgctaaaatagaaaggatgtgggaccagctgtgggtaataaggatctcaggtgactccaatgaggagcaaagcctgcaaactccttcctctggtgtggtgtttcccagttttgcccggtgagaatcacctgcggctggccgtgcgcagtggctcacgcctgtaatcccagcactttgggaggccgaggcgggtgaatcacgaggtcaggagttcaagaccagcctggccacgatggtgaaacctcatctctactaaaaatacaaagaagttagccgggtgtggtggcgggcacctgtaatcccagctactcaggagtctgaggcagagaattgcttgaacccgggaggcgtaggttgcagtgagttgagatcgtgccactgcactccagcctgggcaacagagtgagactccgtctcaaaaaaaaaaaaaaaaaaaatacagccatggccagtttcccaggtatacaacctgtgcagttctgtggggcccagtgcttaatggaatgccctcttgccctgaaatggtaataacttttgaataaggggccccacgagctatgctggttctgtctgtgctggggcacttgctaataaggtctaggactattccctgaagatcgagtttggtcagggccaggcagccacctgagctcttgggcaacttcgacctcctaggctcaagccatcctcctgcctcagcctcctgaatagctgggatggactacaggcacatgccaccgtgcccagccaagttatgtttttgtagagatggggtctagctctattgcccaggctggtcgtgacttcctggcctcaagcaatcctcttccctcccaaagtgctgggattacaggcatgagccactgcacccagccctcaagtagtttttaaataagctccctgagatgagaggtggggatagtgagcttagaataggtggttgggggttgagtcatggtggctcacacctgtaatccagcactttgggaggctgaggcaggtggatcacctgaggccaggagttcgagaccagcctggctaacatggcgaaaccctgtctctatttaaaaaaaaaaaaaaaaggcacggtggcacgtgcctgtaattccagctactcagaggctgaagcagagaattgcttgaacctgggaggcggaggttgcagtgagccgagttcgtgccactgcactccagcctgggtgacagagcaagactgcatctcaaaaaaacaaaaggtggttaggaagtgactaaagtaggggtttccagtgctggctctatgctaatcacctggaaaggttgtaaaaatactgattctcaagagaatctcataccttcactctactggggtagggcctagcgtcacatttttctaatattctagcaaaatcttcgaacttaggtgtttgctataaaactctctcccaggcaggccctgccttctgcagccctattggacgatgcaaatttccccagtagtactcacctgtgctcttcctgcctcaggcaacctctgaatcagtctcccccaccttatgtgaaatgggcttgaataggttagaagctgatgtgggttgttgtgttttttgtttgtttttgtttttgagagttttgctcttgttgcccaggctagaatgcaatggcacgatctccgctcactgcaacctctgcctcccgggttcaagcgattcttctgcctcagtctcccgagtagctgggattacaggcacgtgccacca

SEQ ID NO: 38547 - DNA, 2300 bp, Homo sapien
taatgtcattccaggtaagtatctttaactgggtacttggtcctccaagattcagaggaccttgatccccctgaaactgtatacataatattcaacatacatagtatgtgcacacatgtgcaaacactcacattatctaaaattcatcataatcttaccccggcttctccccacactcctcagatcctgctatagcctagtgcattttctccttcctcactcccttccctccatgtgtcctctgccctggccaccaggaactttgtgctgcctccggagtgcatgaggcactttcacatctctcttgctttacaagagcttccctatgctccaactggcaaatttctctatggactgaaaaacccacatagcctttatctgtcttgtgatgtcttctccccaccctcaagttaggcatacccttctatgccctcctttatccaaacattttccccactatatcgtaattgtgtgtttaagtgccggactttccaactagatacaaagctttcccaggaaagaaatccttttcttttcttctttctttcttttcttttcttttctttcttttttttttttttttttttgagacagattcccactgtgtcgtccaggctggagtgcagtggcacaatcttggctcagtgcaacctccacctccagggttcaagtgattctcttgcctcagtcttccaagtagctgggattacaggcacgcgccaccacacccagttaattattattattattattatttttttttttttttgagacggagtctcgctctgtcacccaggctggagtgcagtggcacaatctcggctcactgcaagctccgcctcccgggttcacgccattctcctgcctcagcctcccgagtagctgggactacaggagcccaccactacgcccgcttaatttttttttttttttgtatttttagtagagacggggtttcaccgtggtctcgatctcctgccctcgtgatccgcccgcctcggcctcccagagtgctgggattacaggcgtgagccactgcgcccggcctccacacccagttaatttttgtatttttagtagagacggggtttcaccatgttggccaggatggtctcaatctcttgaccttgtgatctggctgcctcggcctcccaaagtgctgggattacaggcgtgagccaccgctcccggcgagaaaccttttctttttcttttttcttcttcttcgtctttttttttttttcttttgagagggattcctgttccgtcgcccaggctggagtgcaatggcgcgatcttggctcactacagcctctgcctcccgggttcaagcgattctcttgcctcagcctcccgagtagctgggattacaggcacgagccaccacgcccggctagttttttttggtatttttagtagagacggggtttcgccatgatggccaggctggtctggaactcccgacctcaggtgatccgcccacctctgcctctcaaagtgcagggattacaggcatgagccactgcgcccagccaagaaaccatttctgattcacctattcactcccgcactcccactacacagtagctaaataaataaataaatattaaaaataaataggaaagaaagagagaaaaaaagaaaagaaaaagacaaaaatttaaatttaaaaaggttgtgctcgatggctcacacttgcaaccccagtgctttgggaggctgaatgaagcaagaggatcgcttgaggccaggagtttgagatcggcctgagcaacgttgcagcattgcaaaacccccatctgtacaaaaaagaaaaataaaattaattttaaaaacaaaaaaagagaaacagtagcacatgtatgtactggcaccatgtatgtactagtaaaaactagttaaaattaagtcagtaattaatgaaggaataagtcaatgagtgagcaggcgaaggaagaaaacatagaccggagcaggtgcgccttgggttgagcccttccccgctgagccccgccttctgcccgcccctgggccctaccgggactacatttcccagaaggccgcacgccccgggcatgcgcagcggctcgctcggaagctgcgacgccgagtttcactctggctgccttctcctgagagtcggagccacagccagagccctgcccaggccgagccggagctgcagcccgagcgcggtggtgccctcagccccgtcctcttgtcctcctcagcctcggtgagagggcgggaaggccacctgcgcgtcgctagggctgcggtcccaggggcgcggggtggcg

SEQ ID NO: 38548 - DNA, 2300 bp, Homo sapien
agaaaagagggctgggtagggtggctcacacctgtaatcccagcactttgggaggccgaggtgggtggatcacttgagttcaggagttcaagaccagcctggccaatatggtgaaaccccgtctctactaaaaatataaaaattagccaggcgtggtggcgggcacctgtaatcccagctactcaggaggctgaggcaggagaattgcttgagcccgggaggcagagaggttgcagtgagccgagatcacgccactgcgctccagcctggatgacagagtgagactccgagaaaaaaaaaaaaagtggggggaagagttgaaaccagctgaggaaggggaggagcatgctccaaatgaatgaaactgagtgttcagtagagtcaggaccttgacccaggtgtccagactccctgcccttcttagcattatcagggcccccagatccactaccagccttgcctttggatcgggagtaggcaaggagagcaagaagctgctctttgcttagcacggccacagaggcaatcctgtttgagaacagtcaacaaacaaactcaaacaggccatgcacagtggctcatgcccataatcccagtgctttcagaggccaaggtgggaggatctcttgaggccaggagtttcagaccagcctggacaacatagcaagattctgtctctctctctatatatataaaattagccaggtgtggtggtgctcacttgtagtcccagctactcaggagggtgaggcaggaggatcacttgaacctgggaggtggaggctgcagtgagctatgatcgcaccattgccctccagcctgggtaacagagcaagaccccaactctgggcccagcatgcttccagtgtgtcactctaccggcatgaccctacctcttaaaaaaaagaaatatgatgacttaagaccaaatgagtggccaggtatggtgtctcatgcctgtaatcccagcactttgggaggctgaggtgggcagatcacctgaggtcaggagtttgaaaccagcctggccaacacggtgaaacccctgtctctactaaaaatacaaaaattagcagggtgtggtggctcatgcctgtaatcccagctacttgagaggctgaggcacgagaattgcttgaacccaggaggcagatgttgcagcgagccaagatcatgccactgcactccagcctgggccacagaacgagactctgtctcaaaaaatccaaagaccaaatgagtgacttgaacataatcattgtagggaacaaaaccctcatattaaaaaaaaaaaaaacaacaacctttattttatggtaattaagttccggaaaagttaacaaaagtagttgggtttccatatctccctcatctggcttctgacattaacagctttcataaccatggttcagttgtcagatccagaaaattaccactggttggctgggcacggtggctcactcctgcaatcccagcactttgggaggccaaggcaggcggattacgaagtcgagagatcaagaccatcctgggcaacatagcgaaaccccgtctctactaaaaatacataaattagctgggtgtggtggcacgcacctgtagtcccagctactcaggaggctgaggcaggagaatcgcttgaacctgggaggtagaggtttcagtgagccaagatcacaccactgcactccagcctggtaatagagcgagactccgtcccctcacccccccaaaaaaagaaaattaccactggtataatactcttaactaaaggttttttttttctttcttgatttttcaccaatttcccactactgtcctctttctgtcccaggatccaatccagggtcccactttgcttccagttcttattctccccgtcctcctctgggctggaacagtttgtcagtctttatctttcataaccttgttactttcaaagaggtgctttgttgaatgtcccttaatttgagtttgtcttgttttcccatgtttggacaaagataatgccctttattatttcttttttgacagagtctccagcctgggctggagtacagtggtgagatcatagctcactgcagccttgaactcccaggctcaagtgatcctcctgcctcagcctctcaagtagctgggaccacaggtgcatgccaccacacctggctagttttttactttttagagatggggtcttgattgttgcccaggctagataatgcatttttgacattaaatccccccaaaatggtgttgcatccctcccagagcatcctatcgtggggtttatgatactgacc

SEQ ID NO: 38549 - DNA, 2300 bp, Homo sapien
cactaccagccttgcctttggatcgggagtaggcaaggagagcaagaagctgctctttgcttagcacggccacagaggcaatcctgtttgagaacagtcaacaaacaaactcaaacaggccatgcacagtggctcatgcccataatcccagtgctttcagaggccaaggtgggaggatctcttgaggccaggagtttcagaccagcctggacaacatagcaagattctgtctctctctctatatatataaaattagccaggtgtggtggtgctcacttgtagtcccagctactcaggagggtgaggcaggaggatcacttgaacctgggaggtggaggctgcagtgagctatgatcgcaccattgccctccagcctgggtaacagagcaagaccccaactctgggcccagcatgcttccagtgtgtcactctaccggcatgaccctacctcttaaaaaaaagaaatatgatgacttaagaccaaatgagtggccaggtatggtgtctcatgcctgtaatcccagcactttgggaggctgaggtgggcagatcacctgaggtcaggagtttgaaaccagcctggccaacacggtgaaacccctgtctctactaaaaatacaaaaattagcagggtgtggtggctcatgcctgtaatcccagctacttgagaggctgaggcacgagaattgcttgaacccaggaggcagatgttgcagcgagccaagatcatgccactgcactccagcctgggccacagaacgagactctgtctcaaaaaatccaaagaccaaatgagtgacttgaacataatcattgtagggaacaaaaccctcatattaaaaaaaaaaaaaacaacaacctttattttatggtaattaagttccggaaaagttaacaaaagtagttgggtttccatatctccctcatctggcttctgacattaacagctttcataaccatggttcagttgtcagatccagaaaattaccactggttggctgggcacggtggctcactcctgcaatcccagcactttgggaggccaaggcaggcggattacgaagtcgagagatcaagaccatcctgggcaacatagcgaaaccccgtctctactaaaaatacataaattagctgggtgtggtggcacgcacctgtagtcccagctactcaggaggctgaggcaggagaatcgcttgaacctgggaggtagaggtttcagtgagccaagatcacaccactgcactccagcctggtaatagagcgagactccgtcccctcacccccccaaaaaaagaaaattaccactggtataatactcttaactaaaggttttttttttctttcttgatttttcaccaatttcccactactgtcctctttctgtcccaggatccaatccagggtcccactttgcttccagttcttattctccccgtcctcctctgggctggaacagtttgtcagtctttatctttcataaccttgttactttcaaagaggtgctttgttgaatgtcccttaatttgagtttgtcttgttttcccatgtttggacaaagataatgccctttattatttcttttttgacagagtctccagcctgggctggagtacagtggtgagatcatagctcactgcagccttgaactcccaggctcaagtgatcctcctgcctcagcctctcaagtagctgggaccacaggtgcatgccaccacacctggctagttttttactttttagagatggggtcttgattgttgcccaggctagataatgcatttttgacattaaatccccccaaaatggtgttgcatccctcccagagcatcctatcgtggggtttatgatactgacctgtcttttactggtgatgacggtcatgatcatttgctaaagtggtgtctgccaggatttttctcctctaaacaggtgctatgagaacctgctttttttttttttttttttgagactgagtttctctctgttgcccaggctggagtgcagtggtgcaatctcggctcactgcaacctctgctgcccgaggttcaagtgattctcctgcctcagcctcccaagtagctgggattacaggcgcctgccaccacgcctggctaatttttgtagttttagtagagacaggattttgccatcttggccaggctggtcttgaactcctgacctcgcgatccacccaccttggcctcccaaagtgctgagattataggcgtgagccactgcacccagccattttttttttttttttgagacggagtcttgctctgttgtccaggctggagtgc

SEQ ID NO: 38550 - DNA, 2300 bp, Homo sapien
aaaaaacaacaacctttattttatggtaattaagttccggaaaagttaacaaaagtagttgggtttccatatctccctcatctggcttctgacattaacagctttcataaccatggttcagttgtcagatccagaaaattaccactggttggctgggcacggtggctcactcctgcaatcccagcactttgggaggccaaggcaggcggattacgaagtcgagagatcaagaccatcctgggcaacatagcgaaaccccgtctctactaaaaatacataaattagctgggtgtggtggcacgcacctgtagtcccagctactcaggaggctgaggcaggagaatcgcttgaacctgggaggtagaggtttcagtgagccaagatcacaccactgcactccagcctggtaatagagcgagactccgtcccctcacccccccaaaaaaagaaaattaccactggtataatactcttaactaaaggttttttttttctttcttgatttttcaccaatttcccactactgtcctctttctgtcccaggatccaatccagggtcccactttgcttccagttcttattctccccgtcctcctctgggctggaacagtttgtcagtctttatctttcataaccttgttactttcaaagaggtgctttgttgaatgtcccttaatttgagtttgtcttgttttcccatgtttggacaaagataatgccctttattatttcttttttgacagagtctccagcctgggctggagtacagtggtgagatcatagctcactgcagccttgaactcccaggctcaagtgatcctcctgcctcagcctctcaagtagctgggaccacaggtgcatgccaccacacctggctagttttttactttttagagatggggtcttgattgttgcccaggctagataatgcatttttgacattaaatccccccaaaatggtgttgcatccctcccagagcatcctatcgtggggtttatgatactgacctgtcttttactggtgatgacggtcatgatcatttgctaaagtggtgtctgccaggatttttctcctctaaacaggtgctatgagaacctgctttttttttttttttttttgagactgagtttctctctgttgcccaggctggagtgcagtggtgcaatctcggctcactgcaacctctgctgcccgaggttcaagtgattctcctgcctcagcctcccaagtagctgggattacaggcgcctgccaccacgcctggctaatttttgtagttttagtagagacaggattttgccatcttggccaggctggtcttgaactcctgacctcgcgatccacccaccttggcctcccaaagtgctgagattataggcgtgagccactgcacccagccattttttttttttttttgagacggagtcttgctctgttgtccaggctggagtgcagtggcacggtctcagcaacctccacctcctgggttcaagtgattctcctgcctcagcctaatgaatagctgggactacagctgtgtgccagcatgcccagctaattttttatatttttagtagagatggggtttcaccgtgttaggatggtatcaatctcctgaccttgtgatccacctgcctcggcctcccaaagtgctgggatttcaggcgtgagccaccacgcctggcctgagagcctgcattttgatgacactagtgagtataaaatatctttttttttctttttattttctttattcacaacaggtatgaaatgattgttttcagagtctttatttttttttttttgagacagggtctcactctgtcgcccaggctggactgcagtgatgtggtcatggctcactgcagcctcaacctcctgggttcaagccatcctcctgcttcagcctcccaagtacaggtgcgcaccaccacacttggcagacttttaaaaatttttttggagatggagtctcactatgttgcccaggctggtctcaaactcctggcctcaagtgatcctcccacctcatcctcccaaagtgctgggattaccggtgtgagccaccacacccctcctgagtctctctgaattgcccaggaaaacaaaaccaaaggcctccacacaggcacccaaggagcgtaaaagcgcgaagacacctcagtgactcccacttggccatgacgcagtgtttctccagctctcgtttccaataagtcagcggtgtgcagtaagctctgctcttttctcccccagtgcctccctccccagcggtccctcaagcagcccagggagcgtc

SEQ ID NO: 38551 - DNA, 2300 bp, Homo sapien
ctggcatgagggggcttgttcttgaggactttgtgatttttgtaagcaacaagttgtgggtgagaggcggcgcccggctcaggatgcggggacaaccgtcccttccgccagggccagcacgtgtctcgggaaaggcccccagacagcggcccaggtctgctgcccaggtctgctgccctgacccccagccctgtgtggccgccacgtgggctgcttgagaggggtccctcggtgacccctgccctgctcgttgcatggccacagaagaaggggctttaggaccacagcaggtccagggagttacagcaagacctgctcggagcagcctgtgatggtcaagttctgaacctttcccaagcgggtgctggccctgcttccacccctgggctgtggaagtgtggactgtggccagtccagacgctcttgagtgggcgtggtggcgggcagggagggtggccgtggccctgctggccctcagtgtctgtgtcatctcagcaggtcctctcggagcctccgcttagcagaggggcttggcgaggtctaggaaatactcgaagcgcctggcatgcggcaagggtggcttccgatcgtgtccgacctccagcccacaggcgaggaggtgggctcagggaggggtgggcctcgagctcctgcccccagcccagggctctgcacgccctgcccttcccctgccctgggggaggagccagactcgttggcagcccgggctggcaaccttctgtggcactcgggtttacctgggaaggacacgctcttggtgggtcgcctggctggccccttctgagacacgtggctaatggaaagctcccttctgctctgaaaagctgcaagggctggggtgggtgggcgggggtgggatgctgtgcccggcctcaccagggctgggcagaggcgaggcccaggctcacccggagatggctctggagttggcaggcttttccaaaggaaaaggcccccctcagcctgagtagggcattccagccacacggagggcgaccctgagctgggggccatcgttctggtctggcgttctcgccaccgtgacaggatttgggttcgggcagtctgtatgggtgtgtggaggtgtggggtgtgtggggtgtgtagaggtgagggtgtgtggggtgtgtggaggtgagggtgtgtggggtgtgtggaggtgtggggtgtatggaggtgtggagtgtgtgtggagtgtgtgtggaggtgtggggtgtatggaggtgggtgtgtggggtgtatggaggtgtgaggtgtgtggaggggtgaggtgtgtagggtgtgtagaagtgtggggtgtgtgaggtggggtgtgaggtgtgtggaggtgggtgtgtggagctgtgtgtggtgtgtggaggtgtgaggtgtgtggaggtgtggggtgtgtggagctgtgtggggtgtatggaggtgtagggtgtgaggaggtgtggaggtgtggggtgtgtggatgggggttggggggtgtggtcttgccagcagtttccctccaggtcacagcagccatgccatcacagcaattccagcttggttacatattcgtctttcccgtttgagatcagggaaccgaggctcagaggtggcatgattcgttcacagcaagagaactagaattaaacaaaccgtgccgactccagcctccaccccaccacgccacctccctgccaaactgtcccctccctggccctttttggtgtaaagggagttcagcaggtgcagttgtgagccctcaggcttagaattctctgcagcccctgaaggccgtgagcttggattcaaaccagagccccttctggtcctggagtctgggacgaccgcagccccaccatgaccttggggtggagcccctgtcaggagcgcctccacgggtggcactgggctccccgtccctctttcacccccgcacgggcttggctgctggcttctgtggttctgctactcccactacctagagaacgccccgggccgcgccgatcctcaccagctcaggagcttcttgtccgtaggagaggctttactggatgtggggttcggtgtttatggagatgcagcccttctccctccagcttcgtgcacgtgtgcacagacagcgagtgaggccgtcagggtgggctcctgccacgtcttggcccctccccagagtcgctggacttaggagctagtctgcatgtgacagaccttcccagtcagtggcaggcgtttcccgggacagtgtctgtgtggcggtcggcgtgtgtgcagctgcctgtacatgctggaccccagactcccttgtc

SEQ ID NO: 38552 - DNA, 2300 bp, Homo sapien
gcactttgggaggctgaggcaggaggatcccttgagccaggagttcaagaccaggctgggcaacacagtgagaccctgtctctacaagaaatatatttttattatattttttttgagacagagtctcactctgtcatccacgctgtagtgcggtggtgcgatctcagctcactgcaacctccgcctcccgggttcaagtcattctcctgcctcagcctcccgagtacttgggattacaagcacgttccaccacacccggctaatttttgtaattttagtcgagacagggtttcaccatgttcgccaggctggtctcgaactcatgacctcaagtgacctgcccacctcggcctcccaaagtgctgggattaccgccgtaagtcactacacccagcctcaaaaactatatttttaaaaattagcagctgggcgcagtggctcatgcctgtaatcccagcactttgggaggccaaggcaggtagatcgcgaggtcaggcgttcgagaccagcctggccaagttggtgaaacctcatctctactaaaaatacaaaaattagctgggcatggtggtaggtgcctgtagtcccagctactagggaggctgaggcagaagaattgcttgaacccaggaggtggaggttgcagtgagcagagatcacgccattgcactccagcctgggcgacagggtgagactccatgtctcaaaaaaaaaaaaaaatagccaggcacggtggctcacgcctgtaatcccaatactttaggaggccaaggcaggagatttgcttgatcctcccaggagttagagatcagcctgggcaacatagcaagatcctgtttctataaaaaatacatttttaaaaattggccagccgggcgcagtggctcacacctgcaatcccagcgctttgggaggctgaggtgggtggatcacctgaggtcaggagttcgagaccagcctcaccaacgtggagaaaccctatctctactaaaaatacaaaattagacaggtgtggtggcacatgcctgtaatcccagctactcaggaggctgaggcaggagaatcacttgaacccaggaggtggaggttgcggtgagccaagatcgagccattgtactccagcctgggcaacaagagtgaaaactccgtttcaaaaaaaacaaaaaaaaaattggcgggggtgccaggcacggtggcacatgcctgtaatcccagcactttgggaggccaaggcgggtggatcacttgagatcaggaatttgagaccagccaagccaacatggtgaaaccccgtccctactaaaaatacaaaaattagctggccgtggggcacatgcctgtaatcccagctacttgggaggctgaggcaggagaatcgcttgaacccaggaggcggaggttgcagtgagcccagatcacgccactgcactccagcctggacaacaaaggagactccatcttaaaaaaaaattaattaaataaattttaaaaattagccggagcatggtgttgtgtgcctgtggttccagctactgggaaggctgaggtgggaggattaactgaacctgggagtttgaggctccagttagctgtgaactgacctccctgggtgacatatatatatttaagccactgagctgtgaaggttgtgaaggtatgtgagttatgtcttgaaaaatacacacatagtgagcgccaaatcccgggagtagtgtttaagtggcgggcttgtcagctgtcaagggctctgcagccctttctctgaatccaagttcttcttcctgtggacagggaacccaggctgcgaactgggaggatgtggcctcgtggggggcagggccagcgtgctgtgatggggatggggctgggcaggttggggctgcctgctactccccactcctgactctgggtggggacagaaggcagagggaggctcctggcacctggggcacaggaatctcaggcatgtggtcctgagcctgtttccaaaagccagaccctcctccccagggcggagagactgggaggggccccaatccaggctccgggatggcctggctggcatctggggttccagtggcccctctcccttggccctggcagtggggctggatactggcctgcctcccaccagagtccccccagctcctccctgctgtgggctggcctgggaggaagggggtggggtgcacttacatttgcaggtctttccagcccctggggcagcctgattaaccagcttctccagggccaagctgttgggggtgaggtgcagcccgaagcagccagaccagcccctg

SEQ ID NO: 38553 - DNA, 2300 bp, Homo sapien
aattgtaaaccaaaaataaaattctaagcccccacaactgactcagtggactcccctgttggccaacaggatccaaaataaacatggaaaactaatttaggtcatgatgggaaggagggggttggacatgccttgtcataattctcctcccgtcagagtttaggcacagctgaccaacattatgatctctattagaatagagatcataggactgacaaaacaggctctttttatcagtaagatacccatctccaaccagactctgatatagcatcacatgacagatagcagtccctgaagtaaattacagtattttaccccaaaacatattttctttgacaaactttaaaatagtcctgcaaagccatctctttgggggaaatttgcattctgtagagaatctctttcccttacagaaaagactccaggtcttttctggagagtctgacaccttttaagatccaataagagatatttatcatctattctccctgaagcctgttctgaggcttcacctacataacaagaaccttggtttccacaatcccccttatcctaactcaaacttttctttcttttttttccctccctctttttccttccttcctctctctctttttctctctctctctttattttcttctctgttgcccaagctggaatgcagtggtgccatcatggctcactgtagcctcaacttcccaggctcaagcgatccttccatctcggcctcctgagtagctgagtctacaggcatgcaccaccacacctggataattattttttttttgtagaagtgggggtctcgctgtgttgcccaggctgtccttgaactcctggcctcaagggatcctcccagctcaccctcccaaaatgctgggattacaggcatgagccaccacaatggcccatttctttatgtagtcttccagctgttcagccaacacttaactctgaaccaactgccaatctttcaatctactagtgacctgaaagcctttcctggctgacccaacatatacttcccatgtattgatttatgtctttgcctgtaactactgtctccctaagatgcataaaaccaagctgtaacccaaccactttgggctcacgttctcaggaccccctgaggctgtgtcaccagccatggtcactcaaataggaggcccagaataaaactctttacagactttgactctttttggtcaacataacctaaccctaaacataatcctcctggggaaggtaagatcacaggtatctcttcttcgttcagtttgtatgtgtatgtccttatttctctacagtttttaggcattcgctgtgtgatctagaaaagctatggagtctcgctttgtcgccaggatggagtgcagtggcgtgatctcggctcactgcaacctccacctcccaggttcaagtgcttctcctgccttagcctcccgagtagctgggattacaggcacgcgccaccacgcccagctaatttttgtatttttagtagagacagggtttcatcatgttggccacgatgatctctatctcttgacctcgcgatctgcccgccttggcctcccaaagtgctgggattacaggcttgagccaccgcgcccagctacaaattctattttctttttgttccttggaaagcatcgctgggcatttatcctgtcccagtatttgagtgaaacttctcagcatttcagagcagtgaccatgatacaccctttcctttccttctccttatggcaaactcggttctaacccagaggacttgggctccaggacccagtaacgcagccctggacttgaccctaaaagggagtaaagacaaaggtgaagttcagtccggggttcagggctgccaaagctcatagcctggagcttcttaacctttaggcggggtagagacatttaagacagcccctaaacttggggagcgcgtaggctcatgggaaatagagtctgttacttgtcctgggaccgcggtgggtgtccggggaggcggacttccggtgcactcctgcgcgtgtgcacctctccctgcgtgcgtgttcgcgcgtgcgtgctcgcacatgcgcgccacctccgcactgccctcgcttcctgcgcctgttcaggtcatcgcttgctctggttcccaggctttggcctctagtggacgagaatcaccgagtctgcggggctagacgctgaccgcccgggccagcacctaggcgggcgggagctgtgcggcccagggttcgcgcgggccgggtagaggctcgagccaggacccccgagcgtgaaccccggagccg

SEQ ID NO: 38554 - DNA, 2300 bp, Homo sapien
aaatttttgtgtttttttttagtagagactgggttttaccatgttgcctaggctggtctcgaactcctgagctcaaagcaatccaccagcctcgcctccaaatgtgctagattatgtgtaagccatcactcccggcccagaagtactaacttttaatgtagtcatatttatctatatttcctacatgacttgtgccctttgtgtattcatctctttacctctaaacacaggagtgccccgagggctcaggctatggacctctctatttacattaattctcagtcatcttgcttggtttcaggacatctgtaccctgacggcttttatgtgtagctcctccacttaactccagccacacacaatagttcaaagagcccctactgacctagacactatgtttcttcttcccctattacccaggtttcttgagtagggagtctgcagtcactgcctccatttcttcaccttccagtcactgttcaacccagggcagcctggcttttgtcccactagtctactgatactgagatttttttcttaagcaacacagtcccccctccgccccccccccttttttttcaaattaagtcttatgtgaaatcacagtatattaaatagaagaattactttggcactgggttggggaggatctggaacccaaactgcaccttcttctcatctctctgagttgccccagaggcatctatacctttccaacttttctatccccaaaacaccctaatctccagcgatactgaacaattccatctctggacttctgcacagtgctccttcatcttccttgaacctgccagacctctcagctccaggagcacttccctgccttccttcccctttatcacaacttttttttttttttttttttttttgagatggactcgctctgtcgtccaggctggagtgtgcagtggcatgatctcggctcactgcaacctccacctcccggactcaagcaattctcctgtctcagcctcccgagtagctgggactacaggcacgcgccaccatgcccagctaatttttgtatttttagtagagacggggtttcaccatattggtcaggccggtcttgaactcctgacctcaggtgatccgcccgcctccgccttcgaagtgctgggaatacaggcatgagccactgcgtctggcctctttttttgttcccgttatcacactgataacattgaattgcaatcttttacttacacatcttccttactaaacagagcttataaagatcagagatcctctattttcccccttaatctctttaatgtatataaacaatggaatgaataaatcaatgaatgaatgtctgaggaaacttaactacaccaaagtgtattggcagactaccagactttttaaacagctttatgaagatataattcacaaaccatacagttcatagggtggtgcaaccgccaacacgatctaattttaaactatgtttatgctgctacgagaaagcctatacccataagcagtcattttctattccccacccccaaacccactccttagccctaggcaaccactaatctactttctcagaccgataactttagcataggtataaatcgatcacagagcctcaaaatccacccgatgtctgggccatgatgtgaaatttggtaggtaatcgtcccacgttatcaacttgtaaagtagaaatggaagtgggggggaaaactcagccgccagtggcgtttgtgaaaagcacctggtaacaggctgtgctggaggggagttcagcccctagaaaagatcacggattaggaattacataagcataggtctcgggcccttttattttggacgcgatcctttcacgggatcgcctccggatgggagccggatgggatcccggacgggatcgtctcgctgggagccatgcgggaaaccgcaagagtcagaaacaggcgttgaaggcaggcagcattttccaaaacagctgtgtctcgggagctgccgggctgtagcgtctccccgagtcgcgcgcgcatgacgtggcgggcgcgcgatgacgcgacgcgtggcgcggtgcacgctgggatatttaagtctcctccgcggcgcggagccgcgatgtctccggcggctgcggcggctggagcaggcgagcggcggcggccgatagcgagtgtcagggccggccggggcggcgcttctcggcctgtcgctggtcggcctcctactgtacctcgtgcctgctgcggctgcgctggcctggctggccgtggggactaccgcggcctggtggggactgagccgcgagc

SEQ ID NO: 38555 - DNA, 2300 bp, Homo sapien
taaatataataaatattactattatactatatttacaatagtatatactattatatttatatttataaatatgttatataatagttatatttatattatatattatattacataataatatataaatataaatataataactatattataaatataatagttataaagacaatatgacaaataaatattaaccatttaatttatatcagtcactaccctaaggattgttcttttatctaatacattttattctaataactctgttaattaggaattcatgttcccatctaacagattaagacattgaaggacaagaaggtcaaataaagggctgaaaaaaatctcgtaacttctaagtgaaccaggcagtttccaaaacctgcctcttagctattatgctataaatatttgagaaaagtatttacattgacaaataactatgaagtttttagaacttatgaagatcatggtgaagaaaaaactatttgtaacattaattatcaaattgtttattcctttctgaaatcatttattcaatatcatttatttgcagataataggtaccaggcattgagaaattcagaatgaataagaaaatggaataaacaaagggttataaaaaaatctaggatgggttattcattttaaaagagaatggagcttaggtaaaaaaaagcaaaaatatacacaaggccttgaacattctaacataatgagcaagtcataccctgccagatccatgagagtggatgacaggatgtgctggaaaggaacatgggaagtacctaaaatgaaaaggacctgaaatgtaattctaaagatttcgtctaaaagaaatggcaagttggcagataatttttaaattcaagtgtaaataatctgataagtattttagaaagctgactggatggtataaagagggtggattagagaaggaaaatatgggtggcagggagatctatgagggttttgtgatgggttgaatggtgtcctcccaggagatatgttgaagccctatttttggtacctgtgaatatgacttcatttggaaataggatctttgcagatgaaatctagttaagatgggttcattaaggtgggccctaattcaatatgactgttttccttataaaaaaaggaaaagacggagaaacagggagaagaatgccacataacaatgaaggtagagaatggggttacacagctacagaccagagaacatgaaggactgtcaccaacaccactgctaagagaagggcacagaacagattctcccgcagagcctttagaggaagcaagaccctgtcaacagcttttctgagttctagccttcagaactgtgagagaataaatttcagcttatggtactttttatatgacagcccaaggaaactaacacaagtattggtggaacacttcttcaacaaatagcacttgaattaaggcagcggcactaaaaatggagaggaggaggtatgtggtagaccagggatatatttgctaaaggacaaacgaagtaatgagacttagaaacagaatgatggagccacaaagaatgcctgaaatggtaataggatacatgcttgaatgttgatgggccccatttccacaagcctccaaatctgcttctagatcccattcgagcaagggaggatttgttaagaagaaaggccttttgagagcaccagtccctccaccagccagtctagtcctaagagctctgaaggccaaccttggaagtggtttaggagggaaaatgtaggacccaggatttcagttgccaagccggagagcaggggacccaggaaagaatattggcattcacttgatttttccatcttctgatataaccttcaaatgttaatagtgtgtcgaagaatttattggaagtgagaaacaagaaaacagtgagtctaacctagtcattctagaattgggaggtaatagaaaagagagaaatgggaaagttgctcaaatgcaagtccagtgaatcagagagaaaaggctcaaagcagcagaacaaagcttcaataaagagatattgtgacttggagagatggccttttgtcctttgttctattaccggtcagagaatggggagcacacccaagcctgagacaacagctctgctaagtgcccttgagagggcacggtggggtcagcaccaaagccagaccactaaagagaaaaagagagaaagacaggattgcagaggagaaatgagaatggcagaaaaaataattttttaagccaaaaggaatcagagaagagcagaagtgcctctaggataaagcgtagca

SEQ ID NO: 38556 - DNA, 2300 bp, Homo sapien
cagttgtgaggaccaacgagaattactagtcaggtggaggggcttagcacggtgcctggtgcctggtaaacctttacctggtagccattgctgttattcatttatttatttattttacacaataatttacttattgagagccttctctccccgcccttgcagtctctaggtcactttttccacttgtagattttgtgcccaagccccagaaagatggctgggggcaggggctctgcgtactattcgatgagacccataacgtggctgtaactgtctttctcatactgcaagaacacggctggcagatccagctcctcgtatagtgccttcacccgggccaccttctcggcctccttctgcctgtaattttccttcaggatctggtactgttctggagtggcctgtagcagacactgaaccaccagccagctgcatttgttgtcctggaagtcattgccaactctgccagtcacactggggtccccaaagaagtcaaggtaatcatcctgaatctgaaagaactcttgaatctccagcaggatcttcttggcactggtgtgctccttcttgtcatccattcttgacatgtacatggctgcagctacaggaaggtagaaggagtagaaagctgtcttgtacttgacaacagatttgtgccttttttcggtgcatctgcgaagatccacattgccctggggggttgtgatgaggtcgagggtctgcccaatctcagtctgataagaattctgctggaagagctccatcaggttcaggtaatagggctgctcccggcaatacagcttcagcaggcagtagatacatgcttccagaaggatagcatcattgatggcatccaaacccatgcccagcttctgataccaggagatctgtccctggcaggtaagggatgaatccataatgtcatctgccaccaggaagaaagcttgcagcagttgcgcataccagcccacagtcggtgcccactggagactatcagcatccagtttcctcggctccaccagctcccggaacgctactagcaccatcaaacctcggtgatacttgcctccaatggcattgtactccaggacctccttgagccgggcagtagcatctcctgtctctgggtgccccatctcatcctcagtcagcaccctaacgatctgggagtagtgctgaacgaaatcctgcttttcttgggcataaatatctgatttctggtttccattcggtctttttttttttttttttttgagacggagtcttgctctgtcgcccaggctggagtgcagtggcgcgatcttggctcactgcaaactccacttcctgggttcacgccattctcctgcctcagcctcccaagtagccgggactacaggcacccgccaccgcgcccggctaattttttgtatttttagtagagacagggtttcaccatgttagccacgatggtctcgatctcctgacctcgtgatccgcccgccttggcctcccaaagtgctgggattacaggtgtgagccaccgcgcccagcctggtttccattcattctgagggaggagcaaagggctgtgttcctggatgcgggttcctgcttggctgttatttatttttgtttaaagagacagggtctcgctctgttgcccaggttggagtgtagtggcacgatcatagctcactgcaactttgaacccctaggctcaaagcagtccttctgcctcagccagtcaaagtgctgggatcacaaggtgtgagccactgcaccaggcctgctattactgttaccattacacatccactgctgcccctattactcccctactttgccctctgggtaggcccgtaaaccagggctccaccttctgactggctgcaggtggtcagattgctcttggctacccaggagccagtgggttcttggttctggagaagctggttgaccacaagggaattgtaggttactggggccggcaccatgggtgccctttggaaggttctgctctgacctatccctggaggccccagccagaagagttgtcacttcccttccggccacccactgtgcaagagacaaatcacatgctagtttcgtgccatcttccagtaagatgtgggaggcactggcctgagtgatcccttttcaagcaaagccgcatctcgccgtgctcacaggactactgtcataggaacatggatggtttgttcttccatttttgtggagctcggggatggggggatgtgtctgttgtcagggaggtgccatggtaagttgacagggcctgatgttagtgaaactacact

SEQ ID NO: 38557 - DNA, 2300 bp, Homo sapien
agctggacccagttccgccaggacaccggtaagacgctgtctgcctctcgcacatatctgggcgccgcacctgctttcccacaggctctgcgccaggtgttggggtgatggacgtgacttacagagcttctgctctctccctgcagcacacgtggtggtgggtgggtgcagtgagtgggaacatccacataggttgagtgcagctcacagtgggagaggcactgtgggaggcccttccccttgtcttgcaaagcagaaatgcctgttccgaccacagaggttgaagggttcctttggccggcaggccagcatggaggtggtgcgtcataggagttcagagggccctgtcccaccactcagtggctgtgtgccctgggcaggcaactgcgcccctctgcgtgtgtgcgtttctgctttttggtctgcgatgtgttttgatcttttttttttttttttttttttttttttgagacggagtctggctctgttgcccaggctggagtgcagtggtgcaatctcggctcactgcaacccctgcctcctgggttcaagtgattctcctgcctcagcctcccgagtagctgggattatagacatccgccaccacacctggctaatttttgtatttttagtagagacggggttttgccacgttggccaggctggtgtcgagctcctgacctcaggtgatctgcctgcctcggcctcccaaagtgctgggattacaagcatgagccaccgcacctggacctgcagtgtgttttgatcagtattattgagaatgaggcaccagtttcctctcggagccatcccttactctaatctggtggttgtcactgggggtgattttgtccccggggccatctgacaatgtttggagacactgttggttgttacagctgagtgggtgggaggtgggggtgctcctggcatctggtgggtggaggccagggatgctgctcgccatccggcagtgcactgggctggccctgcagtaaggaattattggcccacagtgtcaccagtgaggaaacttgagaaactggtttttccttttttttttcaattttaattttagttttattttaaaaagtatgggttttttttatcgtgtttgtttgtttgtttgtttgttttttgtaaagactgggtctccatcgccctgtgttgcccaggctggtcttcaactcctgagctcaagtgatcctcctgccttggcctccgaaagtgttgggattacaggcttgagccgtcatgcccagccctggaaactgtgtttccaggagtgtcgtagagtctgtgaaaactgtggctgtcagtcagctcccaagtcattgccttcacagtgtgtgaagtcaactgacaaagatagcagacaggataaataataacatggaaattgcatatcgtggcagagagcaggaagtgttaatcggggaatgaaagtggcaggtgttgtagaggtcgatttgaagttaggtgggtgtggtgtcatgtgcctgtagtcccagttatttaggaggctaaggcaggaggatcgcttgagcccaggaggtcagggtggcagtgaactatgatcacatcactgcactgcagcctgggtgacaaaggggtaccctgcctctaacaataaataaataaacaaatagcagcatgactgtgtacctactgtgttcctatttgtttattttggcggttgaaaaaagaatttgaacgttccctgtatcttggggatgctagcagactaacctttggttttcctttgaaaacaggcaccatgcggactgtgcggagacacctgttcccccagcactcagcccctggccgaggtgtcgtctgggagtggctgagcgacgatggctcctggaccgcctatgaagccggcgtctgtgacgatctggagcagcaggtggccaggggcaaccagctcgtggacttggcccccctggggtacaactacactgtcaactacaccacccacacgcagaccaacaagacttccagcttctgctgcagcgtgcggcgccaagcagggccgccttacccagtgaccaccatcatcgctccgccgggccacacaggcgtcgcctgctcttgccaccagtgcctcagtggcagcagaactggccctgtatcaggccgctaccgccactccatgaccaacctccctgcataccccgccccccagcaccccccccacaggaccgcttctgtgtttgggacccaccaggcctttgcaccatacaacaaaccctcactctccggggcccggtctgcgcccaggctgaacaccacgaacg

SEQ ID NO: 38558 - DNA, 2300 bp, Homo sapien
gagctcaggagtttgagaccagcctgggcaccatggcaaaaccccgtgtctactaaaaatacaaaaaatagccagatgcggtggctcgtgcctgtagtcccagctactcgggaggctgaggcaggagaatcgcttgaatctgggaggcagaagttgtagtgagccgagatcacaccactgcactccagcctgggcaacacagcgagactccatctgaagataaaaaaaaaaaaaaaagaagaacccaagggagggggcactgcccagcacaggcacagtcccatcaggccctggggagccatgccagggcgttctgcccagcacagtcacacctaaaagggtcctcagccgaaccccatccccttgaataccagctcatgacggctttgagcagaacatgtcacgggaacggcattgtgtagaactttttattaaatggcatttaaaatattccccaggactgtgtagctggggaaacaccacaaaatccattggcccggaacataatggctcaatggtacgaaacaaatgcattgttaaaaaggaaaaacagcaactgttgcggggtaatgacttgcagatgactcagcaggccaaacatcaaaggaattcggatggcagcaggtgggcacaggcagccaggaagcacccctccctcgctctcacttccagcgatcgctttacctccctggagtgtctaagccacccatttctctccatcatccctgcaatccccaagcaagaaccaccttggtctcccgctgggatgtccgtggttcctctctagctgaactctccatgtccactcctgcccgtcgcccattcccctctcagtatccagagggaccaggttctttgttctttttttttttttttttttaagatagagtctcactctgttgcctaggctggagtgcagtggtgtgatctcggctcactgcaacctgcagcttcaggttcaaacgattctcctgcctcagcctcccaggtagctgagactataaacgtgcgccaccgtgcctggctaatttttttgtatttttagtagacggggtttcaccatgttgaccaggctggtctcaaactcctgacctcaggtgatccacccacctcggcctcccaaagtgctgggattacaggtgtgagccactgcacccagccaggaccaggttctaaacctgatcacatcacacctctgctcccaacattcaggaacttcacactgcaagaacagaatctaggttcagacaggtgtggcggctcacatctgcaatcccagcactttgggaggccaaggcaggcggatcacttgaggccaggagttcgagaccagcctggccagcatggtgaaatgccatctctactaaaaatacaaaaattagccaggcatggtgatgggcgcctgtaatttcagctacttgggaggctgaggcaggagaattgcttgaacctgggaggcggaggttgcagtgagctgagatcacaccactgcactccagcctggacgacagagcgaggctctgtctcaaaaaaagcaaaacaaaataaaacataccaacatctaatctctataaaatatttttagaagttatccaggtgggccgggtgcagtggctcatgcctgtaatcccagcactttgggaggccgaggcgggtggatcacttgaggtcaggagttcaagaccagcctggccgacgtggtgaaaccccatctctactaaaaaaaaaatacaaaaattagccgattacaggcatgagccaccccaccaggccatgctttcagttttcaagaaagaagacaccattgttgccaaaggttttggtaatttgagagatacaatgtatgttttctccatgtggatcctagatagtaaggatctgttgaatttgaagtatctatccagaagtattttgggtacatgtttaaggattgtaaaacagtgtttctatttctggatataataaatgtatttgttaatataataactgaacagattagacccataaactatttacagtgttgagtcatttcccacagttaaaatcaggatgaaaatatatagctgaatacttgctttgtttcttgtaactgatttctttagtacagaacctgctaaggccatcaaacctattgatcggaagtcagtccatcagatttgctctgggccagtggtactgagtctaagcactgcagtgaaggagttagtagaaaacagtctggatgctggtgccactaatattggtaagtttgggagagttttaagccacaagaaatgattagtgtgtgttgttgtagtcaa

SEQ ID NO: 38559 - DNA, 2300 bp, Homo sapien
taaggaatttcaaaggaatattaagaaggtacagtaaattaatcctggttttcaagagtattggttaatgcacacgagcaaaagatttactaaagatgtttattcttcagttgattctcttcccataatttattgagaaatgctttatttgcatttctcattaaagacttaacttcaggatgatttacttttttctttttatcacataatgtttattaggactgggaaacatagtgagactctgtctctatgaaaaattaaaaaaaaaactgactgggcatggtggcatgcacctgtagttccagctacttgggaggctgaagtgggaggatcacctgagcccaggaacttgagactgcagtgagctatgattgcgtcactacacttcagactgtgagacagagtaagaccctgtctggaaaaatatatatacatatatatacattttttttattttttatttttatctttttttgagatggagtctcactttggcgccctggctgcagtgcagtggcgcgatctcagttcactgcaacctccacctgccaagttcaagcgattctcctgcttcagccttctgagtagctaccattacaggcgcgcaccaccacgcccggctaatttttgtattttcagtggagacggggttccaccatgttgtccaggctggccaggctggtctcgaattcctgccctcaggtgatccgcccacctcggcctctcaaagtgctgggattacaggcgtgagccaccatgcctgaccttatgtacttatatttttatgagaatatttctcttggttttctgataaatgagttactggaacccttatgaatttgaatgcaaatgaaacagctaaatgttatataattgttgtgtttaaaaagcagattataaaactgtctgtattatatgattacagttttataaaaacaaaacaggcctaaatgtgtatagtataaagactgaagagtcagcacttccatgttctcagcggttatccttggatgtgagatctcatgcactttttgctctcttctttgtgcctttccattttgcatgcgtatttcttataatctaaaaagttacttaaacatatgcagctaaaaactttttttacttgtaaagcgtttggtgctaattttaacttttttttttagacggagtcttctcactctgtcgcccaggctggagtgcagtggtgtgatcttggctcactgcaacctccgcctcctgggttcaagtgattctcctacctcagcctcccaagtagctgggattataggtgtgtgtcaccacacccagctaatttttgtatttttagtagagatggggtttcaccatgttggccaggctggtcttgcacccctgacctcaagtgatctgcccacctcagcctcccaaagtgctggggttacaggcgtgagccaccacgcctggcttttttttttttaaagcttttttgtaagtcagccagcaagaacacaggaggaagtactcaaatctcccttacacagctgggggctatgtcaggttttataagcatagggtaatgaggtgtgatttgattggatcttgcaataaagtaatgctgggaggtgtgatctgactggatcctgccatggggtgacaccaaaactcaatctgattggatcctggctcctgcctgggggtgtctggttcttaaatcggtccgagctcttcaggctgagctcttaggttccactccacggtggcacgcgtggttaacctgggcatgcacagggtacatgaccttcaacctgcaggtcgatggcaattggaaaacaactgacaacttcattacataaaagttgaactgattcgggtgcggtgactcacgcctgtaatcccagcactttgggaggccaaggcaggtggatcacctgaggtcgaggagttcaagaccagcctggccaaaatggtgaaaccccgtctctactaaaaatataaatattagccaggcgtggtggcgcacccttgtaatcccagctaccccagaggctgaggcagcagaatgcttgaacctaggacgtggaggttgcagtgagctgagatcgtgccattgcactccagcctgggtgacaagagtgaaactccatcaaaaaaaaaaaaagttgaactagatttggtctgatggcagttacagatttacaaaccgcgtcccaccctcctgccaacaccttccactcctcattcttgagggattagggatggaggtcatgcttctgtatcgacttcatgctgaccaggggcacttagtcccctaaagtgagagg

SEQ ID NO: 38560 - DNA, 2300 bp, Homo sapien
agctaataaatatgttcaaataaccacaaccccattaaggaaaaatgtcacttgacagcaaataatcaatccagaccacaatatgatcacactcactgtgaaggtgagaaaagttcatctttattatgtttccccaagagatgcactgcactgttctcttgaaaacacacagctcatgtcctcctttagaacacacatcctctttaaagtaacatacaaacatgccaaaacaagataaaaaattccatctgaattctcacatttcaaacatacactaaatatcaaataaaaatttatttttacaagaatttaggggaactaccacatagctataaatgtaatatatatgttaactaagtatcatagataaaaaccatgctcccttcagcagcacgtgtaataatagatacaaagattgaaaggtaaaagatttaggatgaaaagaatcctctcttaaaaaggaaaacaaaattatatgtatgtgtatacaacagttataacacccatcacacagctttatagaaacagcatctattcaaaaataccagtatttccaaaatatttaaaataatatttaaagtaataataatatttaaataaataaatatatttaataaatatttcaataaataaaataatatttaaataattctgtacccatgtttttcaaaataaaccaataaaatagatagtatacattagacgtgttagtatatatatctgagacatgttaaaaatcacaactgaattctcacaattcagtcacaaacctaaacagcaaataaaaatttctatcaccagaattatgtttttttctggtggggaactaccaatagctataaatagaagagattattatggaagtatcatagataaaaagagtgctcgcttcaggagcacatataataatacagaaaaaaatttaaagataataaaagatttaggataaaaagaattctcacttaaaaatgaaaagaaaattatctttatgtatatataacaactataactctcatcaaaaaactctacaggaacagcatgttttcaaaagtacaacaatttccaaactatttgaaataaacctattaataattcaatggccaacattttccaaacaaaccaataaaatgcatagtgtgcatgaagctatctgttacagtctgtggcactcatatttcacaaagaattctgtgccaatctgagcccttgcactgtgccttcaaatgctcctggactgtggcaaccaagtccataagaaacaggacctccaggttccgccccagggaggttggcattcagcaatataaaaagggaggtggtgccgcaggaaagggtggaactggaaacactcctggtttcttacttttctccaaggactcctagaagtaccccaccccacccctgctccttggaggacaacgtgatcactgtattcagctccatcaagaatggtccaggttcttctagatgatctgcacaaatggttcctctcctccttcctgatgtctgccattagcattggaataaagttcctgctgaaaatccacatctcccctgggtccggtgttctggaagtgagagagacaatgtcacacttcaaggaggcagctctctagacaggaaggttattcacgtcccatgtcaagtctagctagagttcagagcaattgagaagtgcaattttatctcctgcctttcattctataccctgcttctgaaccatcgtgttcaactgtgaaactcacactttggtgaccctgactccaaaacttaatacacccaaggtcagccccagtgatctgcttcatagccaggactttgggtgggtcttcccagggagtagggcaccctcagagaatgtggctttggacttcatcacagctggggccttttgtgtcacttcagatctaaacttgtaaccgtgctagatctgcttctaacgtgacaacatcacgaaccacgagtccagaagcctaatccataatcctccctcctcatgacgaagtctcatgctctgtgctcaacatggttagctgcacaagatgtaaaccaaagcttcactgaaccctcgacccaaatcggtaactcaagtgcatcaatcataatgaacctccccgaactcagtatttatgattatttttgaggcagggtctcactctgtcgcccgggctggagtgcagtggcaggatcagggctccctgcagccccgacctcccaggctccagcgatcctcccgcctcagcctcctgagtagttgggagtagagatgcctcccacatcgcctggctaatttttgtatt

SEQ ID NO: 38561 - DNA, 2300 bp, Homo sapien
gagccatcaaccgcagccccaggaagagcggagcccccagcggagcacctcagggtaccccctccaggaggtggtggatgatgaagtgtcgggaccatcaggtgaggggactggaggaagaagaggtggcataggattgactaagatgaaggaagggggccaggcgtggtggctcacccctgtaaccccaacactttgggaggctgaggcgggcagatcacctgaggtcaggagttcaagaccagcctggccaacatggtgaaaccccatctctactaaaagtacaaaaattagccaggcggtagtggtgtgtgcctataatcccagctacttgggaggctaagacaggagaatcacttgagcctgggaggaagaggttgcagtgagccgagatcgtgctactgcactccagtctgggtgacagagtgacatgctatctcaaaaaaaaaaaaaaaaaaaaagaagaaacaaaagaagggtcagaggtcaggaaggagaacctggggagggtgtgtgggaagaatggagaaattcaggctgggtgcagtggctcacacttgtaatcccagcactttgggaagccaaggcaggcagatcacttgaggccaggagtttgagaccagcctggccaacatggtgaaaccctgtctctattaaaagtacaaaattgagctgggcattatggcaggcacctgtaatcccagctacctgagaggctgaggcaggagaataaatggaatccgggagatggatgttgcagtgagctgagattgcaccactacactccagcctgggtgacaaagcaagattctgtctcgaaacaaaaaaaaaaaaaaaaaaaaagagggactcagagagccagggaccagggaaggatatgaggcagtgttctgaggacagagagagggaagaatggggaggggaaggagtggcacatggggttgagcagaggagaaagtcagaaaggtggcttggagaagccagcagtctgcgaggctggggaggatggagagtggtttggggtttggggtcggggtctaacgtgatcagttgcagaagcattacacggtggcctggtttctttactcagcccctggggtagatcccagccccccacgtaggtcccttggctggaaaaggaagagggaatgtttggatgaatctgatgatgagccagagaaggagctcgcccctgagcctgaggagacctgggtggcggagacgctgtgtggcctcaagatgaaggcgaagcgacggcgagtgtcgctcgtgctccctgagtactacgaggccttcaacaggctgcttggtaggaggacaccccagagagcacctccaatcctgttctttctaaagaggaaacttccaataaccacacttttccaatgggaaaaatatgccccagtgggtgagctctccatgcgggaggactctgaagtgatcactcatgagggacacttaggagacaacagaggattaggtagacttgataaaggtcggtgcttgggataagaaagcttggttttgggccaggcgctgtggctcccgcctgagatcccagcacgttgggaggctgaggcaagaggattgcttgaactcaggactttgaggctgcagtgagctatgactgcaccactgcactccagcctgggtgacagagcaaaactctgcgtcaaaagaaaaaccaaggctgggcacagtagctcatccctgtagttccagctactcgggaggctgagacaggagaactgcttaaacccaggaggcagaggttgcagtgagccaagatcaggccaatgcattccagcctggcccacagagcaagactctgtctcaaaataaattaataaataaataaaaataaaaatcaaataaagaaaaacaaaatcaaaaatcaaaaaagtggtttcagctgtgccctctgaaacttaatgtttcttactgacttttctaaacctaagtgtttccatccatagtgagggataccaaggccatggtcacaccctgatgtgtgactgtctcatgaggaaatgatgggaattcctttatgactctgcagtggtccctccgtgtctgctggagggggtcctggctgattcccagctctacatcctgtagattctcacacccagggcctccttcggcctcttctcaggggagtctcagagcaggagcctctctcccttgcccagtgaaagtcattctcccctctcccatccacctcacccgcagccacaatcctgagactttcccccgggaggcacacttctcctcgctgccctgctgctctcagggaaacc

SEQ ID NO: 38562 - DNA, 2300 bp, Homo sapien
aatggctcacgcgtgtaattccagcactttgagaggccaaggcaagaggatcgcttgtgaccaagagttcaagaccagtctgggcaacagagcaagatgctatatctactacaggcatgcacctgtagtctcagctacttgggaggctgagagaagaggattgcttgagcccaggaggcaacagagagctgattgtaccactgcaccccagccaaggcaacagagaccttgtctctaaaaaacaaaaacaggccgggtgcagtgtcttatgcctgtattcccagcactttgagaggcagaggcgggtggatcatttgaagtcaggtgttcaagaccagcctggcaaacatgacgaaaccctaaaatacaaaaattagccgggagtggtggtgggtgcctgtaatctcagctactcgggaggctgaggcaggagaatcgcttgaacctgggaggcagaggttgcagtgagccgagatggagccactgcactgcagcctgggtgacaagagcgaaactctgtctcaaaatattaggaaaaaaagagagagagagcctcttttccatctccccgccacagagttgtcttcagtaatttcattcccttttttcctgaggattcactgggtttctgggtcccagaggggaagttctcttcaaggtacagaaaccacgactccgcagagaaccgcagagatggcagcatgaccagaccacggacaggtgtgtagaagctgctgggctgaaacttgggctgaacttccgctgcaggttgacttattcccatcagcaccaaagccgctggagggggtcatccactagcaaatgaagtgggggcacggattggaggctgtttcagaaggtcccactgagccacggactcaaggcctggccacagccctcccaagcgaggcccagatcatatttcaccacgctcagaaaaccttgccagctcatttcagtccacagtgactttgctttctttaggatctctcttgcactgtccaactcagagaatttcaaatctgaatggattccaatgatggagctaaatcaggcctcacctcagttttttaattacaatcaatagggctgggtcccagcatctgtgtcttaatgttcctccatgtgatcctcatgctgaaaggctggtatttgaaaatccctttttttggggagtgaagggtttttttagagacaggcctcactctgatgcccagcctggaatgcagtggtggatcacagctcactgcagcctcgaactcctggccgcaagaaatcctcccaccttagccaaccaaagtgttgggattgcaggagtgaccactgtgtccagccaggaaagcccttctgtttcacttgaatgatatttctgccgcagacctacagccattgttgtattaaacggcatcattgcaggaaaagaaaaggtgagaggtgactgttttgcttttttctgaacatatcagaccaaacctgggctgtctggcactttttttttttttttttttgagtcggagactcactctgtcgcccaggctggagtgtagtgtcgtgatctcggctcactggaacctccaccttcccggttcaagtgattctcctgcctcagccccacaagtagctgggattacagaagtgcactcccacgcccagctcattgtttctgtatttttacagaaaaacagacaggtttcaccatgttggccaggctgatctcaacctcctcacctctggttatctgtcggcatcagcttccaaaagtgctgggattacaagtgtgagccgccgcacctggtttgcccattttttgacaatgtatcaacatcatctaagatgggcactgcctcagtgtagtgtgtctagacaaggtggccggaacagagaggaatatgcataccaggcttaaagacgggttaaatcagagcttttcattccacaaaagagcaattttaatgaagtcagaacatggatgttctaatatttgaaagcctgttaactaggagagagagtaaagtgatttgttgtaggaggacacacccagctctgacggtttaaagcgtcatgaatgcaaatttgaactccagaaaagcagagcttcctaacaatgggacttccatagcaatgggatttccttccgcattcagtttgtgcctttcccatgagcgagagactcctaggagagccgcagcccgttaggaagccatgtgggaactcatccacaggttctttttgtttgtttttttttttttttgagatgtagttttgctcttgttgcccaggctggagtgcaatggtgtgac

SEQ ID NO: 38563 - DNA, 2300 bp, Homo sapien
cataaggaatttcaaaggaatattaagaaggtacagtaaattaatcctggttttcaagagtattggttaatgcacacgagcaaaagatttactaaagatgtttattcttcagttgattctcttcccataatttattgagaaatgctttatttgcatttctcattaaagacttaacttcaggatgatttacttttttctttttatcacataatgtttattaggactgggaaacatagtgagactctgtctctatgaaaaattaaaaaaaaaattgactgggcatggtggcatgcacctgtagttccagctacttgggaggctgaagtgggaggatcacctgagcccaggaacttgagactgcagtgagctatgattgcgtcaccacacttcagactgtgagacagagtaagaccctgtctggaaaaatatatatacatatatatacattttttttattttttatttttatctttttttgagatggagtctcactttggcgccctggctgcagtgcagtggcgcgatctcagttcactgcaacctccacctgccaagttcaagcgattctcctgcttcagccttctgagtagctaccattacaggcgcgcgccaccacgcccggctaatttttgtattttcagtggagacggggttccaccatgttgtccaggctggccaggctggtctcgaattcctgccctcaggtgatccgcccacctcggcctctcaaagtgctgggattacaggcgtgagccaccatgcctgaccttatgtacttatatttttatgagaatatttctcttggttttctgataaatgagttactggcacccttatgaatttgaatgcaaatgaaacagctaaatgttatataattgtcgtgtttaaaaagcagattataaaactgtctgtattatatgattacagttttataaaaacaaaacaggcctaaatgtgtatagtataaagactgaagagtcagcacttccatgttctcagcggttatccttggatgtgagatctcatgcactttttgctctcttctttgtgcctttccattttgcatgcgtatttcttataatctaaaaagttacttaaacatatgcagctaaaaactttttttacttgtaaagcgtttggtgctaattttaacttttttttttagacggagtcttctcactctgtcgcccaggctggagtgcagtggtgtgatcttggctcactgcaacctccgcctcctgggttcaagtgattctcctacctcagcctcccaagtagctgggattataggtgtgtgtcaccacacccagctaatttttgtatttttagtagagatggggtttcaccatgttggccaggctggtcttgcacccctgacctcaagtgatctgcccacctcagcctcccaaagtgctggggttacaggcgtgagccaccacgcctggcttttttttttaaagcttttttgtaagtcagccagcaagaacacaggaggaagtactcaaatctcccttacacagctgggggctatgtcaggttttataagcatagggtaatgaggtgtgatttgattggatcttgcaataaagtaatgctgggaggtgtgatctgactggatcctgccatggggtgacaccaaaactcaatctgattggatcctggctcctgcctgggggtgtctggttcttaaatcggtccgagctcttcaggctgagctcttaggttccactccacggtggcacgcgtggttaacctgggcatgcacagggtacatgaccttcaacctgcaggtcgatggcaattggaaaacaactgacaacttcattacataaaagttgaactgattcgggtgcggtgactcacgcctgtaatcccagcactttgggaggccaaggcaggtggatcacctgaggtcgaggagttcaagaccagcctggccaaaatggtgaaaccccgtctctactaaaaatataaatattagccaggcgtggtggcgcacccttgtaatcccagctaccccagaggctgaggcagcagaatgcttgaacctaggacgtggaggttgcagtgagctgagatcgtgccattgcactccagcctgggtgacaagagtgaaactccatcaaaaaaaaaaaaagttgaactagatttggtctgatgcagttacagatttacaaaccgcgtcccaccctcctgccaacaccttccactcctcattcttgagggattagggatggaggtcatgcttctgtatcgacttcatgctgaccaggggcacttagtcccctaaagtgagagga

SEQ ID NO: 38564 - DNA, 2300 bp, Homo sapien
cttggtttgtgtactgaagcttataagattactaattttttttttcatattttagattcaggggatacatgtgcaggtttgttacctgggtatattgtgtgatgttgaagtctggggtacaaatgatcccatcacccaggtactaagcatagtacccaatagtttttcaacccttgccccgtccctccatcccccatctagtagactccagtttctattgttgccatctttatgtccataattatccaatgtttaccccccacttataggtaagaacatgtggtatttgattttctattcctgtgttaattcgcttaggataatggcttccaaccgcatccatgctgctgcaaaggatataatttcattcttctttatggccgcatagtattccatggtgtatatgtaccacattctctttatccagtccaccactgatgggcacataggttgattccatgtctttgctattgtgaatagagcttcagtgaatatgttgagtgcatgtgtctttttggaagaatgatttattttcttttgtgtatatatccagtaatggaattgctgggttgaatggtggttctgttttaagttctttgagaaatcttcaaactgctttccacagtggctgaactaatttacattcccaccaacagtgtatgagtgttcccctttctccacagcctcgccagcgtctgctgtttttttacttatttttaataatagccattctgactggtgtgagatgatatctcattgtggttttgatttgcatttctctgatgactagtgatttggagcagtttttcatgtttgttggtttcttgtacgtcttctcttgagaaatgagcaaaatgtcctgtcttttgctcatttttaatagggttattagttttttgcttattgatttgtttaacttccttgaagattcaaaggaacaaaggatattaaacctttgtcagatacagagtttgcaaatattttctcccattctgtaggttgtctatttactctgttcataatttcttttgcagtgcagaagctctttcatttaattagatcccaatgaggcaagtctaggaggacaggaatcacatctttcttatttagcttcatacctgggaactttgcacagtgcatagtacatagtaaacacaattattttgtgaacaaataaaaagtttggaaaagtaggtaaagagcaacctgtggtagaaccacagagtgctaagtctactgactatcctacaccaaaaaagttagtgaagaatttcaagatggataaaaatacaagaaaaccatgctttaaggagattcacctagtgtgagacagtgggtgtttccattctcagcattctctttactgcttgttgtggtttgaacgttcccacaaaagttcatgtgttggaaacttagtccccagtgcagcaatactgtgaggtgggacctttgggaggtaattgggtcatgagggctctaccctcatgaatggattaacccattcatgaatcaatggattaatgggtcatagagggagtgggttagctattacaagagtgagtctgttataagagccagtgtgggtgtctctcatgcagcctctctccatgtgaggcctgtgccacttcatgactctgcagagcccctatccgcaagaaggctctcaccagatgcggctcctagacctcagacttctcagcctccagaactgtaatatataagctttataaatcactcaatctcaggtattctgttgtagcaacagaaaacagactaagacactgctctacctcctgaacaataaaagatagacaggtccctgatattcgtaactttattaataaagaactatgataaagttttacagtcatttagctagtgaatccagtcacccactcatcaaggcaatggagctttatagttttacactagtctttaataatgcagtaaaaatttacaatttttttaaaataaaaatatggtctttctcaaaaagccaatcattagtgcttgtcatgaaagtgaggaggtcttgagaaaacaatgattctttgaaccagaaaaatagaagttttagatctatacaaaatgaggattagttaattatagtgggacctatagagtctcagataacattcttcttgaatgtttgagttctactgtatactaaaagcataatggagcaacaacaacaaaaacccatggaattaaggaatcgtttcaaatactgtctagttgtaagtaacacttcaaaatatttttgtcaactctaaataaaacagtaaacaaaaacttatttt

SEQ ID NO: 38565 - DNA, 2300 bp, Homo sapien
actgcaggcatcgctgtatacaaattttaaaaattaaaaacgctgatatttaatttggaattaacataaatattgatgatttctcttaaagtaggcaagacccgcccccccgacttgattcctgaaaccacaaatagtaccaaatcctatatattctatgttttttcctgtatacatatcaatgatcaagtttaatttataaactaggcatagtaagagatgaacaacaataataataaatacagcaattataacaatatactgtaataaaagttatattactgtgatctgtcaaaatatcttaatattttcctacaacagttgaggcaggtaacaaactcagacagccaaacggtggataagggaggactacggcatctactatttgggcaactgtaagcattataaaagatgatcttaaaaatgctaaatgctattattattaccatcatcatcatcatcaatatcttccttcagtcccaggaagaatgacagtctggggagcccttcctagaaaagtgtgtgtacacagtggcttgccatttaggaaaacctaagaaaggtatcttgcaggcattattattgaagcttcctaggcaggcttaccatgtgtttttcttcaaagcttgctactcatggaaaacttaggccaaaaagaatggaaacataacagtaagaagctgggcgcccgtctaaaaccaaatactcaaaccaggtggtacctggaacatcctattgacagggctgttttgggacacacccccaggctgtgagcaaggggaaatgtagatggactgccataccattgaatgaattgtcaagaaacttcaaccttgaaaaataagccagtttgctaatgacaacgggataaagaagaacacaagcggctccagaaatagaatttgacctggattataccaaatcgtgtttccattcgatgtataaaatttctataattgggaacctaattttttaaatactactcggatactcaagaatagaacagaggaaaagttgcatttccgaaggggccaactgtaaattaggtttagaaagccaggaccaattaaaagtgcacgtcgaccaaatttattaagttcactgtgcgttccctgggacccaaacccgttttcacttcacttcacttgccaaacttcaggggcgcgttcacctccacggacgcctgggggtggatagtatcagacacaatggccatctcctccagatcctcgtcgtacttcacctgcaggccgtccaggccccgcacgccgccctccacgccgcacaccgcgaccagcacgcggtcgccatccgggtaggtgagggggtccaggggcctcacggccaggtggcacgggagccgcgcccgcagccgaccgaacgggctcacctgcagtgtccactccttcagagttcggcgcgccgggccaggcggagggacctcagtctccgatccgggccagcgctcgcccctacctgagctgtacggcctggcttggcaagcccagcaagaccagcgcccagcgccagcccacagtcggacctgacggagacagagacggaagcagccaagctcccaacctgaacagggggcaagcatggcgcgcctctctcgccagtcctcagaacacttcagccacagggagggtcacttgccacggccaatcgacttggccactgtgccgcctcaagtcaaataggagacgtaagtcagggtttgctgaaacaagagcgagccggttggcttgactaggcgatgtaaacatcagctgcgtaatccccaggggcaagttgggatttgaaagctctgaactctgacctggaccccttgcctaagtccaccccctttcgctaaggccgacgggatacgtagttctaaagcggtggaaagtcgcagagctccgcctcttagaaaccacatatcccaggaggcaatgcgcaggggagcacgggtaagagggcaggtgttagaatcgctggaaaggcgggcgccctttgtttcaagaccattggctattggaggggcggtacatgggaggccactggccaatgggaagcacggaagggggcaacgagggtaaagctgcatggtcaccttggataccaaggacgcgacttcttgtttggagagggtggagctttggagtgagacccaggaggccaaatcccaaagagaaaaataggagcctaaataaggatcaggaccaagggaaggggtaagaaactgcgctttttaagttgacaactaggtgcaaactaggagtaacctatgtggatgtcaagatccaagcttcactaac

SEQ ID NO: 38566 - DNA, 2300 bp, Homo sapien
agaagaggcctgcatggggacagttctggaacctaccatgggaggctggtccccagcatctgtctctgtggtatctgcacatataataaggaaagaaactattggcactcaatgcagaaaacttttttagtaaaatattacaaaataaaagcaaacacacagacattgcaataaaacatgtcaaggagttattagaattcttcaaagagtttaaaatctccagttttgaaaattgctataatattgcaaataaaatatccataagtttaggaatagaaattaaagatgattgcatgtgacagaaaataatagttttccaagcttgaataaagcttatgaagctttgaataaatgaagtatgaacaagaaagaccattttaaattttattttatttttgtaattgaacatacaacaatagaatgcatataagcaagtgttctggtgtatatacaaaatataaagccacttttggattattgcacaacctccagaagttacaggaattgtcagaggaaacattaaaatgaatattgaataaatgtacatttaaaattaaattcacagaggaagctgatttttatgaagagttaaatctttttagaaaattgttctatgagaatcattagctcaaaaggttttattttgaaatgatttatcagaaatttatctaaatgttatcacagcctataaatattcttataaacttcagtgaaagatgcatgagcaggaagattcttctcaaattaaaaattgccaaaaattatttatgatcttgcatttcccaagagcagctcacatcactttcagtttgatcaattaaaaatgaaattacaatgagtataaattttgatgatctagtaaattaatttgcagaaaagtgagccagaaaaatcttatgatcaatcaagatattacattattgttattttattatataaaattgtgacatcaaaaatattttcttaggattcattactattcacttagtttttgttgctattcacgtattactattacccctattatattttataagtaataaatttttttaaagggaaaactttttatatattggtaaccttcagagaacatttttctgacattttgacaaggaatcccagatttgtttttttgtactgggtcctgcaaattatgtgggtcaccctgccaatatgatttgaggaaaaaaattttcgaagctggtgttagcagttgcccacagcaattacagaagaacctcagttttgctcctgtgggaatttggttttgaacaaactttccaataaggagtgaatgaattattgttactgcattgatttagtgttaagcattttgtttctgaaaattcaagtaaactatttgcaattgtaatattctttggacattaaaagaacagcagaacttgtttgtcccgttggcaattatttttagcacacattctaagtatgttatttgctaggtgttgaaggtatatgggtaaataagaatatagtttctgttctaagaagtccaataaggtagacaatatgaaaaatagtaaattacaatacactgttttaagcacttttctacagaaatatgtacaatgtatagattatagaggtatcagaaagcacactttgcttataataggatagctggagaggtttctggcttcttgtttcataaatgtctaggctgatactgacttgcattctcattataattcatgtatattttacatatataattcatatatattttttattttccaattaatgcaacagtagcatacttttaaaaataagaatgattgatttgaatgcaacaatagagagtgtctttgcaaaaaacagtcttttataatgagattgtagctaactttcctgatttgtagtttcattgaacaatagcttattccagttttttgtttatttttattattttccattaattttactttataagtgaagacactcctaaatagccacatatgtattaattttattttagaatcgtgaaaaatggaagacagtagcacagacacagaaaaagaagaggaagaggagaaagatgaaaaggatcaagagcccatttatgccatagtgcccacaattaacattcaagatgagcggtttgttgatttatctgaaactccagctttcatttttctgcatgaggtatatttttctttatatgttactacagtaaaacccaactcaacatgtacttaaaaattcaaatgaagccaatatcattatcaaaattctttattacatatatcctgtaggtgatatttacaacttgatacactaaaaca

SEQ ID NO: 38567 - DNA, 2300 bp, Homo sapien
ggtttttttttttatctatgttgtcatcatgtctcctttttaaaattatctattgtttcatttatttcttacctcccaacagggaagtgtcacagcttgaaaataggtgagaagaaatgaggttaggagttaggggattaaatagatatttttagctaaaaagtttttgtctaaaattggatatattgaatggaatgaagagaaaaacaatttttgaaagagctatatgaagatggaagaaaaaaagtcataaggtgtgtagaacatgtttgacaaatttatttgggaagaatgttacatttatacactgcatttttttttttcttaagtgctctaagttttttttttctttttttgtgaggggtggggctgggggatggagtttcactcttattgcccaggctggagtgcagtggtacgatctaggctcactgcaacctccacctcctgggttcaagtgattctcctgcctcagcctcccgagtagctgggattacaggcacacgccaccatacctggctaatttttttttttttttttgtatttttagtagagatggggtttcaccatgttggccaggttggtctcaaactcctgatctcaggtgatccacatgcctcggcctcccaatgtgttgggattacaggcgtgagccaccacgcccagccaagtgctccaagtttgcatgactatcattcctgtatgagggaagaaatagctaaattcctccgctacagctacaggaacaaaggctcattaaagctgatgatctgtttacatgatcagaggtagatctagggttggaagccaggtctcctgagtatgcgagaataaatacagtcatggaagagtaaagagtctgccaacattttgagaatgtgaataggatttggctaaaattaaggggatatacagaaaagtcataggaaatcaggttaaagacataaatatgagataggctacagagtgttttaagtaatacaataaaacatttagatttttgcccatgtcagtcattttgaaattatttttaaagcaaaaaaaccctttttaaacaagaaatcttatgagatgtcaatatgcaaaacaaattaaaaggaggtggtttctctaactgaagctgttcctctttcctgccttcagcctctgaagagaaagttagaaaactattatcattaatgctacatgttttgaacaagctgatataccaagtggcccagagagcaggtagaagaaccagcgtggagacagaaagcaagaggcccgcctgccagggctacctgcagaaagaaagggcaaagatgctgtaggcaagagaagttcaggacagacactggcatagctcaaagattcacatttgagcagctgtggaagatgacagtacaattaccaaaatgtcgaagggcaaaggaggcagctactggttttgatgaaagacaattatgtccttttaaatgggtcttagacatttagacattaatatacactatgctacggacaaaggaatagaaagtagcacttttttctccactagttttcttctctttttcaagtagatgaagcaaaagtcaactgcaatagtcagaaagctgtactttgttacacttagaaacttctaaaagtgcttaagatttcacctgaaagtccaacatgaagaaaatacaggctccccaatgccccattctaagaaggaaaaaggaccattttcattttagtaacgtttctgttctatagacagtttggataactagctcttactttttatctttaaaaactgtttttccagtgaagttacgtataattatttacttcaagcgtaagtataccaaattactttagaaatgcaagacttttcttatacttcataaaatacattatgaaagtgaatcttgttggctgtgtacatttgactataataatttcaatgcatattatttctattgagagtaagttacagtttttggcaaactgcgtttgatgagggctatctcctcttcctgtgcgtttctaaaacttgtgatgcaaacgctcccaccctttcctgggaacacagaaagcctgactcaggcagctgccgctattaaagcagctccagccctgcgcactccctgctggggtgagcagcactgtaaagatgaagctggctaactggtactggctgagctcagctgttcttgccacttacggttttttggttgtggcaaacaatgaaacagaggaaattaaagatgaaagagcaaaggatgtctgcccagtgagactagaaagcagagggaaatgcgaagaggcaggggagtgcc

SEQ ID NO: 38568 - DNA, 2300 bp, Homo sapien
actaaagaaaattataatcttacccattgtcttattactttaaaagaaagctacaaaattccatgctgaaacacgccaacaatgttaccatcagagagagcatgcaaaacgatgtgcgcaaaattgtatcaaaacttcaggaaatgaaagaaaagaaggaagcccagttaaataacattgacagacttgccaacacgatcacaatgatcgaagaggagatggtgcagcttcgcaaaagatacgaaaaagctgttcagcatcgaaatgaaaggtaaaaaccaggtgtgagaacagagcaccagggatccaactgaggaatgtcacctctttttctatctagacttgacagtgaatagtgagggaaatgtgatattcaggttgcattagcctttggagagaagggactgtgtgttgcttccctggaaaataagaaacactgtcctcacgctgggcacagtggcatgatcccagcactttgggaggccaaggtgggtggatcacttgagctcaggagttcgagaccagcctgggcaatagggtgaaaccccatccctactaaaaatacaagaaattagccaggtgtggtggtgggggcctgtaatcccagctacttgggaagctgcagcacgagaatcgcttgaacccgggaggcagaggttgcagtgagctgagatcgtgccactgcactatagcctgggcaacagagcaagactccgtctccaaaaacaaacaaaaaaaaaaaaagagagaaagaaagaaataccgtcctatgtcataaacaggcaaagaggaggggtttgggaaagttgcttgcttttgaagatcaatgtcctttcctaagtggtcattcgggttgcctcttataacatcagattctttcagcataattgacataaataagtgtggaacttgtacccaatgttgtggtaagtttggtcttattatatttagccattctcctagttcatttgctcagcaagttagtaagacctttaggagtagcattatttcttccaggttgcagttatatcattaatcaatgtttacttcagcagtttctcccaagttacttgtgctctgagaaattggaatgtgaaatttgcagagccctgtgataatgacatctggtatcagattttttttaagcaaactttgattgtgtgctattctgtataaggcattagagtgctagaccttgagagtacaaaaaagtggtaaaacattgttcctggcttctgttgtcaagagaacttgatcttgagcctttgaaaggaaaacagacaaaatatagagctgggattagctgagtacaaccacatgcatgcatgttttgaggaaggggagtcatagatagaagcaattaaaggaggaactctgaaataatgtatatgcataatgtgtgggaagacctttagggtcctttgaagaacagcacattttcaaagggctggtaggtttttctccaggggagaaaaaaaatgctattcagctcctggcacaaaccaaagcgtttggacaaacagtgtgcacccaggtgccactcagatcagtggtgcatgatcggtcatgcagaccagagctgctggggttagaacattcttactttgtttcctccccatattctccattcaaggaggggtctttctcctggcatgattacaaaggatagatttttgcctgtttatggggaaatcacaaccagaaatattcaacttgagaagaaactaatgggcctagcaacttaatatagagcagactcacaccagaactacattccctggccccctgcctgtgtgcttctggccaggccttggttggcaagtctgacccgagaaaaggatctgcagaaaatcagactatgggatcactttgtttgtgcattgggaatgacattctttcccaccccaggaaaacctttgggactttcagagacattgtggctagccaaccacatggtcagcctcaaagttgagaggctcagtaaccctcctatccctagagaattccaaagtgtggatgtaatttaactagaaagccattggtgactatctgtgatcctctggaagtatgctatgttgtgtatatcttgcatccaaagccagagggaaccacaatgactagtaaaacggtggtctcaatgcccacttagcctctgcctctgaatttgaccatagtggcgttcagctgatagagcgggaagaagaaatatgcattttttatgaaaaaataaatatccaagagaagatgaaactaaatggagaaattgaaatacatctactggaagaaaagatccaattcct

SEQ ID NO: 38569 - DNA, 2300 bp, Homo sapien
tatgatactcattttgtgccacgtactgttgaaagtacacacaaattagtacacttaattttcataaaattttaactggtagaaacttaagttggaccacattaaattgtcagtgcccaaccattttttggccaacaaaaatggcactttcatgtggttccacttaatattattcccattttatagatggtgaaactgaggccagaaaggttgagtaatttgcctaaagtcacatagctattaagtgacagagctgatattcaaatccaggcagtttggctccaaaatccatgctgcttcttgaattttatattccagttgaattagttgatgttgaaacatgggctatttatgggcctaaagaatccctacagcatatgctgctctgcatttatgacacatctgatacggtttggaatccttcattcttcatccaccttatttaatgtctgtctgtatggcagtacaaaaggagttgaaagggaccatttgtgaggggaatggatggtttaaaattatcccaatggaatatgagttatgaggtacaccctagaaagattgaaggattacaggaaaactacctttgtggcttaaattcttaattgtttgttgttaacacaaaaaatttggtagggaaatggattgacagttttagatttgttcattacagatattcaagcttcttttgaaaataaatgaaactgacttactggggacattgttacgcctggagatcataaaaatccactttctacccaactcacattccttcacagtgataaggagggaaaacaaagatgttatccatagtgatcgagaattattataagtagacttatggcttgtgtctgtgggtcaggtaaggaaaaggtgtttctcatttttttaattatactttaagttctagggtacatgtgcacaacgtgcaggtttgtaacataggtatacatgtgccatgttggtttgctgcacctattaactcgtcatttacattaggtatttctcctaatgctatccctcccccagcccccaaccccacgacaggccccagtgtgtgatgttcccccccaacccttgtccaagtgttctcattgttcaattcccacctatgagtgagaatgtgtggtgtttggttttctgtccttgggatagtttgctgagaatgatggtttcaagcttcatccatgtccctgcaaaggacatgaactcatcctcttttatggctgcatagtattccatgctctctccttttctcttgaatgtttatttccatcatgtgacatggaaatagaggggggaggtgacactggatcatgtgtgtgtgtgcatgtgcatgcttgtatgaattcagggtgtttctatatgcacatgcgtaagtgtgcttgctttccaggcctattggactaatgatgactgtttgagttacgattgtcagagacttgtaacatgaattggttaaagttaagaagagaatggggaacacaaaaaggaagtcagggtttagagctagggcatttgcttttaaaaaaaggaactgtattgcacttgctggctagaggaggccaggagccctggaagatgaggattaaagttgggtggagctgatgactaattatagccaatttgctctgttgctcagagctgatgtatagaggccaagaacaggtccctgaacttgggactgtgccctggggatagaggatgaagggtcatcagggacctttagcatatgaacacagggctggagagggaaatttgaatccagaaaatcaatatcatcaataatctagtgtaaacttttcttcagaaataattttgtaactttttactaatagttttgtgaagaatttccaaatccatttgaaaaacgttgttgttaattaactagtaaaatagtggagtttttttggactcagggaagctagtggactcatcctgttagcccattaacacatgcttgtgggcagagcctgtacttcatctgacccttgatgttacaaggacttaggactgtgccccatggcttgtgattcatgtgtttagagagagaaaatcccatgatttctctgaatccaagccctgctcgttgggcatcatccttttgtcaggtaccttcccaagagtaggctatgattcttctgtcagtcattcccacattcaatgagttgcaaagcctgtacatgttaccatgcctctctgattcagtgcctccattacctcttatccacgttcaggcaatagcttctctacaggtcttcataccttctgtagcaaattattactccaactcattctttgcc

SEQ ID NO: 38570 - DNA, 2300 bp, Homo sapien
tttcctgtgaatctgtaattgtttcagaataaaatatttcttaaaactttaaaaaaaatctaggtgttctgattacctggaaagtatatttcttctctctgatgctcttaactgtattgcattatatccttgacgtgaaaagtcaccgataaaacctttaccttccacatttctgacgtgttctcactcctagaaaacaggaaaaagaaggtctgcggcatacgtgaggaatattcttgataatgcagtaaagtaagtgaaagcagaggttatcatatctgtaagatggttgacatttacaattactttgttttgttggctaccttttatagaagtagtttacttttgttgcatatccccagcaaaataatattgtcagcttcatgaatgcagccacttggaccctattctggaatttggtgctggaatttctggtgggaaaagcttatatgttgaaccttatagacttgtaacctgcggatagatgtttacaatggataattggtaaagaaatttcctattagcattttaggagagaaaggcaaatagtaggttgattttttttttttttaaagtgtcagtgggctagtgagcttgcttttattttgaaagcctattttctggatatatgagtcatctcagagtactaaaagtataggccccattccaacctctgttctattttctgtccccattattttcaataactgagagctacagttgttctaaattattgccgttgttggcactaaagggttttgagattttttaattgcctaatgtggctttcactacattgatcaaagtttttgaggttttcagcagcttgagaatagtttctacagtggtttttatgaatttttaaaggaggatatctttgtatgatgtggctttaaattttttaaaagcaatgctgtctgtgaataacatggctaatttcttcgtagggtgatttctaacctagaagcaagaaatttgggtaagaaaagatctgtaataaagccttctgggttccagtcagtgttttgtttgtagcactgttcttcctaccactgtgggttggcaagagaatcacttccagtagtgtggtgcaggcagcaccttttaatatcttgctgttagagtggccgcacggctcttcccatgtctgtctaggcaccaggacctccggggacagctgctgaatgtgcttttgcgatgggagtccctgggtgatggccttgcggttctccttatttcctgtcatacagagctgccctctggctgtgcccacaggatgcattttggcatttcccttggcttggtgctgcttgctttctagctgtctgatcctaccgggtcttgccttgtttgtgcctctcatttgggttaaaaattgggcacacaggtcctagaggcataaagatgaggagcttccaggtaagcagtgtggttctgggggaaagagcacaggcttgagagctagacagagctggacttatattccagcatggcctcttgtgtgaaccatgtgctcctgggcaagtcacttacccatttgtgcactgtccttaggggagtgaggagaaaatgagactaaatggggtaatgcagatagcacctaacatagtgcttagcacatgagggtacctgaggtggctgctttattccttagtgtgtaaagaagaaatgttaacatgtggcttctaaaccaaatgacaggtattatataatccataggtgcggggagtgagaggataggttaggagcggggatggctggaggagggagggaggttggaagaggctccccagagggctgacaggtgagttaagtcttgataaacaaaggggacttggccaagtgaaaccaggggaggggaatgctgagcatattcaggcacaggcttatttgtagttgccagaagaacactttcgtgcctcatgaaggtcagccttcattaaataagcttttgtttttatatcccactcctgttttatgggcttggatgttgggtgattctaatggaaactattttatacagtgcattgctgcacctcctccagctgtgcacacagcacagtgaactgtgacagtgcacttgtcatccagcttaggctgacagagcctgggctcactgaccagcccaggaggaaccagcctctgccttaccaggccatcaatccctgaagccaggggatctgccctgccagacacgggcatgtgtgtgtgtgtttcaggcttatcatccttgcattgctgggggtttcgcaacacggggaacgttgctggtctggctgaggtttctgtcgtgccacccc

SEQ ID NO: 38571 - DNA, 2300 bp, Homo sapien
agcttgtccaacccacagcccaggatggcttgaatgtggcccaagacaaatctgtaaaccttcttaaaacattatttttttgaggttttaatttttttagctatcagctgttattagtgtatgttatgtgtggcccaaggcaattcttcttcttcccagtgtggcccagggaacccaaaagattggacacccctgactagaggctagtatttcttggcttgtggccacttcgttccaactactttcctcattgtatggtcgtcttctcttctctagtcaaatctccctctcataaggacttttgtgcctacctgtgtctacctggatattccaggatagtctccccatctcaagatcctagtcacatctgcaagatctcttttaccctattcacaggctctggggattagcacgtgcatatcttcaggagccatcattcagcctaccacagatactactgccccttttggtgagacaaaaattccctgttcattgagggactgaacatccatccctagagcctactcaccaaatgccaaataggaatctccctctcactacctcaatgatgttaacaacccaaatcactgtcatatattttcaaatgccaccaccccacggacatagtgccatcctaattaactagttaagtggtacagctgggaggtaactaggtcatttgatgccgataccctttccattatgtcccactgtattgttgtttgtggttttctagtaaagtgttgctataataagatgattgcaaccatttgtgctaagcactttagcatcatttaatccacgttgactgaaaggacacttgtaagtcaactggtttgagttctatatcctcttccctttccacagaacgccttctatgcaaatgattagcatgtgttccttcacttcttaggaaaaggagtctagctggctcacttataatctaaatgtttcatctatataaaattactactgtgtgaatttctgttttctaagatcctagaaaaagtattggcaagggctacttccacccttccattctccagaaacctattttttataccttgtctccatctgagtacaaatgttcttgattcaaaaatatctagtgcagggactgaaggtgtgaattctagtcagcttgatatgcaaggaaataaattagtacttcacaaagtgtcaatgtgtctgcagagattattctgatgaatatcgatttaaaggttctctaaacaaaatgctcctgctactgatgatgataatgatgatcactggacaaacatgggcaacaaaattttagagcttcccgaaactggcagaaattatgaagaaaattcccaatataggctatttccagcttatcaaattaaggaataattcgtgttgcttgatatttttattctaatttgctctgagatcatttagattcacataaagccacaaatcacttagaaacaaaactgcaggtataaattaagataaccatagctaaatatctgaagaaaattagccaaagatggaaataaatgaggtttacctagtaagagaaatgtggctgggtgtggtggctcatgcttgtaatcccagcatttggggaggctgaggcaggaggattgctcaagcccaggagttcaagaccagcctgggcaacatgcctgtaatcccagcactttgggaggccgaggcaggaggattgcttgagcccaggagttcaagaccagcctgggcaacatggtgagactccatctctataaaaatagaaaatattagtggggtgttgtgggcacagtcctgtagtcccagctacttgggaggctgaggtggggaggatcacttgagcccaggagtttgaggctgcagtgggccgacatcacaccaccgctactccagcctgggtgacagagtcagaccctgtcttaaaaaaaaaaaaaaaaaaacgggctgtcattagatagcttattacattggtaaaacttttgccttttgagatattcagagacaagcagggataatgtgacattctgtacctgtgcagcttttaccacatgtagatgatgtaaatctttctcttctatagactattatgtggctgtttacttacctggtcatttcttccacctacttaatgttcaacatccagacctgatctgccacaatctctttctgacaggtacggctatagtttttctcttgtagaggtggcccatttgagtttgttttgactttaatatctatgtttgggtgaaaggagtttcttctatttgctgatctactgttttttttttttttgccaggaaata

SEQ ID NO: 38572 - DNA, 2300 bp, Homo sapien
ttcatatagacaaggacacaagttataagttcacagcttagttaattttcaccaagtgaaacacacttatgcaactaagactcagaacaggaaggaaaacattaatggaacctcagaagtccttcatgctcctttctaacagtcacttatctaacactgtacattagttgtgcccattattgaaaacttgtgtatgaattgaaacatacaatttgtaccttcttttggtggtggggaaggttcttttgctcagtttcacatgtgttattgcagaatattaattcattgttttgtactattccactgtttggatataacacaatttattcattcttcacttaatggatagtttgggtttctggtttgggcaataatgtaccacagtactatagacattcttatgtgtcccttgctaaatatatgtatatatttcttttgaagatatatgtacaagtgcagttgctgagtcatgtgttcagcttcactagatattgccagttttccaatttatactcccattaacaatgtatgagagtttcagttgcttcagattttttttgcatcacataatactaaaacataataagtcaaggatgcctgttacaacttttagtataactaataaaagaatagcaaaaacatataactgacaataggtaatagaatgaaataataaacttagaagagtagtaaaacaggtgagacacgtagaaaacaaatagtaatatgataaatatcaacccaatatgttagtaattacattgaatgtaaaaatggactacatatcccaattaaaagattaagaatgtcagattggaggaaaaaatctcaagtggatactgcttataaaacatatcttcaatataaggacacaggaagattaataacagaaagttatgcaagcactaaccaagctgatgtagttatactaatatcagacaaagtagaccttaaagtaaaaataattattagaaataaaggacattgtataatgaataaagggttgctaatccagctcctatattaaaaacttatgtgtaatttttcagacccaactatgtgcagttacaaagactttatctgacaggccttatgggagaaagctgccctccccaaatccgacttggtgtgtggtcaatgccctgtagtccctgaaatgagttgtgcctgtgattcaggccccgctggccagccatactcttacagatagctgcatccctagcccgggttcttcatttagaggcctctttatcagaggcctttagcagagacctttctcaggtgcctctaaaccaccaaaaccgccttagcagcggggagaggggagcttcgaagactgttttttctctactccagtgaaatacttttccactcctagctcttctccctctccctaccctcggctcctgtatccgtgatcctgcaggaacctttttgggagggtccctcgatagtgaagagagctccatatctgtgctgattcacctgacccttggctaatggcaccattccatggggagaaaatagaccagggacattagcactttctcttgtttagcctcttgctttatagcatcacagtaagtgattaaaagcttgactgttaaaaagttaatattaactttttaatcttgttttaattgagtactcagacacctggcagctcagcttagagcctaacagtggttaatctacaggaggctataacaattccaaattcgtatgcccttaatgatatatcctcaaaatgcataaagcaaaaactaatagatacttgaaatttattgtataacattcacacagaaaagagtgtatacagttcagtgagttattgcagagtatatcagtatacccaaaacatttaacattaccaacacgtaacaaggctcacttgagatacctctcaatgactatggctttctccttccttaaaggttactactgtttgtacttctaataaaagagattcgttttgcctgtttttaagttttatataatagaattattagtatatatttatatttggcttccttcactaatatattggttagatatgtttttaaccatcttctgctgagtattaacctcctattatcatttcagatgttttagaaaacgattatgagagcttacatgtattaaatgttgaaagaaatggaaatattatttatacctataaggtatgtctatattcttttttattgtggtaagatgtaaaatttactgtttttaatcatttatattctctttttacagaattctatactgtatcttattgaagggtaatgaataaacttgtt

SEQ ID NO: 38573 - DNA, 2300 bp, Homo sapien
aggctggtcttgaactcctgacctcaggtgatccgcccgcctcggcctcccaaagggttgggattacaggtgtgaaccatcgcgcctggcctttttatttttattttttgagacagactctcgctctttcacccaggctggagtgtggtggcacgacctcggctcactgcaatctccgcctctcaggttcaggcgattcttctgcctcagcctctggagtacctgggactacaggcgtgcaccaccacacccggctttgtatttttagcagagacagggtttcaccatatcggccaggttggtctcgaactcctgacctcaagtgatccacccaactcggcctcccgaagtgctaggattacaggtgtgagccactgcacctggtctgaagtgcatatttctggagtggatgtattagttggattattttaacagaaatattttcctttttttgaagaagtaaataaactatatcctgttacacctattttcttttcttttttttttttttgagacagggcctcactcccgtcgcccaggttggggtgcaatggtgtgatcacagctcactgcaacctccgcctcccgggttcaggtgatcctcccatctcggcctcccaaagtgctgggattacaggcgtgagccaccgcgcccggcctacacctattttcttcaatgagtttttcactaaattccatagtgctcctaactttcatctgagaaagtattctaccactgatatttcctattataaccaaattcgctgaccaatctgctctgtaaaaaaaggtttgtgggtataaatgacgaaagtcagttcatggatcaaatccttcagttctgtcacattgtgagaggccactgttgtgaaagtaaaataacttctagttacggctctgctaagaatacgctgggggatgtcaggaagtcgctttatttgtaaaatgatgagttagaccagaatatattctctgatagaagtttacaaagatgaataaagatttataggctaggcgcggtggctcacgcctaaaatcccaacactttcggaagctgaggatccctagtgcacaggaattcgagatcagcctgggcaacctggtgagacccccttctctaccaaaaataaataaataaataaataataaatttttaaaatgtattagctgggcttggtgacgtagtgaggcaggaggatgccttgagcccaggagttcaaggctgcagcgagccgtgatcatagcactgcactttggcatgggagatagagcaagaccttagctctaaaaaaaaaaaaaaaaaaaaattaatagatttataaagtccattctatggaggaaagtctcttattcagttatgaactgctgcgaacctaaaggcaggaaggcaaattcccttcagttcggcaaacacgaagaccccacattcgcgtcgtctgtgaagaaggcactccgaacctcaggcgctcactcgccaggtttaagaggatgagcaaagaataaaagtcctctcacccaggaagcgtttcgcttcccttagctggagccacgctccaaggtgccaaagcctaattgctgtccactctcaccaatccgttagcaagatgagcatctacctgctgcgaacgtggcggtgacactactacagctcccagcctgcctcccgcccgcccccactcctggactccacagaccgtgacttgtagtcccagcccacggctggcggcggtgcgggactcctgaaaactgcttttcctccctagtaggcggtgagaccgcaaattccatcagaatcctactctgacccactagggcttggcccgctcagagtcgcattccctcctccaaatgaaccaactctcctcccagcgatactccgacctctgagcaccccgggcggggccacgccccggaaatggagtcaggtctccaggccgcccgctgaagtgccttccagccactccaagcggggctggggccggcggggcgggcttgggggcgtggccgggaggcgggcggggatgcatctgcgggcgcagcgcttggggcggagccgcagcgcgaggccgcgcatctgggtggcggcggggacgcgcccgtggggagaggcggctgcggctgcggctgcggctgctggcggggggtgggggggaggaggaaccgggaagggggggcagggcgagcggagagctagctgtgttcctgaggcggcggcggcggcggcggcggcggcggcgtctccgacggaggaggagggcggggaaggaggatggagcaagctgggggttggggttggcgct

SEQ ID NO: 38574 - DNA, 2300 bp, Homo sapien
cctccccaggctcaggtgatcctcctacctcagccttcctagtagctgggactacaagcatgcattgccacatccagttaatttttttgtatttgttaaagacacagggttttgccatattgcccaggctgctcgctctctctctctctctctctctctctctctctctctctctctctctctctcactctcactctcactcgcgctctctctctcgctctctctctctttttttttttttttttttttttggagacagtcttgctctgtcgcccagactggagtgcagtggcgtgatctcaactcactgccatctccacctcctgggctcaagcaattctcctgcctcagcctcccaagtatctgggactgcaggtgtgtgccaccacacctggcaaatttttgtattattagtagagatggggttttactgtgttgctcaggctggtctcaaactcctgagctcaattgatccacccaccttggcctcccaaagtgctgggattacaggcgtgagccaccatgcctggcccctatttctttaaggaaaaaaataaaggcaactagagggtataacccacccgaacaaaggagtatacccagaaagaggaaaatgagacctgggaaacaggagaatctgaaaccagagagaacattagctctgtgatggactagggaaccagtagtccacactggagcaggaggccaaaagttactaacaaggatgtctgtggtattgatacttactatgtgtgcttgtcattattgagaggaggtataccaatctgcaagaaagttagaagaaaagctgagtaactgatgatgcatagagagctaagccatcagaaatccaaggcagtcattaggggaaaacaagacactatagaagaaaagatacgaaatcatggtgtcatagatgggaatactatctgcagtcatacgactgaggtaatgaaaaattacaatataacagtattggaaagatagagaaggacacttccacagtaggaagtcagtagaaaatgtgtgaaacaaagatcaagaaataacttttgaaatagtctgaaatacagaggtgtaaattttagaagcagctataaaaaaatgttgaaagttgatgcctctggctaacaggagggctgcggggcagagactatgtttttcattcaaagtcttgtatttgactttttaaacagtatatgtgtattaccttgatgaacattaaattttcttagtctgaaaaactgcagtttttattcgcaaccagattgtaatggctcttaatatgctactcttagctacataattctcaggtatcaacttgtttaacagtcttaaaatgccctttttaaatgtttgtttttcagttgccttgttgaaggggatgctaaagaagaaatactgcagccaccggaacctcatccagtgccacccatcttgacaccttctcccccttcagcttttccaacagtcactactgtgtggcaggacaatgatagataccatccaaagccagtgttgcatatggtttcatcagaacaacattcagcagacctcaacagaaactatagtaaatcaacagaacttccagggaaaaatgaatcaacaattgaacagatagataaaaaattggaacgaaatttaagttttgagattaagaaggtccctctccaagagggaccaaaaagttttgatgggaacacacttttgaataggggacatgcaattaaaattaaatctgcttcaccttgtatagctgataaaatctctaagccacaggaattaagttcagatctaaatgtcggtgatacttcccagaattcttgtgtggactgcagtgtaacacaatcaaacaaagtttcagttactccaccagaagaatcccagaattcagacacacctccaaggccagaccgcttgcctcttgatgagaaaggacatgtaacgtggtcatttcatggacctgaaaatgccatacccatacctgatttatctgaaggcaattcctcagatatcaactatcaaactaggaaaactgtgagtttaacaccaagtcctacaacacaagttgaaacacctgatcttgtggatcatgataacacttcaccactcttcagaacacccctcagttttactaatccacttcactctgatgactcagactcagatgaaagaaactctgatggtgctgtgacccagaataaaactaatatttcaacagcaagtgccacagtttctgctgccactagtactgaaagcatttctactaggaaagtattgccaatgtccattgctagaca

SEQ ID NO: 38575 - DNA, 2300 bp, Homo sapien
atgtgcctatcgtcccagctactcaggaggctgaagtgggaggattatttgcgcccagaaatttgaggccacagtgtggtatatcatctgtcaatagccactgcactacaaactgggcatcctagcaagaacctgtatctccaaaaaaaaaaaacttgaaaagtgattaagactatccacgtgttttttcttactgtttctgtctacttcctaatctgcagatctgcaaatggaataaatgcaaatgggataaatgcaaaatggaataaatgtctggcagaagtcagaatctggaatttttaccaattttgtccaatttaattttacagtcaacttgatcagctactgaggtgtgttggaagtcatagccacaatattttgcagctcctcccatcaaggtagtgtttgttttcccagccctagtatttgagctggccttgtgccttgctttaaccaataaaatgagcagatgtgtttctgggctggttctgagaccttaagagaccttctgcttcagtctcttggggtcctgctggcatgtaaagaagctcaggctaagccatggacggatgagagaccacgtggggagattcccaacaagtcccaacccacatcacatggaagaaagtcatacagcagcgccctcatgcagaatggtgagaaatcattaagtgttcttttaaagttatgttttatagtaggtttctaatttattattttttcagatgtagagatggggccttgctatgttgcccaggtcggtcttgaactcctggcctcaagcaatgttcccatttcaccccctcatcgtgctaggattacaggcacgagccactgcacctggcctacggtagtttattatgcagcaatgtatgacacaaacaattacaataatggagaacagaacataagttaaatctacaaatatttcatgtagattctacttttttcctatccactatcacttttccactgtttgtaggtgtataaaatcaccttgtgtgtcccttctcttttcctttccacagcacggtactggtaatgaacagcaaaaatgtcaaaaggctgtagctaaatgccaaagaatttccaaagtcttaagccttaaataatcagaaatgtgcctgcatgtttgataaaactctctaagaagctcttaagtctgggaaagcatttacccagactgtaaaatagaaaggcattctaatagtccttttagcaattatgttttttaaggctagaatgatatatacacataatgatttttattgtgaaagtcttaagcccatgattgggagttagcacaagtctaaaaatccttcttttttttttttttttgagacagggtctcactctgtcacccaggctggcatgcagtggcccagtctcggctcactgcaacttccacttcctgggttcaagtgattctcctgcctcagcctcccgagtagctgggattacaggcacgtgccaccatgcctggctcatttttttgttttttttttttgtagagacaggatttcaccatcttggccaggctggtctcaaactcctgacctcaaataatccacccacctcggtatcccaaagtgctgggattagaggtgtgagccaccgtgcccagcctcctttttatttaaatgtctcaaaacaattatttgagaatttctaataggcaatgctgtatccactgcctacaacttacttatgtagcaagcgtccatatggtgctcactgtgtccacatactgttttaagtaaatcatttaactaaccatataggcactatcttcaatctccatttatagatttggacatcaagttaaagagagaagttaagtaacttgtcctaggttacaatgcagggaagatttgttccctctatactagatgaaggatgtgggagaggaggcgggactggagttaggtgatattatatattgaagtaacagctctgtttaagtaattcttcccaggaaattaaccatgagagcataaaggccttagcatttgacatctattatgtagctccaagctttctaccttatctgtcactcccaccgctcctccaccctaaccttcaaccagaaatttagcccccaaatataccttggaattttccaactctgtgctttgctcctttggccccaccctgaccactttctccaaaagcaaaagtagagtgacatacctttcaaagtccaccaagtttactttgtttataaagccttcctacttctccatgtaccactcccttgacctctggcagaatcagctgctttctccatcaggcttccttag

SEQ ID NO: 38576 - DNA, 2300 bp, Homo sapien
gctcactgcaacctccacctccaggggtcaagcgagtcttttgtcttagcctcccgaggagctgggactacaagcacgcaccaccacgcctggctaattttttttgtatttttagtagagacggggttgcaccatgtcagtcaggctggtttcaaactcctgacctcaggtgatccacccatcaccgcctcctaaagtcttgggattacatgcgtgagccacccaccactcttggccgaaaaaaaaaaaattcttaaaaatattcttaaaaaaatgagtaaataggcactgtcgccccgggtggagtgcaatggcacgaactcagcttactgcaacctctgccttacagattcaagggattcttctgcctcagcctccagagtagctgggactacaggcgcatgccactacgcccagctaattatgtatttttagtagaggcagggtttcactatgttggccaggctggtctcgaactcctgacattgtgatctgcccgccttggcctcccaaagtgctgggattacaggtatgagccaccgcgcccggccacattccttatcttttaagctaaaacccatctccccaaattgcttattttcgaagcaaaaatcaaagcacatgcttacaaaacatcgaacacgcagtgtgcttactaaacgctaaaatacagaaacctaaaaaaacaattcttgcttttcaaacatccataaataatcgccaacgaatttttcctggcaagtctacgttataataataataatattattattattattattattttttgagacggagtcttgccctgtcgcccaagctggagtgcagtggcgcagtctcggctcactgcaacctccgcctcctgggttcaagcgattctcctgccccagcctccccagtagctgggattacaggtgcgcgcttccatgcccagctaatttttgcatttttagtagagacggggtttcaccatgttggtcaggctggtctcgaacttctgacctcgtgatccgcccgccccggtctcccaaagtgctgggattacaggtgtgagccaccgcgcccggctataataattattataaaattcaaatcttaaggccgcacatggtggctcacgcctgtaatcccagcactttgggaagcggaggtgggccgctcacctgagatcaggagttcgagtccagcctggccaacatggtgaaaccccgtctctaataaacacaaaaattagccaagcatggtgccggacgcctgtagtccctgttactggggaggctgaggcaggagaatcgcttgaatctgggaggcggaggttgcggtgagccgagatcgcgccacggcactccagcctcgacaacagagcaaaactccgtcccaataaataaataaataaataaaataaaaatcttaagggtctagtcacaacagttcaaaagtctccaaagggagactctcaccttcaagcttgtaagtaatactaaagttctagatttgctggaagttatctccttcaatggattacagcacatgatctagcaataataacgtaccttgtcaccacatcgaatgattttgaacacttcccatcaatcgactaccgactaacaaaaagaaggacttgattcccggcaattttttctcttctgaactgagcattcccgaaatccagcttgctgaacgcgcagatgcagggtgagaggcaccccaggaaaaatggaagggaaagtggtacaagttaaaacagtcttcgtggccgcagagacgatcgctacctcggccatggcagatctgggggtccggggcgggggttcttccctgatacccaccgggcacgcgagttcacgccagcgacagtggaaagccctcccctcgcagcgcgctccgccactagccgcaccccgccgagctctgacctccgaagagggtccctgtggcgatcccgccccttcgtctgatgtttgtgcctttgattggctcttaggtggatccctcagcgtggcttgcccaatggagcaatgccggctggtggcctggccgctccgccccttccctacccctcgcggagggcccgccccctgccccgcgccggctagcggaggagagtaaatacaacaggagcgcaaaatggcggaaccgccgagccccgtgcactgtgtcgctgccgcggcccccaccgccaccgtctcggagaaagaaccgtttggcaagctgcaactctcctcccgggaccctccgggttctctgtccgccaagaaggtccggactgaggagaagaaggcaccgcggagagtgaacgg

SEQ ID NO: 38577 - DNA, 2300 bp, Homo sapien
cataaataatcgccaacgaatttttcctggcaagtctacgttataataataataatattattattattattattattttttgagacggagtcttgccctgtcgcccaagctggagtgcagtggcgcagtctcggctcactgcaacctccgcctcctgggttcaagcgattctcctgccccagcctccccagtagctgggattacaggtgcgcgcttccatgcccagctaatttttgcatttttagtagagacggggtttcaccatgttggtcaggctggtctcgaacttctgacctcgtgatccgcccgccccggtctcccaaagtgctgggattacaggtgtgagccaccgcgcccggctataataattattataaaattcaaatcttaaggccgcacatggtggctcacgcctgtaatcccagcactttgggaagcggaggtgggccgctcacctgagatcaggagttcgagtccagcctggccaacatggtgaaaccccgtctctaataaacacaaaaattagccaagcatggtgccggacgcctgtagtccctgttactggggaggctgaggcaggagaatcgcttgaatctgggaggcggaggttgcggtgagccgagatcgcgccacggcactccagcctcgacaacagagcaaaactccgtcccaataaataaataaataaataaaataaaaatcttaagggtctagtcacaacagttcaaaagtctccaaagggagactctcaccttcaagcttgtaagtaatactaaagttctagatttgctggaagttatctccttcaatggattacagcacatgatctagcaataataacgtaccttgtcaccacatcgaatgattttgaacacttcccatcaatcgactaccgactaacaaaaagaaggacttgattcccggcaattttttctcttctgaactgagcattcccgaaatccagcttgctgaacgcgcagatgcagggtgagaggcaccccaggaaaaatggaagggaaagtggtacaagttaaaacagtcttcgtggccgcagagacgatcgctacctcggccatggcagatctgggggtccggggcgggggttcttccctgatacccaccgggcacgcgagttcacgccagcgacagtggaaagccctcccctcgcagcgcgctccgccactagccgcaccccgccgagctctgacctccgaagagggtccctgtggcgatcccgccccttcgtctgatgtttgtgcctttgattggctcttaggtggatccctcagcgtggcttgcccaatggagcaatgccggctggtggcctggccgctccgccccttccctacccctcgcggagggcccgccccctgccccgcgccggctagcggaggagagtaaatacaacaggagcgcaaaatggcggaaccgccgagccccgtgcactgtgtcgctgccgcggcccccaccgccaccgtctcggagaaagaaccgtttggcaagctgcaactctcctcccgggaccctccgggttctctgtccgccaagaaggtccggactgaggagaagaaggcaccgcggagagtgaacggagaagggggcagcggcgggaacagcaggcagctgcagccgccggcagcaccttcgcctcagagctatggcagccccgcgtcttggagctttgcccctctgtctgctgctccctccccgtcctcttctcggagcagtttctctttctccgctggcacggccgttccctcctcagcctccgcttccttgtctcagccggtgccgcgcaaactgctggtccctcctacgctgctgcacgctcagcctcaccatctcctcctgcccgccgccgccgccgctgcctcggctaacgccaagtcgcgcagacctaaggagaagcgggagaaggagaggaggaggcacggtctcggtggggcccgagaggccggcggggcctcccgggaggagaacggggaggtgaagccgctgccccgaggtgggtgccgtgcggggagggggaggggagggcgccgtgggtccccgccgccccctggcgcccacggggcccgggaagggggagcgcggcggccgcgtgcgccggcctggaggggctgggaggcgtccggttttcagcagaggattttgcagttcccaaggggacaggaaatggagcctgtaatttcggttgcagagagggggatggccgacactcttattttctgtatcgtttcttcctcccagttagtgcgctgcaggatttgtgaaaatccatcttgaggactctcctaggt

SEQ ID NO: 38578 - DNA, 2300 bp, Homo sapien
caaaatagctttaaaatactaatcacctggaattcctgactaaaagtaccaaaatcccatcctcaaaaccactttcctagaaacaacactcccagaagctgaaagatatttacattgcaccagagtccctgatggctatgcttagatgttaaagctttgctacaggcaaaaaatatcaaggaagaagtgacactattgctacatgcacatgcagcatgttttaagttgtgaaaacaaaccattataatccaaacagaatttttcatgatctgagctactgttagatcagcaatgctgaaactgcttgacatttctttttctaaaaaacaaaaagagttatttgacaacactgtgtagcagtgcacatttataataaagattatgcgctttaagcttgcgatcacataaagatttgattttcaactagtccgtatgttgcactattgtcagatcattgtgtatccgtagctgaagtggtggaaacacctgaaaaattatacgactagcctacatttaaaaacaaaactgaccctgtctgacaagaacccttaagaattcgcctttttctaatgctcaaacattctgcagccgcttgatctggcgaaaaatcgtcaaagctcctggttttatcatttgctgcagggaaaaaaagaatatggctgaaaattctttcagaagggtggtatttcaaacaggaccacccaaaacacttaagaatacgcagcggagagtagggtgcagggagggtaccttacgaaacagcgcacttcgggccctgcacgctacctcatttccctaatagggatgaaaagctcaggcctctggtagcttccagctgacgccagtgctctctccacaccccttttttgacaggattatccggggttgaacgctgtgtcacaaatacgaattcccgcgaccacgtctaagtggtctaacaatcaatcaagcatcttttacaaaaccaaacccttcccccatcccgttccctccatctctctccctagccaaacaaacctaggagagtcctcaagatggattttcacaaatcctgcagcgcactaactgggaggaagaaacgatacagaaaataagagtgtcggccatccccctctctgcaaccgaaattacaggctccatttcctgtccccttgggaactgcaaaatcctctgctgaaaaccggacgcctcccagcccctccaggccggcgcacgcggccgccgcgctcccccttcccgggccccgtgggcgccagggggcggcggggacccacggcgccctcccctccccctccccgcacggcacccacctcggggcagcggcttcacctccccgttctcctcccgggaggccccgccggcctctcgggccccaccgagaccgtgcctcctcctctccttctcccgcttctccttaggtctgcgcgacttggcgttagccgaggcagcggcggcggcggcgggcaggaggagatggtgaggctgagcgtgcagcagcgtaggagggaccagcagtttgcgcggcaccggctgagacaaggaagcggaggctgaggagggaacggccgtgccagcggagaaagagaaactgctccgagaagaggacggggagggagcagcagacagaggggcaaagctccaagacgcggggctgccatagctctgaggcgaaggtgctgccggcggctgcagctgcctgctgttcccgccgctgcccccttctccgttcactctccgcggtgccttcttctcctcagtccggaccttcttggcggacagagaacccggagggtcccgggaggagagttgcagcttgccaaacggttctttctccgagacggtggcggtgggggccgcggcagcgacacagtgcacggggctcggcggttccgccattttgcgctcctgttgtatttactctcctccgctagccggcgcggggcagggggcgggccctccgcgaggggtagggaaggggcggagcggccaggccaccagccggcattgctccattgggcaagccacgctgagggatccacctaagagccaatcaaaggcacaaacatcagacgaaggggcgggatcgccacagggaccctcttcggaggtcagagctcggcggggtgcggctagtggcggagcgcgctgcgaggggagggctttccactgtcgctggcgtgaactcgcgtgcccggtgggtatcagggaagaacccccgccccggacccccagatctgccatggccgaggtagcgatcgtctctgcggccacgaagactgttttaacttgtaccactttcc

SEQ ID NO: 38579 - DNA, 2300 bp, Homo sapien
tagaatggtcaccaatgtaaaaataaagcagttctgacttaggactttttaaaagccctactattaataaatacaggagcttaattgtttaatcaaattggggtgcaggctaggtctttcgagtgtgtgtggttcagttttgttttgttgagggagaatctcttccttgtttaggtgtctttatagctaatgtctggttctgactcagactgttcaatcagccagctgtggataattgaggggttactgaaccatgcacagccaacttagggcaacactaaaaagaggtatatacctaaacaaacacttggtcacccattcactaagatttttacaaaaagcacagagaaatgatcattgtattgcaaatcaggactttcatatttgcaattatatctataataaaggcatatatgtattcttgctataccacttgttaataccgctatttaagaatcttcttaattcgttaaaacagaacatcaattcagttaaatccaaactttagaaagatataagtattccccaagttacgagggaaaaattttcaccattaaatttaccaccaagacactggaaaggaatctttttctctgatagtttttcctcaacaagatagcatttgtgtctgaaaaaatgaaaatcttacagtagtgttaatatcttgtcactactccaaaaaacccacataggtcatgggaaaagatcattcccacatcttaatgtaaaacctatcactgtttatattcaggattaataatattagtgttaaccctcaaaagaagaaggattctaaatgtaattgaaaagactataaaaattcctctttaacagccatttcactttaaggaccatttgtgtactccacattttaagttagaattgttaaagaatgcttacttatttcttctcaaatattccattactccaactatgtaatactcatattcacttcctctttcagagaacttacagcaaatgtgcagtttacacaccacaaacactagtgatgataccaagctgcatatggacaaacttccaggcacttatctcctaaattttacatataaattgttaaaacaaaatagctttaaaatactaatcacctggaattcctgactaaaagtaccaaaatcccatcctcaaaaccactttcctagaaacaacactcccagaagctgaaagatatttacattgcaccagagtccctgatggctatgcttagatgttaaagctttgctacaggcaaaaaatatcaaggaagaagtgacactattgctacatgcacatgcagcatgttttaagttgtgaaaacaaaccattataatccaaacagaatttttcatgatctgagctactgttagatcagcaatgctgaaactgcttgacatttctttttctaaaaaacaaaaagagttatttgacaacactgtgtagcagtgcacatttataataaagattatgcgctttaagcttgcgatcacataaagatttgattttcaactagtccgtatgttgcactattgtcagatcattgtgtatccgtagctgaagtggtggaaacacctgaaaaattatacgactagcctacatttaaaaacaaaactgaccctgtctgacaagaacccttaagaattcgcctttttctaatgctcaaacattctgcagccgcttgatctggcgaaaaatcgtcaaagctcctggttttatcatttgctgcagggaaaaaaagaatatggctgaaaattctttcagaagggtggtatttcaaacaggaccacccaaaacacttaagaatacgcagcggagagtagggtgcagggagggtaccttacgaaacagcgcacttcgggccctgcacgctacctcatttccctaatagggatgaaaagctcaggcctctggtagcttccagctgacgccagtgctctctccacaccccttttttgacaggattatccggggttgaacgctgtgtcacaaatacgaattcccgcgaccacgtctaagtggtctaacaatcaatcaagcatcttttacaaaaccaaacccttcccccatcccgttccctccatctctctccctagccaaacaaacctaggagagtcctcaagatggattttcacaaatcctgcagcgcactaactgggaggaagaaacgatacagaaaataagagtgtcggccatccccctctctgcaaccgaaattacaggctccatttcctgtccccttgggaactgcaaaatcctctgctgaaaaccggacgcctcccagcccctccaggccggcgcacgcggcc

SEQ ID NO: 38580 - DNA, 2300 bp, Homo sapien
ggcctggaggcctagtaggactgagtggtttcctgggccaggcccagggccctgctgctctgcacagcctcaggatactgctccctgctccccagccatcccagctccagctgtggctcaaaggtgcccaggtatagcttgagccactacttcaagggtgccagccataagtcttggtggctctatgtggtattaagcctgccagtacacagaatgcaagattcgaggcttgggagcttccacctagttttcagaggctgtatggaaacacctggatgttcaggcagaagcctgctaaaggaatggagctctcatggagaacctctctactagggcagtcacttccacattgtcagatgtctttatagcaatgccccattcctcagtaccagttttctgtattagtccattcttatactgctataaagaaatacttcagactgggtaatttataaagaaaagaggtttaattggctcatggttctacaggctgtacaggaagcatgatgctggcatctgctcagcttctcgggggggagctcaggaaactttcagtcacatcaaatggatagaaaagagttcatttgtaaataatgagcaagtgaagtgtattttaaggagaggaaatacctttgccagtagagttatgttttataagaaattgtaaataaatagttcagtttgaccagagtatgaggtacttgagggcactgtctttggattccagactgaagagattataggtagacattgagagctcttgaaagcagtttagctaaggaatgaatatgatcaaaagaatacataaaaattatagaaaggttaatatggctgtagcattcaggatgagagacagttatgcagctgttagaccaaaaattaagacagtggcatcaaggaattcagaagtaatcaaggatgagctggataattctgtcaaatcacggagacaccagaaaaaatgacttgagtaaatatgactggatttgatatttcaacattctgggaaagcaaatttaaacagattgaaaacagaaccagaatttaagcagtaagaatgataaggtggtaaaggaaagacactaggcatagatgattctttttttctttatttttttctttttgggatagggtttcgctgtgtcacccaggctggagtgcagtggcacgatcttggctcactgcaatctgcctctcagttcaagcaattctcctgcctcagcctcccgggtagctgggattacaggtgctcaccaccatgcccagctaatttttgtgtttttagtagagatggggttttgctctcttgggcggggtggtctcgaactcctgacctcaagcaatccactcacctcggcctcccaaagtgctgggattacaggcatgagccactgcgcctggcctgaagattgttttctaaaatattcattcatctccttatttctgtaaactgtgagcatttgctatatgtcagaatggtagcacacactgtagatgtaactttgctctatgcccgtctgtctgtctgtctgtctctctctttctctctctctctctgtctctctctcgctgtgtacatgaagagactggctggctgggtgtggtggctcacgcctgtaatcccagcacttcgggaggccgaagcgggcagatcacgaggtcaggagtttgagaccagcctggccaacatggtgaaaccttgtctcttctaaaaacacaagaattagctgggcatggtgacgcgctcctgtaatcccagctacttgggagactgaggcaggagaattgcttgaacccaggaggtggagtttgcagtgagacaggattgtggcactggattccagcctgggcgacagagcaagactctgtctcaaaaaaggctgactaaatattgattatcaattctgtaaaaaatgagtcctaaatatataattctgagtaaattttcagaagtaaacttcttacttagacaaaactgttcctaaagcatggtttttaaagtaattaaaatatggagtttcaaaaaacattttttccaacaggtgggaaggagaaaccaaaaacaaatatagaagacttacaaattaaaaaggtaaagaagaaaaagaaaaagaaacacaaagagaatgaaaaacggaagcgtccgaaaatgtatagcaaatctattcagaccatctgctcaggattgctaactgatgttgaagatcaagcagccaaaggcatcctaaatgataacataaaagattacgttgggaagaatttggataccaagaactatgattccaaaattccagagaaca

SEQ ID NO: 38581 - DNA, 2300 bp, Homo sapien
cactgaaattcagggtccaggtaagctgtggaatgtgacaagatttctgataccacataatctataggacatctcttcttttattacttctgtttgcttggtgtttttaccctatatgtacatatatctttttcttccctttctctttaaccttgttccattcctttttctcttttccttttaaactttttgttccttttctacttctctctagtagttacatcatggaattaggttgcatttattattggactatatttaaaaattaccaaatattacttaaatggttgcttcaagtttaattttcaaagcacatgaactaaatgcattatttctcctttcctttccttccccttccccttccctttccccttcccttccccttccccttccctttccccttcccttccccttccccttccctttccctttcccttcctttctttcgatggggtcctgctatgttgcccaggctagctttgaagtcctgggctcaagcagtcctcctgcttcagcctcccaaagtgctgtgattacagacgtgagccacccacacccaacctaaatgcattgtttctaaagaaatttgacaagcctttttgaaaagggggtgtgtggtgaaattttttttttttttaattttgttctcaacattccatggacagtggccctcagtttccttcttccctctctctgtctttttttgtttgtttgtttttggtttcagatggagtctcgctgtgtcatccaggctggagggcagtggtgcgatctcggctcactgcaacctctgcctctcaggttcaagcaattctcatgcctcagcctttcgagtagctgggattacagacacacactaccatgctaggctaattttttgtatctttagtagagatgaggtttctccatgttgcccagtctggtctcaaactcctgagctcaggtgatctgcctgcctcagcctcctgaagtgttgggattacaggcctgagccaccgtgcccggccaccgtcttctcttttctcttccccttccccttcacctctgtctctcgcctcgcctcccctcccctcccctcccccctttttccctcccccttcccctcctctcccccctcccccttctccctcccccttcccttcctctgccccctccccccttctccctccccccttctccctcccccctccctctcctttcattctttggagtctcgttctgtcaccaggctggagtgcagtggcgtgatttcggctcactgcaacctccgcctccgaggttcaagcgattctcctgcctcaacctcctgagtagctgggactacaggtgcgcgccaccatgcccagctaatttttgtattttgtagagacggggtttcaccgtgctggccaggacggtctcgatatcttgatatcttgaccttgtgatccgcccgcctcggcctcccaaagtgctcggattacaggcgtgagccactgcgcgcccagccttgttctttcattttaaaatactttagtctctggtttaagccaacaacctcttcaagaaactgctgaacagaaatatgttttgattttgttttgttttgtttttaattatcattaatcaaagaggtatccagtttttaaacttaaatttaattgttcatttttatagattcttatgagagcacttgcttatttagtccgttaacatcatatgatctatatggtagaaggaagaataacaaatgatgaatatagtgaatcatacctctagcagggtatagggacagaaccatccaagcataattattttcttggtgtgtttgaaacagttttttgaagcaaagtatatcaatatatagggatatattcaatattatgtatttcagatgcttaagtataaagctgtgtatgaaagtgtgtttgtcaggggaacaatattattattaacatacacttgaagatacattttgaaaataattgcaatctgcataattatttatctccagtgtacactgccatgggggacgctatctagtctaaaattacagagtcgaaaagatagtgatgatggtcccatcatgtgggttcgtccaggagaacaaatgatccctgtggctgatatgccaaagtcacctttcaaaaggaaaaggtatgttgtatacacatttttattggaggggatgagtgtttgtatgttggggtgtgtatgttagttgaaaattggaggaaggaggaatgcaaagtttagagcataattggaatataaatttaaaaatagcgatacatgctaatacaatttgttataaaacctaa

SEQ ID NO: 38582 - DNA, 2300 bp, Homo sapien
taggaacaaaagcatgcgtggtaggaggaaagatgcaggaagataacagggaaaaggtgaaggaactggctaattgagccaaataccctagattagcgtgctcaattatattttagaactaactttgatgtactgtgcaacatctctactactttaaatagtgggtggctatcacagtgcaagaggacacatctgttctatttcaacagttaagtattagtctcctaactcacctcttttcccttatacccatctagtggcacttaaacttgtttacttaattggcaaaggcttcatactgcagtaattttgcttctaaggaggcatttttctgtgttggtttcctttcccggccagaggctgccatagagtgggatgtgggactgaatttggaagcagggttggaggggtgtgtgttgattaataaccatggatggatttcatcccgtaaattgcacaatccccacctccaatctatcaggccgtttttgtgaacctctgaaaaacggtttatgattatacacttgcttaaacctaactgttccatctgctatcggataagacaagcttcatttttttcttacatttggctgtacttaccacaggtgctttagggctggaggtgaaaggatgcaagtaacaatcttattgtgcctacaagatttataatgtgggatgcaacaaaattctgttatgttcttgcacggaaataccctcaatggggaagcactgctgatacttaaatgacgattgaaggattgtacgcctgtatgctgagctacaacgatgacatacgatcccagttttacatttacgtcttcatcaatttgagcagtcgttatgtttcctactattctctccacaagaaagggggaggtgcgtactccaaaaatgtgctcaactaaaatgtttcccatttaaggtggttatttctggcactaggaagacagttaaatatttgttaatgattccttactcatttttaaaaccttcggagttacccctgtatggacatatatagagccccacccacatagcccacggctgggtatcagcccccatttcccttctctcgccactgccagtagtctaccaagtgaacctgcctcatcccaaagataattttgcttcatgagcccacatatttattcttcttcataatgagtcgcttttgaaaagcccgtgcagcaacagccttggccaaaggaacagcgttctgcttacaacttagctcatctgggggcctatttgcccctggaacttcaggacgctcctaaactatacttgcccttctgcaaacaccgacagtcggctcgcggcgccccaccgggacgctcccctttcatgggctgtaagcccagcacatgctggagtttaacacggttcctgctggatgcgcacagaagccctggagccaagcaggcgtgtgcgcgtttggggctggctgtgtgatgggttgagggtcggccgcacagcccacggaagcatcaggagaccagcgccggcgtacggtgcgggctagggcagagccccagactcacctggcagcgctgccggccggaaagcggagagggacgcgaagatcagcaaattcgccagtttggatccttgtccttttccgcccttttccccccattaaatccagaacccgtcacatgataattaagaaaaaacttcagttccgcctcctcaaacgactgcggtagaggatctctcagttctacctcagtgccgcgcccacatccggggctggttctcaccgcccctgagcctaccctataggtagagaggacgccaatctggattcagaggtcccttttccgcggtaattggaccatttgtccgccagtgcaaaccaaccgacctttccttactttcgggttcgacagaaaggcggcaataaaaagacccattggtcccgcctctctactgtcacgggttagtagggaagtcagtccaagatcagcctggagtttccgtgctcccattgggcccacagatgttaatcagagcagccggcgctcagctccgccctctcgggacgccccgcccctcctcccatcctccctgcccgcgcgcagtgactgcaggctccggcgcaaaatcctgcgggagagggggtggggcaaccctctggaggcagcgcgcccgcgggcagcctcgttgtggctccttgggctctgttggcggcggcgctagcttcggagtctcccgcgcgcacctcagccgcctcctagcggcgcggcgctcgctcctacggtaagagcggcatcacctccgcgctcgggtgggcagtgtgg

SEQ ID NO: 38583 - DNA, 2300 bp, Homo sapien
aagagtgcccccattgtatactatacttgtttactcaccacattttcatgctccaccagaaagtggtcaaaattggaacacgaaaactctccacctcactaacacctaacttaaaactatcagatgcattcagacagccagtctgtgtgggaggcaggctatttctggggcaaaaatatttcctggaaccactgtttctggccccagacatggctcattctccgcagacctccagattcctctcctctacgttatggaggtggagccactacaactgataacgcatatccatttccttctcttaaaatttgcagtccatacaccatatccaagttaggatttcaaattgttatactgttttgtgactctttaggctaaagtgtgcagtttccagactttcagaattccccttccaatattaaaaatatggtgaaaaaagcccagtttgaaagaaaataaactttacaaaaatacctgaaaacaagatcaaatactaagtctcttgccaaagtcttggagaaaaaaaaaatgaaagaaacgtttaaaaatggcaaaagctaaccaaaaaccttaagattaaagtatcacacctgaaaagtagtctcaaagcaaggaggatatactattaacaaagaaagcaaccgaaaactacaaaatatttaatattcaccatgaatttcaaaattacttggcatgtaaagtacacactgagattaataaattgttccagattctgcactgcccaggttagtataaggcagttccttgttttcgccacgctaaaaataagaagggtgacagattagtgacagaatgatccctgaagttacacaaggaggtgctgagttagaaagccatgactcgaaggacaataccagaatgctggctgtcaacactgggcagataaaaataagaaaagctgaagcatgctgatggagcacggtattgtttccagacgggaactatcccttaaggcccatgccttaagcacccactccgccgtgttgggatcagaaaactcgactgccgcctgctcagagggggcagggcagcgaccctccttccacctcctccagcgcgcgagccgccgccccctcccgagcccgctcctccggccgctagctgacatctccccgccagccgggctagccacccgagacccctgaacgcccttccaggacccgacgacccctcagcacagcgccaagggaaggaagcaaaggacaggggcctggaagcggggcccgaggggcgggtggcgcgctgggcttcggcccgtcaccatcaagacttgaggaccgcgcgagctcgggaggaaggcggctgagcctccgccaccggccgactgatgagaaggggtcgcggctgaccccggccctcaggtacgggagactgccgggaaagtcgccggcgacggagggcgacgcgttggccccggagcccccacctccatcccgacgaccgctctcctccctcgtcccgatccatcctcgaaattctgtcagaactcgacgacctccacactgcccacccgagcgcggaggtgatgccgctcttaccgtaggagcgagcgccgcgccgctaggaggcggctgaggtgcgcgcgggagactccgaagctagcgccgccgccaacagagcccaaggagccacaacgaggctgcccgcgggcgcgctgcctccagagggttgccccaccccctctcccgcaggattttgcgccggagcctgcagtcactgcgcgcgggcagggaggatgggaggaggggcggggcgtcccgagagggcggagctgagcgccggctgctctgattaacatctgtgggcccaatgggagcacggaaactccaggctgatcttggactgacttccctactaacccgtgacagtagagaggcgggaccaatgggtctttttattgccgcctttctgtcgaacccgaaagtaaggaaaggtcggttggtttgcactggcggacaaatggtccaattaccgcggaaaagggacctctgaatccagattggcgtcctctctacctatagggtaggctcaggggcggtgagaaccagccccggatgtgggcgcggcactgaggtagaactgagagatcctctaccgcagtcgtttgaggaggcggaactgaagttttttcttaattatcatgtgacgggttctggatttaatggggggaaaagggcggaaaaggacaaggatccaaactggcgaatttgctgatcttcgcgtccctctccgctttccggccggcagcgctgccaggtgagtctggggctctgccctag

SEQ ID NO: 38584 - DNA, 2300 bp, Homo sapien
atatttttgtaccatttttcatagtttgcttgaggggataggttataaccaatctggaaagcattcacagttgtcatgacaaacaaatacaatgaaggtgtagtgtgtattgaatagtcccctagcaaaatcagtggggcaaacctctgggatacaaggtggttgaagttaataaatcatactcaaaggcttccaggacagaaaaacaaaaatgggagattttaagtcagtaagggaaagcttcctcaaaaaaccctcgtgagagaaatgaagatagccacacctgactgagaaattaagtggaggtgaactttgaaatctgtaaataatccatgtgtatgtaattgagaattgacattgtgaccttatgataattggatagctatttttattttcaatgtgaacaaaaactgattgcatgtatttctccttaaactgctatgtttaaaaaaggaaatataaatacttctagttcctagattggggaattttttatatgaaaattgatgttaaaaataattataattgaaaacctactgtatgtcctggactgtggcaggcatcttatatatattatttattggttacaaagatcctataaggggtggggaggtacagttatttctagtttataagtgaaagaaacaggttgagagaaattccgtgacttattcaatattacataatagatagtagagctaatatttgaattcaggtattttgactctaaccttcttttctttccattatgttaggctgtttgtcaggaatttcaaaacatagtttgcttgaatttgatcagttagagtcactaatatcttaggaaaggttataaaataatttggtttataacagtcaaaaatacaggcattgaataaattctgctttaaattttagaggtttatcgtctaaacatttgaacttgttgataatttttattgtatctgaatcttaatatgctcaaaaagcatgcatgctcccactcatgcatgctcccactcatcatgcatgctcccaagagtggtatataaaacctccggtactttgtttactgaggcaaactagtggtagcgtttctacagttgcagatctgtatgtgctaggattggctcagcagggtgctttacccccaggatttccctgagatcatcctgtgtgtccttggatgattttggtttgtaatgagttctgcagccaataactgcttttgaacctgttttaggctcatccttaacactagaccagaggtaacctctatgccagtgtcatcttgtgactaaaatagtattctggagttgatgggaatcagtctcaaataacctctagggttaaggaatcattaagtttagtacctatcctgttttagacaaacacagaaaagatgcttatgaaatggtttttggtatttgtcttagtttgattatttttaaaagagatttgcagagttatagaacatatcagcagttttaatctgtttcttgtaagttacaattcagtagcttaatttttttcaataaaataaacttttagggactgtattttataaactgaaatattaaagagtttttttgatctttgaggattaattgtcataactacttaaatgacagttagcaaactgtgatatctgggaagtctttagtgttaattattcctgtgtattaactctaatattggcttagtatttaacataaatactttttggctcttgggttattttaattcagttttgtgtttactgagtgtcagggaaaattaaatatcattataaattctgtcatctctgttaagccatcctttagcaatggtaactgacactggtttttagaaacaaactacattactgattgaatgaattggtttcttgtatgtggatttttagatgaacaatttctggtataacctaggaaattctgaaatttctttaaaagattaaaaaaaattcaatctattttgtaagaaaacaagtgttatttattcatgcaaatagaactttctattattgtggcaactgatttttgtttacttaagagaacctgttgctaaaatagtaatgaggaagagtgtaatataagtctcgtcatacaccccttgctctgcaagtaaccagagtgctatgtctgcatgctgttcagtctccttttggaaggtgggaaataaagtcatttgtatgtttttctctcttgcacagcctaaaatgaccaatgtgtgatttcagtggaataaatggcgtccaaagtcacagatgctatagtctggtatcaaaagaaggtaagttgatagtcaaaacttttagcttt

SEQ ID NO: 38585 - DNA, 2300 bp, Homo sapien
tttcaaatccctccttgaatttctatcccaccttaaccaggctaaactagctctttgctgtttcttaaacattccatgcttttttgcctatgtgtctttggacatgcaactccctttgcgtggggtagcccttttcccttttgtttagtcaatcctctatgttctctcaaatttagattagacatcagacatcactttcttgaagaatcctttcgtaactccccaatgtagttacatatctttcttatgtatattatagcagttaatcataagtgttatattagtcaccttgggctaccataacaaaataccacagattgggtggcttatacaacaaaatttattttttcaccattctgaggggtggaagtgcaagagtgaggcaatgtcagagttggtgtctgatgaggcttctctgacttgtagatgtccaccttcttgctgtgtcttcacagggcctttcttgtgtgtgtgagtggagagagagagtactctggtatctctgcctcttcatataaagacaagagtcgtatcagtttaaggccttacacttacgaatctgtttaacctttactacctccttataggccctgtctccaaacgtagtcacattgtgggttagggcttcattcagcatatgcatttgtgtggggaggatgaaaggagcacagtttagttcataacaggtattttcattgtttctttatatgtctcttctttcctgtaaaccaagcttgtccaacccatggcccataggccacatgcagcccaggatggctttgaatgtggcccaacccaggttcataaactttcttaaaaccttatgagattttttttaatttttttaaagcttatcagctatcgttagtgttagtgtattttatgtgtggccccagacatttcttcttgcagtgaggcccagggaagccaaaagattggatacccctggtctaaaccaagggatagggagcggagactgtgtcttgtctttttttctgcattgcctaattgccactgaatcttaaagattaacagtcctaaaaatggaagataatattccattctattctattctgttttttagacatagggttttgctttgttgctcaggctggagtgcagtggtgcgatcatagttcactgcagccttgaactcccgggcacaaacaatcctccagcctcagcctcccaactagctaggactataggagcacgccaccatgcccagctaattatttttatttttatttttgtagagatggggtcttaatatgttgcccaggctggtcttgaactcttgacctcaagtaatcctcccacttcaccctcttaaagtgctgggattacagttgtcagccaccacagtttctctctgttgctcaggctggagtgcggtggtgcagtcatggctcgctgcagcctcaacctccaaggctcaatcattcctcctacctctacctccatagctggaactacaggcatgcactgccattcccagctaatttttgaaatttttttgtagaggcagggtttcgccttgttgcccaggctggtgtcaaactcctgggctaaagcagtccacccgcctcagcctgtcagagtgctgggattacaggtgtgagccattgcatccagcctactcctagagttccccttgcccagtacgtgaagtcctgcctttgaaatatttgtgcccaacaacattctgtcttagttgatctccagcagaaatctctagcagcactgtctagttcgtaggacttcattaaatgctcaaaaagtataactcagcattatataaaataagtgaatgttttctctatatatcttctttttttttgagacggagtctcgctctgttgcccaggctggagtgcatgatctcagcatgatctcggttcactgcaacctccacctcccaggttcaagcagttcttctgcctcagcctcccgagtagctgggactacaggcgtgtgccactaagcccagctaatttttgtatttttagcagagatggggtttctccatattggccaggctggtctcaaactcctgacctcgtgttctgccggcctcagccttccaaagtgctgagattacaggcaggagctaccacgcccggctctccatatatcttctaaaccttaacttgagaggaaaacaaaaaggggaagtgataccagagttacggaggaaaagctactgtctcaggaactgagaccatgggagggacatgatcacttttagaaagatacagtcagaagaaagaaggaaaaagagaggaagaaagtggctcctc

SEQ ID NO: 38586 - DNA, 2300 bp, Homo sapien
gaggcggagcttgcagtgagccgagatcgcaccactgcactccagcctgggcagcagagcgagactccgtctcaagaaaaattaagagttaatggtagctaaaaaaaaaaaaaaaaaagctactattcaccaatgttaagtatacatttacggtgtataagcagcttttcaaaatgttttacatgcactacctcacctaaaacctattatagtgcctatgtactgtatgtatgctgtgtactatgtagatacacagaagattaaaccaaggctcaaaaacattaaagaacttgataaaagtcacattagaattcatattaaaaacaaaaaagactctctgcttttcaaaattccagactgttatggaataactagagaatttgggttaaattccagggtaattcataacgatgattggcattttaaatttttttttcttattacttacagttacatacagctgaaatttgttttcatgatactctttaagtatattaaagtgtattagcagattaagtgatgttttaagcgtttggtatattggaccaggattctttgagttgcaggtggcagaaactaaatgcaaactagcttttacaagaagttggtttttttggtcgttaattttactgtttatcataaaagctaaacaaaaaaaacccaggaaactagatagaatagtacaacagctggggtggccatatgtcccagtttgcctgggattgtccaacccaagtttactcatgttgtcctggtgcctttcactctcaaaagtgtcttggtttagatggtaaattacatggtcaccctaaacacctaaatacccatctctttaacaatgattaacgttttgggatgtttacttaatctgttttgttaagtaaattatatacattgagacattttacccctgaatacatcaatatatgtctcttcaaaataagcacatataaccacattacagtgataacacttaacaaaatgaccaaaaatcttataatatttacattttattttaggtactccttggccctggattcaggcatggctggattgagaggctcggataatatcttcacttctttttgctgtagactttggtcttgctggtcacattcttaggttggctctttctaggtggtggctaaggtggcccctagcaatttcattttttcatagtctttagtgtttgtgatctaggagaaaggtcttgaagcacctatattagtccctgaaaaagactgattggccctgcttaggtcacttgcccatctttttataagcttttgtattcagacttactaagactgtgacaagcctaggttacatgtctatccctgaggtgggagaaataagaatgtatgattgatggataaaggagggagacgaaggtaaagagagtttatgtccagaaagtctaagggatgctgtgtaggcaaaacaagatttcccttcatgtagtaatagttagcattgatggatgtttagtggtttctctggaaactatgcctaagtaaatttgttattaattctaaggagatagacctctattaataagaagctctttgtatctgtatgatacacttatcataagatttctttatttgtaaaacaaagaaataatgtacttgaggttagggtagttctttgattgtctgtgatgttacttagaaatgtcctttgattcatatgcatctaatttacgttgcagcgttgaggtgtagtttagagactatgttgggtgttgtcttgttccgagagtttattactaaataccatggttaggctgcggcagacaataaaacagtctgagagagcttgtctctatagtaatattttaaactcatttaaatttagaaaaatattttggcaaaaaataatgtaaaaacaattttaaaagttttgaagaggtgactatcagatctataattaagcatattttctttccctttttatagttgctgcaatagtattattctgctccacttctagcccacacagcatacctctgacagaggtgattgggccgatatggctgatgctgctcctgggaactgtgcattgccagattgtttccacaagaacacccaaacctcctctaagtacagggggtaaaagaagaaggtactgttttttaaaaagtaatctttttgtacatttatgtaatttgaatctacgattgttcttgactcctcttaccttcatagactaaaatcttatcttgtaaggttgctgtttcaaaaaaacactgagcttcagaatcaattaccagatgatttagtttccatatttgcttcaag

SEQ ID NO: 38587 - DNA, 2300 bp, Homo sapien
ttgtcttttttaactgctattgctttaaagatttttttgtctgatgtaagaatagctacctctgcttgcttttggtatccatttgcatgaaatgactttttccactcctttacttgaagtttatgtgagtccttatgtgttaggtgagtctcctgaaggcagcagatagttggttggtgagttcttatccattctgcagttctgtatcttttaagtggagcacttaggccatttacagtcaatgttagtattgagatgtgatgtaccattccattcatcatgctatttgttgcctgtgtaccttggttttttgttcttgctttttaaatcgtatttttgttttataggtcctgtgagatttatgctttaaagaggttctgttttgatgtgtttccaggatttgttccaagatttacagcccttttagcagttcttgttgtggtagcttggtagtggcgaattctctcagcatttgtttgtctgaaaaagactgtatctttccttcaaatatgatgcttagttttgctggttacaaaactcttggctgataattgttttgtttgaggaggatgaagatagggccctaatcccttctagcttgcagggtttctgctgagaaatctgctgttaatctgaaacgttttcctttataggttacctggtgcttttatttcacagctcttaagattctttccttcatcttaactttagataacctgatgacagtgtgcctaggcaatgattttttttgtgatgaatttcccaggtgttctttgtgcttcttgtatttggatgtctaggtctctagcaaggctggggatgttttccttgattatttccccaaatatatcttccaaattttagatttctcttcatcctcaggaacactgattattcttaggtttggtcatttaatataatctcagacttcatgggggctttgttaatattttttcattcttttttctttgtctttgtaggattaggttaatcctacaaagctctgaatttctttcttctgcttgttcaaccctactattgagactttccagagcatttgtctataaatgtgtccaatgtttcctgaagttttgattgttttttcttcatgctatctattttcttgaatatttctcccttcacttcttgtatcgttttttggatttccttgcattgggcttcacctttctctggtgcatccctgattagcttcataattaacctcttgaattctttttcaggtaaatcagggatttcttctttgtttggatccattgctgttgagctagtgaaatttttgggggtgttaaagagccttattttgtcatattacttgagttggttttctggttccttctcatttgggtaggctctgtcaaagggaaggtctagggctgaaggctgcttgctgttcagattcttttgtcccatggggtgttcccttgatgtagtattctcccccttgtcctatggatatggcttcctgagaaccaagctgcagtgattgttatctctcttctgggtctagccacccagcaagcataccagactttgggctggtactgggagttgtctgcagagtcctgtgatgtgaaccatctatgggtctttcagccatggataccagcatctgttctggtggaagtggcagggttgtataatggactctttgagggttcttagctttggtggtttaatgctctatttttgtgctgattggcttcctgccaggaggtggcgctttccagagagcatcagctgtggtagtatgaggaggaactggcagtgggcagggccctagaactcccaagaatatataccctttgtcttcagttgccagcgtgggtagggaaggaccagggctaggtgtgtctcaactcagactctccttggttgggcaggtcttgctgcggctgctgtcaggaatggggatgaggttcctgggtcaatagtgttgtgtacctaggaggattatggctgcctttgctgagtcatgcgggttgtcagggaagtgggggaaagccagcagtcacaggcctcacccagctcccacgcaatccaaagggctggtctcactcccacagtgcctcccctaacagcaccaaatctgtttccaggcagtgggcaagcagggctgagaattgccccagactacccacctcccagctgcaaaggaaaagggctcagttcttcccccacctgtggagtctgcatgctggattcccgttctccccagagttctggccaggaggcttcttgcctggttcaaattgttatgaagttcagctggagacttcctt

SEQ ID NO: 38588 - DNA, 2300 bp, Homo sapien
aaaaacagaggttctttaaaacataaataaaaaccacatataatcctttctcctatgttttctttatcaaattaatgtttatagttggagataagttcaccaggagacctttacattcatttaattatgctgcagtatatggcgtgaaaactaccagcaggcaagcctaggcctcccgactctaaaggctgttttgtgcttttatttagaagctcactagctgtgaaaagtttgtgcagcaactcatcccactacgtggctcccaggtgtagtcaggtcccgcaagcagccctgggacataccgaacagccagggcctccctgctgggtcgcgctgatagtaagacaagtcattcacgctgcgcgacctctccggggcagcacgggggcggatggatttgggcctaggtaatgtccatgaggagctgtctactgtcacaaaggagaacaagcctcattcttgtgcttggtcttttaaggacaaacttatgagtctctatgaatctctcagtttacagtgccactataaaaatccattaatctccacgtggtgacatgctgtacattcctataaagtactgcctgtggctataacttcatctgcggttgctaaaggcattagtttagagagaatgcaaacatccagctaaagctaataggaaggtctggagaaagcaaatcaatttttcaaaatggtccaagctacagacatatttggaagagcaggcagtttgacagacaattttccctttgaaacatcacatgctgacaggtatcatacctcggaaacctggggcctgcaggggctttgttccaagttctgtgtggggcatgttatgttgctgtagcttcctttttgcttccaggacaggattttcaaactgtgttcttctatttatgtggctaaaaaagaaaatttcagattaggataaccgtggggcaaagttatttaaaagaccatatgtatggctctatggagagcaggtgattaagggccaccttatctgattacagtcaagtgcctcacccagcacgcggtcaggctcctgactgggctggcctgtgtacaacacacatttctgtgacaagtgctgagttttcaaaggctctctcatatgttattctatttacattatgcataattcagccaaaagaactagaatgtgcacttgctttctggtctactgtgttcatttgagatgagtttaatatgcatgaaactaagtggtcaagaaatgaaatttatactgaatggtattgaagaaaagagcatcacctgagctttgcaaagtccccatatccaacaggataaatgtgaggtaaattcattgatagagtatagcaaccagagtctgcactttttagagttggtcctggattgagagactgggatccaggagaaagagtttgcagaagttacagaatacatatgtaggacagttgatgctgaaatcaagcaaaagtagagaattcatattctacatggtgagagggcaaatttgtaggtatcagacgcagagtggcttgaagcaactgttgcccagctaaactgagagcttatagtccaagcaaactgtgaatttctgtatagcaggctgtttgaaatgcagagttccttatctgtggggagagtagaaaccaacaaatctgcttttagtggtgggcctatgctgctctttctctaggatataaacatcccatgagagggctggcatatacattgatacatagaattatggcaggcaagcatgaagaggagagaaggaatggaagagaaactgacaaatactgagtacttaactcttggccagttactatgtatagttttcctcagtgaagtttcataacaacccagacttgcattccaattattcaccttttaaaggcaatgagactgacacatggagagatcggattatttgctctaaatcacatgtctcgtaagtggaaaggctggacttggccgggtttatttctaaactgaatctctgcacacttttttcttttggatatacaatttcacattggcatgtgcacacacacttattgtgtgtatacaccctgcacgtccccaacataaaccacttacagcttcagaaaggaaaggagacagaagcagcaacatctcaacaaccaatttccaatactatgaatcagatcatttcaaagcagttcccagaaacatggtaagtcaaccgtaagatctaattctttcctcacgggagacagggtaaggtagctgcctgccccacaggctctgcagttaatcagtcctgtattcaaattccagctctaccactt

SEQ ID NO: 38589 - DNA, 2300 bp, Homo sapien
ctcaacttctctgggtgagattaggctttgctatcaagtcttgcctactcctgggcattgcctgcagctctggcttcagatcctggcactgcccctggctcactgaataagcttcaactagtgcagccaacttacggaggatctgttttctcaagtgaaaaaaagacacaaggttaaacaaatcatctttttttaagatctcttccagttctgactacatttgatccccctcatccccaagtagtaagttatacctaagagggaaagaggagggaattatcatttcgaactcctactcacctgtgccaggagagcactgctgtgactgatttccctgatttcatcctcaccacagtcctaacagattagtattgttaaagtccatttaacaactaagaaagctgaggctcaggaaggtcaagcagtttactcaagatcatattctcagtaagccgcagagtctggattgaaacctggtctttctgtttgggtcgactcaacatttttaaccgtattgtttgcctcctacatcgccttcatctcagacattaagaatcctacctattcaatgcttttcatcctccgctttaaagagataagtgggtgcacaactttttttttgcctgaaacatatcatctaaaagttaagcaaatgaaattcatttaccagttacaggaatctttttcttaaatcactgttaatgtctcacaggaaattagctcttcagtggaaatcagcagcctccctgcatccttttgcccctgtcctcccctctcttggatgcaaacctggcgaaaagaagggaacactgcttggggtcagcgagctgagttccagctccgaatgtaccattttcaccctcgggagtcttctcccctttctctgtgagcaaaggagtgttgggccagaccgtcttaaggattcttccccaggtacaagccggactctggcggctttcctgggcaagggagtgtctccgccttgtctctgccgcaggtccctggttaaattgtcaatttctctgcggaggctgctcactgcatccgctccctccacccctagccctgtagaccccttctctttcccctacttgggaaaagtgaagccccttatccttggatagcctttcaccagacaaccgcagccgtccgctaaattcccctactggcgggacgcgcgggcgggggcctgccccggggaatgcgaggctgcttcccttctgcgtaatcagggtacgcagcctccagttctctaactttctccttctctaagagggaatttcgagaactttaagacaaataagtgactatatagatgaagacatgaaacctctctacacagtgaactcccccacgctacaaggctcccagggatcccaggccttctcccgcaatgccccgccgggtcccccgccccaactccttctcacggcaggatcccgcgccaggacgctcgcagagcccgagatgtggcaccaggcgcgccacaagtccaggtcccgctatttctgctccatcggagcccaggtcggagggagtcagcgcgtcctcctcgcacaggagcctggcgcgcggctcggtcgcacagaggctgaagaaaggtccgcactgggctcgaggcccttcctgccggcctccccacgccgggcctaggctcccctccttcccggctcccgcctcctcccgtaggctgccaggcggacccagcctgcctctctctctgccttcactaccgggtcaagctgcggagggagggagggaggcagcggcgaagccctccgtggctccccacccggcgcgcgcgcccctcctcccctgcctcctcccgtctgccagtacagtagaactagtacacacacacacacacacacacacgcacacgcaccctgccactgcagctgccatggatatcagctaacaacacacacccaggcgcgcgcgcgcgttcccactcgcaccacgcaggagtggcccccggcatccctaccctccttccccacccccaccacacccgctcaccagctcggctactgctcgctccggctgccgccgccgccgccgccgacgccaccaccactgcttcctctgctgcggggccacagccttgagtgtcattcaagggacagcacaacctcatccaagctctcctacctctgcccagccgtccctctcatcctccccattcctcgtccacactccatccaaagaagagggaaagcaccgaatagaggggggcgaaggcaaagtctgctgttcttccccctgggcccccttgctcctccatcctcattctctcacca

SEQ ID NO: 38590 - DNA, 2300 bp, Homo sapien
agtgcggacctttcttcagcctctgtgcgaccgagccgcgcgccaggctcctgtgcgaggaggacgcgctgactccctccgacctgggctccgatggagcagaaatagcgggacctggacttgtggcgcgcctggtgccacatctcgggctctgcgagcgtcctggcgcgggatcctgccgtgagaaggagttggggcgggggacccggcggggcattgcgggagaaggcctgggatccctgggagccttgtagcgtgggggagttcactgtgtagagaggtttcatgtcttcatctatatagtcacttatttgtcttaaagttctcgaaattccctcttagagaaggagaaagttagagaactggaggctgcgtaccctgattacgcagaagggaagcagcctcgcattccccggggcaggcccccgcccgcgcgtcccgccagtaggggaatttagcggacggctgcggttgtctggtgaaaggctatccaaggataaggggcttcacttttcccaagtaggggaaagagaaggggtctacagggctaggggtggagggagcggatgcagtgagcagcctccgcagagaaattgacaatttaaccagggacctgcggcagagacaaggcggagacactcccttgcccaggaaagccgccagagtccggcttgtacctggggaagaatccttaagacggtctggcccaacactcctttgctcacagagaaaggggagaagactcccgagggtgaaaatggtacattcggagctggaactcagctcgctgaccccaagcagtgttcccttcttttcgccaggtttgcatccaagagaggggaggacaggggcaaaaggatgcagggaggctgctgatttccactgaagagctaatttcctgtgagacattaacagtgatttaagaaaaagattcctgtaactggtaaatgaatttcatttgcttaacttttagatgatatgtttcaggcaaaaaaaaagttgtgcacccacttatctctttaaagcggaggatgaaaagcattgaataggtaggattcttaatgtctgagatgaaggcgatgtaggaggcaaacaatacggttaaaaatgttgagtcgacccaaacagaaagaccaggtttcaatccagactctgcggcttactgagaatatgatcttgagtaaactgcttgaccttcctgagcctcagctttcttagttgttaaatggactttaacaatactaatctgttaggactgtggtgaggatgaaatcagggaaatcagtcacagcagtgctctcctggcacaggtgagtaggagttcgaaatgataattccctcctctttccctcttaggtataacttactacttggggatgagggggatcaaatgtagtcagaactggaagagatcttaaaaaaagatgatttgtttaaccttgtgtctttttttcacttgagaaaacagatcctccgtaagttggctgcactagttgaagcttattcagtgagccaggggcagtgccaggatctgaagccagagctgcaggcaatgcccaggagtaggcaagacttgatagcaaagcctaatctcacccagagaagttgagtgttagcattatgaggcatagttctaaatggaaactcatcatgagaaccgaatatatacatattgtaaaaccaaatgacaagctaccattcatggaatatactaatatttattaggttctaactacatgcaagatgttgttttataggctttacacataatacttaatttctcctgacattttgataaaataggtactgttatctccttttacaggtaaggaaactgaggtatacaaggatgaacttttgcaaggctacaaatcttgttaatagtgaagctaacgttcagacccaagtggttcggctctagactttgtctcagttactgaattgaactctctgtgcacttacgatgtgtcataccagttctcactacatagtgtcccaaaagattgggcctgctctttctttcagagacaattaggaaaaaagtaaacaaacggagcaggatttgggcataacagcatgctcctcccatcccccaaatcccaggagtgtcactgaggtcagtgccagttaacttagtgctcttcaacttcacagctacccttctttgccctaaattgtgacattagagctgaaatctgtaaacgtctttatggtcagttggcacagtgtttagctttgtcaatagaaggtgctaggggaacactgcagaaagaaaggggctccttttcttggttccagtg

SEQ ID NO: 38591 - DNA, 2300 bp, Homo sapien
accacagccatattatttccaatgagcgcctactttcaggcttagtagggtggagggtgggtagggggaagttctactcagttattccctccttgggtactctcctagagcctgagagatagtggctgttcccaataaccactattactgtattctttagtgggattttttcctgtcctaatagtcaataccctttgactggatcttaactgataaaagtggaaccctgaggaaagcactatccttggagtcagaaattgggatcagattttttttctttctcttatggtattcctcatattcgcttaatttctccactgcctttaccctttttggatttgatgctatgtcaagaaaaaattatttcatcactgagcactctgagtgtagagcagagtgctaaatattgcatgctattccagaagaaaaatagtttaggaatcctaaaagccaaagaaagaaagatatgaatgcattcagttcttagaagagttctatgagatagatgcttgtggcagacatagtctccacccagatctcctaggatccctttggttgaatctgagtatccttcctctagcttctgtgttcttttacttctcacagcctgccccgagaatctctttggaggaaggcccaaacactactagactcactttgtgtactggcatagagagccagacagaaccacctgcaagtttacttctttcccaggataccctttgccaaggactttcctatagagtataaaagaccagccgtcttgcctctagtagcaagaaaacctgaggtgtaatttacaccctgaggctcccctatagaattatattgatgttaatattttgcctgaaaccaccttcttccctatcttgcttactgtggtacctgatgagtttttcttggtagcatttctataataaatcacttgcagacaatcttcatctcagggtttgatcctggggatcctgacttaagacattgctattcttttttttttttcttttacagatgaggaaactgaggatcagggcttttaaattgccccaaatcacactactaataagagatagagttgtggtaccttttttagagggaccattattctgctgactgcagtactgtagagcataaagtttcttatccacactgtttcttagttcagtctgtcaatatcactactccacgattattgttgtttgtttttctttctccctgtcttttacctcaaaaatctctattgtgatgccagagagacctttctgaaacctctccttttttctgtgtttaaaaccccccagtgccgcccatgaaatacacagcaaagtccaaactccttatcttgcttggatcctcctttccaccctttttaactgttcagccatatttctccatgtacttctgagattggaacccagggcaacaaagctaatgtgggttctccaagattaacacaactgaaaggaggcccctttatgccatctattctaggtcccttggaatataattaaaaacaggaatttcaacattgaaatgtaatgatgttcaggtaagggcagtaaggtacattgacttgagtcaatctcccaccatgtctggggactgggacagctgagccaggggtcctacctaagggtcaggcctgtgtcttcacttctcctttcaaccctttacttcttccagagttgaacggcttactttccttctctcactaggccatttcatggcttgtgtttgcctgaaatacaactctttccctccctggtctacacctgctcaccctgaaagaaatacctctgagcccactttctttcttggaagcattttatgactcttatttctgttatcaacacagcttttatttatgtctccatgtatcctttgaagaaacacaacttttcaggttctatgttttatttgcattcttagtgtctggcacattgtctgacacagtgtaaaagctgagtagaattttgcctgatagcagatgtgcctgaagtgagggtgtccaaaatttcattaaatgacgactgctttaatatgaattcttggctaaggcaggagaatcgcttgaacccaggaggcagaggttgcagtgagccgagatcacaccactgcactccagcctggtgagagagggagactgcattctcaaaaaaaaaaaaaaaaaaaaaaaaaaaaaaaaaaaagaatatatatgaattcttactgatagtattaaatgattatctctttacattcacagtaatgtcttacaataacagaatgcaggagagcacatatcaatgaagaaaagacaaaat

SEQ ID NO: 38592 - DNA, 2300 bp, Homo sapien
tataagaagaggagagaccagactgctttcaagctctctctctcttgctctgccatgtgaggacgcagcaagaaagaggccatctgcaaggcagcagcagaaccctcactgaggaactgaataaactggcaccttaatcttaggtttaccagcttccagaacggtgagaaatatattcctattgtttcagccactcaggctatggtatttttagggcagcctgaactaatacatacttctttaaactccccaccaatatcctgttatcatttccttcaaacgttttttcaaaactttcttatcttagaatttccccccatactgatcagttcattactctgcattctcttaggaattgtgctacatataaatctaatttgctgttcttattcgtttatgtatcacattttaactcacctatttgactaacttcaaaggatggaagtaatgttacctatttgacaaacttctgttacacatacttcatttctccgaaacacaagttttgtagtcatttctaccaatattcagccagcactgcttcttcttttgctgaaactgttggttccacactctggtccgaacttaataggaaagactcaccataaaagataattaagaatggctaatacacagtgtgttgaaatttgatttccttaagtttaattccagagttctgatacacattagcatttagagtgcctagaattacagtgtagaaggtgactaagtacatttaaagattgttcctttttgttgttatattacaaaagattatagttgaggcagatcttgaaattgcatctcatcagcccagcaggtggtgtgactcccataggagaacaggaaaggacatgtcccataaggaggcaactcagtctctgctagctcacaagcgtggtctcagtgacctactcgaaagctattctgcttgtatcatcagttcagcctcaccttggaaaactcaagcccagttttcccaaatgatttttagagaataagatttccagatgaaaaccagggagcatgttccaatttttagtacatcaaggaccatgtttttccttgctaccagccccattttctaatcagttaacgcttcctgtgatatctgtaggggaaaggtgtagtgcaactgacagggagagatgagatcttaagcctctgctcattcattgggtgctgagtagcaatgcctcccgcgggccacaggaacttatctccgccgattgttacagctggaaggatggggagatagcaccatagatccactcctcattttatgggcaaagaagctaaggcctgtaaaaatggcatgcccaatggtacaggagttacaaacacggtcataaatattggctccaaatttggcatggaagcttatgtgctgctctagaggagatctgctacgatgtggagattggcttgtgtgggtgtgttttattgctcttgtcatttaaaaatacttttgattatttgtcttccattttttttaggttacgaggaaatccttcaaaatgcgttcttgtgaaaaacgtgagagtgcaaggaaagagggagggataggaagaaggaaagagaagcaaaaggtaggaagaaagtgaccttggtgcccttttctagtcccctcccccgactttcctgttctccactgtgcccatctctggtttcaccaggctccattccttccccagttccctgtttctcacggccctgaaaccagccgacagggatttgcattttgaaaaaccttgcgtggctgccggcgctgggcatgctcaaacgcccagaactggcttttttcggcaactttggcagctctcccacccccacccgaaggggcaggtacgcacagctccctccgtgtgagtaaacggaaagaaattaccccactcccgcccagggcagaaggccacagccccgcggggcagtggcgcgccccggggacgctgccagggggcgccaggccctcagtggtggcgcggcgccggggtccggggccggggggcgctgtccgagggcacgtgcgcgggcgcgcgctctgggagtggtcgcggggtggtgggaggggcgggcaggggcggggccgcggcggcgcgcggaggccgagctcggctgggcttggcgaggctgcggcgcggccaccggcgggagtgcagcggccactgtacccagagattcaaaaccccaaacccgggacttgggggcgctgagccgggccgggaagcagagcctggtcgtgaggaacagccgcccgttgctgtctgcccctttgcggacagcgtctccctcgactccgc

SEQ ID NO: 38593 - DNA, 2300 bp, Homo sapien
ggccaatgtggtgaaaccccttctctcctaaaaatacaaaaattagccggccgtggtggcccacacctgtaatcccagctattcaggaggctgaggctggagaatctcttgaactcgggaggcagaggttgcaatgaactgagatcgggctgttgcactctggcctgggcgacaagagcaaaactcggtctcaaaaaaaaaaaaaaaaaagaggaagagagagaaagaaattgtcattaaaagcatgaggtaaatttccaccgagaaaatgttactatttcagttaaacaattgtacacagaacgatggctaaaactgacatttatttctgtattggtcaaattttaatctgtcctttaataaactcctctgctaagaagttgattcttttcttattattgaatcttattatgtctctttgataatcagacaatgtggtataaatcctggttttaggctatcctttaacttaccattaatttgctatggattgtactttggtaagtcttataaaactttcttctatgtaactctgagaactatcttcagatgatcaactatttatatagggagtctaaatttcagattataataacactatttcagtgcaatagctgatatttatctagtacttactatgctaagtacattattccattagattcccatatagtctatgagatgaatactattacatcaattttaaagattaggaaaatgaagtttgaagaaagtaagcaacaaatttacataactcctaaaagatggagagacttatgtttctgttggattttggagcccacactgccactcccatatggttcttttttttttttttttttggagacggagtctcactgtgttaccccagactggagtgcaatggtgtgatctcggctcactgcatcctctgcttcccagattcaagcgattctcctacttcagtctccctggtagctgggattacaggtgccagccaccatgcctgggtaatttttgtattttagtacagacaagttttcaccatgttggccaggttggtattaaactcctgacctcaggtgatcctcctgcctcagcctcccaatgtgctgggattacaggtgtgagccactgcacccggccactcccaaatggttctgatgccttaagtggaactaccattgagtcaacacatattcatattatgctgactctatcccagatactgaaaaggacactaaggatgcaaaggtgattccaacagacatggtacctgtctagggattgttcagtctagacacaaatgacagccatggaatgctccaattaaaagaaaaatattttgagtaaaactatttaaaacactggtaatcacattatcaggattcattcacggccgggcgcggtggttcacgcctgtaatcccagcactttgggaggccgaggggagtggatcacgaggtcaggagatggagaccatcctggctaacacggtgaaaccccgtctctactaaaaatacaaaaaattagccgggcatggtggcgggcacctgttgtcccagctactcgggagtctgaggcaggagaatggcgtgaacctgggaggcggagcttgcagtgagccgagatcgcgccactgcacaccagcctggatggcagagcgagactccgtttcaaaaaaaaaaaagaaagaaaagattcattcacagtaaacaaacaaacaaacaaacaaaaaactcttcgttgatttcaatctggaaatgaaaaagaaaagaagaaaaggaaaggaaaaagaattctgactcattgatagatttgtttagaaatgtttttcttttttctgttagaaagctcagagttaaagagtggacaagagaaataacattttttcaactcttccattttctaaataaaacactgccactatacattggagtatgggatattatttccactttaaagataaggaaactgactcaaatacacggaaaacaggatttagtaaacgtgatttatttggaacgtgatctcagatccacagaggtgagaaaaacaggaaaggagaaagaaaaagtgctgattgagagtgtggtctcagctggagacgctcttaactctgattgcatggagacactcaggagcacaaattgcaccacggggttagtccatcacggggttagtccatccaaaagcaaggaggcagcctttggtacccctgtgccagtcaatattcattaaagggcagttttttcaaggaagtcggagctagctgctggacactaacagtcaaatctcaaaggagctgggagagaaatgca

SEQ ID NO: 38594 - DNA, 2300 bp, Homo sapien
agttggtgaagaaaacttctagggattccctaaatggagggagtcaatggtcttgtctcagtgatttaccacagagccatcgtgctttttagcacaatctaccacaacttttccctctccctcaccacctatccctataagctcatgcccagcagggagtaaacaatttaatgataatgcatatatgattcgtggaaaggaaatacaggatttcctgttcttatgggacataatccatatttgaagataacagtgcttacaatgtcagaggcagtctatgatatttactgtgttcctagaaaatatgcatagctgtgttcactgaatttttaacatgccttcttctttgataaaataatttgtttaaaagttcctagttcaaataatagagaaaccttttacacatagggaacaacatttttttccttaattaaaaagttcacattctacaatatttggaaatatgtgaccctacttttcacgtaaagaccatctgacctaaagggccaactccttgccacctgattgtccctttctctgtcacatatcagacctctgactggctgagaggtagccatcagggctggccttccaggatctggaagatcaaaatctgctcatacaaactggcaaggagaacgtgaaaagcataaatgcaagaaatgagaaatctccgtggctggagtggtggcttatggatcctctctctttttcctgtcttagggacataatgcttctgggaatgtcctggtgtcatagcaatactctttagggaccatttctgtgctttctgtaactttgtttaagcaacaaaaaagcaaaaaagctttggacttgctcaaagggtggctaatctgatacagataaagtgtggatgaaactcatttttagcctgtaactatgttgtaggatggaaaagaaaacttgcttgtgggtcaaaattttgtgggttagactctcaaatgaatcagttattcaccatgtgtccattgtcaaaacttatccttttagttgcagtttcttctctggaaagtgagcctaaaatattaatttgaaagcttattttgggattagaaaaggagagtgaattagatggtatctacgtcgtaaagggtcaggcacgtgagcagtgctcagtacataggacctattattaaaatatgatgaaaatactggttatggtgatttgacaaaacaaccttcttttgtggatagtggttactacttgatacagaatagtttcatttaaagagtggtaactctagtctatcatttccctttaatgtgattctgtaaaagaaattttaattgaaaatatttaactatcaggagagaaatatgacttttccagtttctctgttcacttcgttttagtatagaattagagattcttaacatataaatcctagaaagtaatttagaaatcttgtcattatatcttcagagtaataactttcatcacagggtctgtttgggctgagagtagagctttattcatgtttaccagaagtcccaagcaaaaattttttaaaccaagtacattctacaacccttcaaaaagattcaaaaaacaataatttaaaccaaagaactctggcagtgcatgacattttctgcctcattaaatgaggcaaacaaaaaatgaccaaatgactactgaaaacatagaggagaaaaaatactaagaaagtttacagagactttccagtaacaaaagttactggaacaaaaatctgttttgttgactcaatagtaatcaatattcacttttatgttgttttatgcttaagacaggaaaacctgagccttcctctttactatcagagcaaatggtaatcatgaagtgaagcaaattgattattgattactgattacttgaatttctatgttttataagtagagcaaccatctgttaacaggaataacaggttttagcagggaaaggattaagggttttattttcctcaactgaggcccaaaatgagtgagatttttcaagttaactttcattccatttggctcaggtgtcagggatctatatttaacttgtgttaggcatgcgtccgaagagctggaaggctgaggatgtcaatggctttcagatgtcaggataaccttaaggatagatgaagggttgagagcctgtgcctcatttctgagttctcagctgctatgccgtggaaatcctgtttactttctgcatctgctcctgcaagactctggagccagtcttgaggtcctacatctccgaaagcaagctcttctagaagttggtgagcagaatgctttttgtttagaag

SEQ ID NO: 38595 - DNA, 2300 bp, Homo sapien
aaaaaaaagaatttccaaagaattgtctaaactgactgaagtagattgaaaattatatcctgtcattctaataaattaatccagtgttatagtggatttacataaagcaaggtatatgctcacataaaacacatcccttcaaaatatggtgggtgcatagtctttaaaaaaatgaaaaccccaacactctttactttaaaatgggtacagcattttgctatgttattgtttaaggtctatatttttctaaaaatccacagttgcagatttgactcagctgtgtgctttcagatcttgtatgctaagctactcaggaactgttgtctatgggattgaacacttaacagctgtctctgggaatgtaaatttgattctttggactgctcatgggactctgtgacattttcctctccagtgacagcagatttgaatggcattaggctactgattaaataatacccaagtaagtttaatgtcaacttaggcatctattttgcatgtattttttctgaaataatctttctctaattgcgatcatattttcattatactttagtcttttaatatctttaaaatatgctcttttaaacaggtcttatctgaaccctttcgttggtaatctttttctgaattgtcatattagagtgtgagtgtgtgagaattaaggttgagaaataaattagcttaaatacaaaacagctatctacaaaatagatattcttaaccaaaataatatgtctttatactaccattttatatcgtgccaccaagataaaaggtcgcagttatttaagggaattaccttcttaagtttcatgaaatcactgtgagttattcttttctaactgaaagcataaattataaagagattgcacatggtcatttctactttatcctaattaagtggtctgagatttgaaaaaaaagtaatagacttacaatatttttatgacttattttttaaataaatatgtcagtaaaaacttccctggggaaaaaaaattcttgaggagaaaagagtgtttggggttttttttttcagttgtatggcactgcttgcaaatgaaaggattcgttgtgtgcctcacatgcccaaaaaggacagcacgagcattctaacttaaggactggtttaaatatgacctaatgaactaaatatatttctgtctggtattcttaggttactttacttctaaggttgtttgaatgcatttatccagctctcctatcaaatacatgccaggttaaccctgtgaaggttttcctgtatgattctgagaatttctttataagaacagggtcttgatagtgaaggttctttccccaaagtgcaaggccttctattttgattcaatatcaacataatgctttttttttttttgaaagtgacttaagtactaaagattatcctcaatagtaattctacttagacatattttggttgaagaaatttaaagagtttattttttgtaggagcactgtgctgtgatcatgaaatttttgcaaaactaacagaaaatgataaacagttaagaacttccagctagaacaataggctgtttcctttttttaagtcagtttgtcatccttgctgattgacagtctccaattgttttcagaattattagtctcacagtatttcagaattacgctgtataaaaaagtacattaaatttaaacttaataaaataagtttcgcaagctcagtcaagacagggaagtgagaatatgattattcttccaaatttactatttccaccagcggtctcagttcagcatctgagaatatgttaggggaaactcagcaagtcagttccttttgtttttctggcctctgacttacttggatgggaaatagccaaaaaaaaaaaaaatgctgaatatctcagatataggtaatgggtcttcaccagaacataaaaatagacccttattagccatatcagtaatgtgctgtgtgggggattttttttttctttcaattcctctggcaacaaaccacacactgggatctgacactgtagagtgctttctcttctctttttttgggggggggagggggtgtggttgcatatttaaactctcacgcatttatgtactgaggactgcagtgtaggactttcctgcagaataccatttgatcctattaagaattgtccaaatgttggagcatttgattgaaaaatccttcttagccattttaaaggtaagttgtatgatttttctttaaataaaaaagattaagggatttttcccatcacccagatgacgggaggtgacactactgtataaatactcct

SEQ ID NO: 38596 - DNA, 2300 bp, Homo sapien
agggcagggaaagctattgttaccactccaccctgaacaattaataaaaagccagccctacttgctcagtgagacagaaaattccacaggaaaaacaaatcacttgtttagacttatgtgcattccctttacattggagaaaaatgacactaaagaactagtcagtcttcttaatcaccaagaccttgatgtaaatgaagtttattgcatcctatggtttatactggaaagtatcctatgtataagggaataggcaaaggggaatcccaaaggttaagggaacatatgtaaataataaaattgccaagaaaaatatttgtaacatttattcctacattttgggggaaaatatcattttcttattcttttcttagctctacaggtaatatttttgaaaaactatatgattactaaagtggaagtaaatactaataaaatcataagagtggtacctctgttgcaagacagctgtggagggaaaacctgaaattataacaaaccacaattattaatacacttacaacattaacaacaatattctatgtgcccttttttgactgtagccttcattccgttggcacatatgttttctttggccatgagcatttcaaagtagagaataattgtttataaactataaagcgcattctgactataaatgacacgccaaccccattattgacaaaatgtcattgcaacaacaaagaagttcaaataaatgtgttttcaaatactagttagaattaactctgattattacagtaggatccactcatttcacaaactgtattctttcttccaatctttttttttttttttgagatggagtttcactcttgttgcccaggctggagtgcaatggcatgatctcggctcaccgcaacctccgcctcctgggttcaagcgattctcctgcctcagcctccggagtagctgggattacaagcatgtgccaccaagcccggctaactttgtatgtttagtagagatggggtttctctgtgttggtcgggctggtctcaaactcccaacctcaggtgatccacccgcctcagccttccaaagtgctaggatgacaggtgtgagccaccacgcccggctctcccaatctttatataataatcacatactatggctgggcatggtggctcacgcctgtcatcccagcactttgggaggctgaggtgggtggatcacgaggtcaggagttcgagaccagcctgaccaacatggtgaaaccccatctctactgaaaatacaaaaattaaccaggcatggtggcgtgcacctgtaatcccagctacacaggaggctgagtcaggagaattgcttgaacccaggaggcagaggttgcagtgagccgagatcgtgccactgcactccagcctgggtgacagagaaagactccgtctcaaaaaataataataatcacatactttatgaagacaccaaacattagattgacaaatatatactaacacaaactacctaattttaacagaattagcatgaatcaactgcaaatgacaaactatattgtagttgaatgtgtagggaaaaaattcttcagtaagagagcaatgccatggttgaaacaagacatcctctacattttatatttgcttcaaattctttatacctgtagtctatccaaagtcatcaataaaactgaaagtaagatactcttattttaaaaattccatgttttaaacagtttttaggacaagccattcaggcctgaactcagtattcatgaaaattagactttcttttaacagttattttaagtatggtgatattagagagtgtcccagtataaaatttctgagaatttttttctatttacccatgcttttcttattttcacagatagctttccaatgattagacgaattgattctttctgtgactcatcagttcatttcctgtaaaattcatgtcttgctgttgatttgtgaataaggtatcgtaaataaaacatctgttaccatacttgcttatcatttaatggaaaacacatcagtcaacccacattctgttcgcaggagagctccagaaggggtgtggaaggttgtgttgggtggagaaaccagatagtgaggatgcaactaagttgctgagacaagggaagagagatgagggtgagagttctccttagataagatttcaatatgttaatcatgtgtagaaagaaaattaaaaaggaggaatatgaagaaattcagatatgacattattagttctgccactggtaggcattagaagcaagaaaagggagacggaccgaggaagccactttg

SEQ ID NO: 38597 - DNA, 2300 bp, Homo sapien
attaatcttaggggcttctagtgccactgttaaaattccactctgtggcctaagtctctggcaagcatgagcactgtgtccttgcgcttgaatctatcttggctaaagcctatcagtatttttatgattcattttgaggtgtggccaactgtaaacgtctcagagctaagcaaataccattaaatcccaggagcacattgaaaagaggtttatttgagcaatattgagggaatttcggcacaaatttcatgggctgtgattaaatctaagctatttgtcaaggcctccaaacccctgaatgtgtaacagattgagctaattcattggtgtttgtaaattgagtttggaattaagctcctttgtaaatacaccgtttgagatgcatttcatcttgcaactctttatcgtggttttctcaaacttaaaatgtataaacgaattccatcttacgtgaatttgctgatcaatttctaacagctccacatttctaaattaatttaatccacacactcatctttctaatgatttattcttctccctgcttaatatataaatgccgaatgagatatcagaaggaggataatagtggagagtatataacctggatcttactcagtttcagaagtatttcagagaagcacgcacagtgcttattcacattgacatctggattttaatattgtcagtttttggggggttaaattccttattacaaatttatgtcaaggatcttctcacgcatcatcacaaaaaataattttaactgttgttactatattaattttttgacgtttggagataatattagccctggaatagtatttttgaactcataaatttgcattatttgacttgatccttcgttccttgactatgcagcgtgagtctgagacacgtgtatgtttactgaacacaagaggtgggccccagacacatgaaagatgtgtctcactcacctcttcctcctacctgagatttcattcaactttcccactgaacaatgattttgcacccccagaggggttttctatgatacagtttataagaatttaatgattgtttcattatgtgaattgtcaggtataaggtggagatattacactccacgttccttctgtagagtgacatctgctgggctgtgccccacagtgattttaagcaagtgcctgcttgttttatggggatcaaagctcatttctcccgatgtttaaacatctagtttattgtggtccggagaagtaattttcacttaaacatcaaagtcagttccagagtttaacgagtgtacctgaaagtaatgctggaaaaatacctctgatgtatttctgtagatgtgtggttatggcaatctgttggcataactcagaacagcctctccacatagaattgtcaaataatttcttcgtgtaattatgtttgggagtatggttggggacaacgtactggatatgagtcaacgtggaggggtcaacagaattactgctttcagggcattaaggaaactcaataggaaacaatacccattaaaaggatacacttgtgcaacaagattgtcgtttatcttgacctgttttagaaaacacgcaacagaggcccggcgcggtggctctcggcactttgggcggctgaggcgggcggaccattaggtcaagagatccagaccatcctggccctgtctctactaaaaatacaaaaattagctgggcgtggtggtgggagcctgtagtcccagctattcaggaggctgaggcaggagaatcgcttgaacccgggaggcggaggttgcagtgagccatgatcacaccactgcactgcactccagcctggcgacagagtgagattccctctccaaaaacaaaacaaaaaacaaaaaacaaaaaacaaaaaaaaaacgcagcagaataaggacaaaactcacgtccttttaaaaacgcatctctttgccttaaaaggctgcagtgatccttccctggcaaaaataaaaaaccacaactgctttgcactttgatatttacggccaggcaaagcctgtgtaagtcttcgagagccgccggcaacaaaaaccgtggagcgcacccagcaagttgctcactccgccgcggactgcgaaaggagcagggttgcggagctagggctccagcctgcggccgcgcattcttgcgtctggccagccgcgagctctaagggtcggccccgcccggtccgcccccgcggctccctgccaggctctcgcgggcgcgctcggggtggggcctcgcggctggcggagatgcggccggggctgcgcggtggtgatgcga

SEQ ID NO: 38598 - DNA, 2300 bp, Homo sapien
agttaggagtggagaataaagtatagttaaatgaaggctcagaaagactaggcaaaatctgtatttcaagaatataagctcccgtggcttccctttcaagacaaggaatacaaaggaacataattataatgaatatcccaaggtcactgttagaagccttactgccttattaatttatcctattttcgccaaagttcaatttacacaaatatagatataaatcagtgactaagattagtcataaagtaagagtctgttgtttaccaagtttcgactcttcgattatcctcttgagtctctgttcagaccttatttattttagggactactttatattttttagttcatggctcctgatacattaaattttaagtaattatttgtgatgagaataatgggaactttagttttccacagatttcaataaattgtgctaaacatatattaataaatttcaaagacaagtattctgattttacagaaccatgtttttcataggctagattgagttgttataggaagtcttaacatccttatgattactcagttttactgaattaagatcttctgattcgattgctcagtattagtcactaagtaccagatgtacagcctagtaattcccataagtcaatgacatcatttatgaaaggaaattattgtttactacattcatcgtcttatactttttgtaccatatattttaacaatagctttctaaatttaggaaaattatgtcacaaatctactcttatttgaaattcctaaaattaagttattttcactttcatagagcacgaaacattgattttcattgtctatgcagcaaataatcatcaaagtagcatttatctatactctgactacattctgtaactataaagtaatagaaagtattgattggattctcttgaatttctgatttttaaaaaggcacacatacatttatgaaagtaactgaaagctatatacataggttcaaaaactttaacattcatcccttaagtgcatgtgaaatagtaaaagcaaacattttaagaaaaatgtaattcacaagacagtaacttgatatttatgaatctcactggcctagcaatttttcaagatattttcaaatagattagctacatttaaagactttaaaccagtggacaaaaaaataaattttcacattaagacaagaatggcaataagagtgattacttgggaaaattcatgttattcatctgaaaactgatttataagccataccaaataagttaattctatgggctaattcttgaacattaattcttctgatacttggaaaaataattgtaaatatttaatttgttaatataattttagaaatttgattttatttccaaataatagttaaaaaaataaaaattttatggtgattatttccatattctgtttacacttttctcatatattaagttgacaaactaaatgtcaagctgtgtatgcaggagagagtgtctttctttacacgttagaaaacattcaatagtattttaaaagaggcaagggtatattgagacatttaatttaaataaaacacaaaaactatgcttttaagcataatgtaatgtaaaaatgcatacaaaagcataatataatatcaacgaatttaaaaagaaagaattatgttttatgatagtataaaatattcctactgaaaatgctttataattttaaaaagctaaactacttagaaaaaaatatagagctgtagaatttttaaaaattaaatgtagcatgaattatgtagcccaagtagaatacagatagtcttctcttttattctcccattagaaactcacatcatatatagtatttcagattgagataatagtaaagtgaaaatatttgctatttatcattataatttacaaattaaacaacatagtactattaggggaaaattggagaaccatggcttttttcttttccagataacttcgataacttctgccagccaacagtcaattccaatggatcatttaaacagtctatgactactttacattcttagaaccctgtccagctctgcagtctggcaaaataagttatttccccagtgataacaaactgggagaatgactggagaggttttgcaacagggccaagatctcacagtgttcctctctttaagtggggtctaggagaaacccagatttccctcaacagataatcattggtaagaacaatatcctgtataatgaggccaaagtgactatgtgtagtaggtggtgaatacttaactctttcaggtagtttgaagagtgggtgaagtg

SEQ ID NO: 38599 - DNA, 2300 bp, Homo sapien
catttctaaaactgaaccccaatctctccttgcccttcaatcttcttctcaataaaaggaacatccatcgggcttgctcaagctaggatccagaaagtcatttttaacctatttgtgtccttctttctccattcagccaaagttttaccttctaaatacatcttaaatcactcacatgtctctgtctccagtggctccactttagcccaaggcacaattttcttccactttcattactatagtaatctcaaaactgtgttcattactgtagtaacctcaaaaatgtgtttctccacgtttactctccaccttctatcctttttttattttttatttttatttatttatttttttcttagacagggtctcttctgtggcccaggctggagtgcagtggtgccatcatggctcaataccatattgaactcctgggttcaagcaatcctctcacctcagcttcccaagcagatgggactctaggcatgcaccaccacatctagctagaatacacattttaaaatgtaactctgtattattctcctgtttgaatattctcaatgatttcctatcagctgaccaacagatgaactatccctgatggttcaactcctcactcacctcttttccttttgtccactatattctagctacactagtatctttcagttctgggagtaggccaggaagctctttcctgcctcaaaacctttgcatatgctgttctttctgcctggaattatccccccacccaccagcttttgcctgactaatgcctacttcatcattcagcttaaatatcaccaatcatccccccacccaccttcctgatccagttacacattgcacaggatgacacacttctatttcgggacacttacctcaattaattaaattgtcgtttgcatacacagatatgaatattgtctctactactagattctaagctccaggagaacatgggctaggctaggtactacatgataaatatttttaaaatgaatgtgtcagaaattatgttcacagtttttgtcttgttttctttcaattcaaaaatacgatagcattataatctcttttgtttactcttttagtaatagcatctccaaattcctttggcagtagtgttggggaggtggtttccactggcttctgtcatacacttctgttttaaatcagcacatgtttattgagcatttactatgatagtactgagtgctggggataccatggtgaataaataaaccttgacccctacccttcttataaatacaagcaagtttgggaaacaggcatcaaccaagaatctgaaagtgttaactgagaagtgcaaatagcttctggagtatatagcaagattttactgtgcttttcagttcatccttccttaatctttcaacattgtggtaatctcaaatcctgcctattggaatattatttttttctattttatgaacacttccattatgacataattatttaatcatatttagtgtttctctcttttatctttcctctttctttgttgaatttttccagattcctaatcttttaagtcttgccccttctttcttactttcccaagtgtcttatcacacttaatagattcaagaggtctgtgtatttattatcaagggaataacatagtttctcaaatggtgaaaacactagcacattttacacatgaaattacaaagatttctctagttagcatgaaattgacaaatgtttcatcgtaagcttttaattacatctgaagatgatcaaataacaatagataatgcttattcagtgctgttttccaggctctgttttatctcatttaatcaccattacaactttacataggcaggttctaaaactacatccgttttagagaaaaggaagtgttcaaataattcataattagaatacatttaggggtggattttcaatattaattccacctggccctttgttttatactgtgtcgtggacatttgatttaattattttccaggaaagtaggagggagggaaaacacttatttaaacaagaaaacattgctatcatctgggtaggatatgagcaagaagttattcagaggtcaaactgcttttcacacaggccttgcccaaagctctttgagatgtcaactaaaggaacatggcctcctcatctctaaatacacctggctaacaggcgagttgcttcttaccatgaagttgaaagttagcagggaaaggccagtttagcagaggagatttatttatctttaatgggggaagggagtgtagctattgaaaaagaaaagcaacaggctt

SEQ ID NO: 38600 - DNA, 2300 bp, Homo sapien
aggaatatgatctcatgctaacagactgagtggggacgcctggcaaggtgagattcttcctggtatctctgtgcagtactcattccttctgggtatggggcaggaccttctttggaatggggtcttatgagctacgatcaaacaaggtaggtcagataatgtctttatggccagatttcacacagaaagttgaggtgttagagtgatatgcttaggttttatggctggtttgggaaaaagggttctggtttctaggagccaccttgggaaagagggattctagtttctatgcctcgccttgggggagaatgaagggccggagactggagagcaggagaaggtcagagagagctgattctgaggtcttcatttggggtatcatttttctgagcccctacaccctaataaagcacaagagatgcagtggagcaattcagggtcacggtcaggctatgcattgaactgagatttcccaaaaagtctactgaacagtaaaaagaaagtaaaatggatcctggggacaccagacagaggctgacaaatgatttttaagtaaggagaaaatgataaaagagaaggattagcaatagaaacgggtcatataaaatagatccctcaaaaggaattctcttaatccctagcttctctagatatcccacaacctcagggacttatcaggcaggttgtttttccctgaaagtgggggtaagggagctggaggacaaatgaaggtggtatgtggagggaaggctgttctgtggatgagtttaattcagccccacaatcacttctgtacagctacccaccgctctagtcattcccacatttggcctgctttcttttcctctgtggacaggggcactgttctctactaatatccatctcagagagatacaggggcaagtatccctcagcatccattagaaataaagcaggctcttgcttaaagttaccagagcatccacctctgggtgcaaagacaaattctctgaatcaagtgaggggtctgggcaatgatctcacaaggatttgatacctaggagtccccccatgcccatacaagctcctcatctttccacttacactttgggaagctggctgtcgtgtacaggcagatgaagctggaaaagagaggcatattcagtactcacgaattcaaacagcttgagggatttccggtgaaagtcagtcctaaccagtgtatacgtacatacacaccaacatgtgtgaatgtgttgtgtgcacgtgtgtgcctgtacaagtccacatggcatatttacctgtcagggacaggctatggacaatgactgtttcttggactttctcttaaaaagtcagatcagacaagtttattttgtatactttgggtaaatgtgtggtatttcgtgagtttggcagtttgtgaaaaaaaaaaaaaaaaaaaaaaaaaaaaaaagctgcctgctctgagcccatggggcaggggcaattttttcatctgacaatctgcgtgcttttgttttgcttgcttattttggccccacaataccacacccttttcttaactaacctctttctacctgggctggacgtgcctgggctctcctccctggccccgctcccacctctcccaggtctctaaacccctagagaacctgtgtcagtgttttgaatccctcagttgctctagcaggaaaactagacagattaggagctggggcacatttggctgaaagacagctcttcgctttcttcttatgctgcttccccttcctcttttcccaaatagatatataaacacatgtattttcctgtttaaattgagcgaattggtcccctgcctgtgccttgatttagccattgggctcagccttgctcctcccttccttactcggataggagccactgggatctggagctccagcttccaaattgaagctggcctcaggccaggtgaccttttctttgtaagtttctttcctaagcgtggggttggggggaggcggggaatggggggggttgcagggatctgtttggtgctgttgaagggggggcgagtgaggaaaggagggggctggaagagagtaaagggctgttgttaaacagtttcttaccgtaagagggagttcagacctagatctttccagttaatcacacaacaaacttagctcatcgcaataaaaagcagctcagagccgactggctcttttaggcactgactccgaacaggattctttcacccaggcatctcctccagagggatccgccagcccgtccagcagcaccatgtgggtgaccaaactcctgccagccctgctgct

SEQ ID NO: 38601 - DNA, 2300 bp, Homo sapien
ggaaccaacctaaatgtccatcaaccaatgattaaagaaaatgtggtatatatacaacatggaatacacctcagccataaaaaggaatgaaataatggcatttgcagcaacctagatggagttggagaccatttttctaagggaagtaactcatgaatggaaaaccaaatattgtatgttctaacttctaagtgggagctaagctataaggatgcagaggcataagaatgatataatggactttggggacttgggaggaatgggagtaagggataaagtactacatacattcggtgcattgtacattgcttgggtgacaggtgcaccaaaatctcagaaatcaccactaaagaattatccatgtaaccaaaaccacctgttccccaaaatctattgaaataaaatttaaaaataataaggaggtttttaaaaatgaaattcactatgttaaaaggaattaaaggatgtggacaatgttatcaaatatagaacctaggaataaaagatgaataatacttttgcattaagagggaactaaatgagctaccactagactgtggggagttaatgggagtatattcattctaatatttcttggttgtctcaagacaaatctcttcctagcttagctctctattttggatatatatttgcaaagcaaaatcctatatgtgtccaaataatgtatttgaaccaacataaacaatggttcaaatacattattcccattttactttaattcttgatgaaggtccagatgctatgattgcactctatgttgagccttataaattgtataagaaatatgggaaatggaaatgtatttattttaccagtccccaactttaccatatggagcatagttgctaaaatcataattcttgggaattataaaacctactattaaattttacatttatttcttgcatttataaatatataggatttttgatactgtgaaagttttttctttaaaattagtatattattcaaacagcatttattattttctttcataatcatcaaaagctacaactaaaaatttaaagcatttgtcaaatgatgctagggaaattcctcaatgataaaatctaggagaaagtaatttctttggatttcaattacagcagttttataaggtaagttcagaaagtgaactaaatatggattactctgaaagatgtgttactaaatatttttcaagatttttagatttttctttttctgttcttttcttttttttttaacaacaggaggattatactgactgtggtggtgtttctggattaaatccctccctgtggtatatcattggaatccagtttctactactttggctggtatctggcagcacacaccgcctgttatgaccttctaaaaaccaaatctgcatagttaaactccagaccctgccaaaacatgagccctgccctcaattacagtaacgtagggtcagctataaaatcagacaaacattagctgggcctgttccatggcataacactaaggcgcagactcctaaggcacccactggctgcatgtcagggtgtcagatccttaaacgtgtgtgaatgctgcatcatctatgtgtaacatcaaagcaaaatcctatacgtgtcctctattggaaaatttgggagtttgttgttgcattgttggtgattacatgtgaaagggttccccatacaattgttaatgaaccataagaaatgtcttgatattgacctggaattttgacttgctgcaattttactaagaaaatctctaaggggaaagaaattatttttgccttcactttttcttctgtgaaaagttaattcctgctttaagtagcaattattgaaatatatagagaaagagagaattaacattggtctaaattgttgaaatataaataatggctaattttctatgaaaaatttgccatgaataaaatgccttatgaagaacggcttctttgccaaaaataaaacacaattgatgaccaattcaattttgatggggtaatgaattgatggtttgaaaatagtaactaagaaattattaaactaaaggtgcttgagggagaaattagaatatgtgacatatttcctcataaatgtaagcaagcccttaataaatgctttgatgtaatgttccttttgttcacagtacagttatgtagtgctagccagatatttaaaaatgctctaagaaaagcttgtcaggggggagggggaaatgtttttcttgtgataaatgaactttggtttaccaagggtattttgcatgatgctgctgctattttaacttttcagttg

SEQ ID NO: 38602 - DNA, 2300 bp, Homo sapien
agataaataatttttagaacttttaaataggcattttactgcattgacaaaaaaccagtgctataaaaattaagcattctatgaaattattcttcctgtatcctaaaaatagaaaaaaaaagagaaatattaatttaaatcagatccttaagttacaagataatttttaaaaagctattgtttgggagttggggaggaatgatttaatataccaatgtacacctgatacaaacatcgccatgcttttggtctttggatttttctttctaaactccattaatagctcagatggattcttaaaatgtgcacacaatattactgtccatttatcatataattactcccagagtctgactctgtgttctcatcaggtcatagttaagtggagttaagttgaatcttggctctagggcaacagagagtttgacctgcatttcctttttcccaggtggttatcgcataggcagctgttgcctttgacctctggcctcacaagacaattacactgcatgtattttcttatggaaatatcttatccatgttgagcttcaacgtcacagtttgtcatttattattattaattttatcaattaacttttaacctttaagtttgtcttattttcaaattggccggttatgttgaagaccggaagagttccagtaatgacaagtcccagttcctaaaaatagattcagagagaaagggcaaattaaaattacaatttaagctttgtcagagtgcactaacctttgatatctgagattgcattttatagttactttataaagagccacaaaaactagtaactcattttgaatatctattaaaatttatttttaaaatatcaaggaaaatatcttggaaataattaggacctactaggcacctactgaagcatgcaacatttaaaataatcctctaagataacttcaaaaataatcagcttacacaaatagtcaacagcctgtatgcatttcagtaaccctgtgtcctccccctttttcatagtgatagttcacctaatatcagggcctccataagcagagtgataataaaatattattttaagtgattatttagcttccctttttgtagccttattctttattttttatgccctaagccaaagacttcatgctaaatgaaaaatgtgcagttgaataacatgataaataaaagaaacattctattgatactgcatatctgggatattctaagtaaatgttacgctcttcagaagcagtactacttttctaagtagaccccaaaataagcagtactttttgacaagtaaaattatgaagaaaagacaactgcaagcatcaaatataaaagtctagtctgaagagtttaacatagtagaactaatgccatcctattaatcagcacataatttaatacattaaatgaatccatacagattagtcaaaataaactgattttcaagtcagagtttgcttttgttactgacatctatatccattataattttaaccatttcatgtcaaaactacatttaacaaaatcactctttaaaataatttttattgtttgaaattttgaatttgctaaatgagaaattattattaatcttctcacgaatagtgattccaaatccaaatctcaagaactcagaacagagttctggaatcagaaccgagttcataaagttggatttggaataattattcactagaacattaaaaatatttattaatatcagggagcaaatgttgtggtatcaggttgtggttcataattgtgcacataggaggcccaaattcaatgggaatatgaatgaattagggaggagagacaataatagagaagcttccagaagaccaaaataccaaattatttgcagcaaataaaactaaggaaacaaccatacatatttgggtgcatgatgattgatatggtttggctgtgttcccacacaaatctcatcttcagttgtagttcccataatccccacgtgttgtgggagagatccagaggtaattgaaccatggtacggtttcccccatgttattctcgtgatagtgagtaatttctcacgaggtctgatggtttttaagtggctttccccttcgctcaacacttattctctctcctgctgcctggcgaagagatgctttccgccatgattttaagtttcctgaggcctccccagccacatggaactgtgagtcaattaaaccttttttctttataaagtactcagtcttggggatttcttcacagcagtgtgagaacagactcatacagtgatagacacatgttggcgcttataaagtcc

SEQ ID NO: 38603 - DNA, 2300 bp, Homo sapien
cctttctcctaaagatataaaattggaaacagtgtaccatagtgggaagtctggagttgatgttgaaataattgacagaatatataacaatggtatttttaggtagtgaggctattgataccaacatatcacatagacaataatgggcatctctaattctgctcttcttagtcctcatgctggggaagaaagtctgcttttgaattattaaaaatggaagaaatgatggatttgactatttacttatctaattttggagtggaatgctatcttcagttatataaaatatccctcctgagctgtagttctcaatcccattacatcccacttcatccctcatttgcgcagctcctgctgccacagtatccatgcctagcataaaacaaactaagttaagtcacggtggggtgccttttgtgaggccactcagagtagaaagaaacaaagagcaagacagagatgcgaagaacataaagaaaacaaataaggcattaaaaaaaggagaaataagtgggaaggaaaaataaattcaccaggctaagcatcataaaatcacacacgctcttaaaatttggccagtaattaatagtagtagtattattattagtctttgttttgggagattgccttcagagagctggaaaattcatttcgaattaataagggtctttttctttcagaagcatctcctaaaaataagaacgggctaattaaaaatctgacagccaccccgatacttacagaatttttgcatatgcaggatagtcatcacaaattgtattctctgcacgtcatgtcaaaagtattctcatacactactagagggagcttaagaatttaaggtgtgcaagaatatatttctatctttggcccaccagggccctcttgtaggaggcctgtgttgggcgggagaggcctagtcgcagaccctgtcttttcaaggagaaagcccgccactgcttcctctgagtctggagataaaaccagtccggcattgctactccctagctctctccccctcccttaattcctcctctacatttcaggcgcatttctcagagtgccacctgttcctgctgcttacccttttcatgccttcgcattgacaaaagtgagctcaccctgcggtaaccttgtcaggcagggcaggccagtggccagagcagggcgttaggacccttttggaggtagtcccaactgggatgctgcaaagcgcttctcttactactgtcctccctagatgcagaattcgtccctccacccctctgtccaatggaaccacagggctgggaagattttacagcgtcagtacttctctgtccgtccacagcccggtccctgaggctctgtcctcgccaggtgagccgagcagtacctgggcgtgggaccgctggcacaaagggcacccagccccggcagaggctctaacctatggcacacgcgggcatatagtgccacctggtagagagtcaacagtggtgctttaaaatgcaatacaaacccctcctacatttgttgtcaaatcacttcacgattcccaggcaggcactggattctgcgcctgggagtagggctgggggggaacgctgcctgcatgtgcaaaaataacccccgaagacgcgagccaagtcctgggttggagcctctgcagcctgtggatgcccgctgggcggctggccgtcccccgggagccccgcggggctggtccgctccgcctgcgcacgccgggcggcgggagcgagccggcgccgactttgggagttcctggctgccttgtatggagggctgctcccggcccgtctccgcccgactgctctgacgcccagccctcccgctgcccacccccagccgcctccctctgacttgcctaagaagccagacggagcctctcgcttccacaagtctctctgcctgccattccccgattcctgcagccacccccaccctccagcgccgtcacccctcctccgcccccgcccccgcctccgccttcgcctcggcaatcgggggaataaatcagggaggaaaccgagagggagagcgagagcgcgcgagcgccggcgggctcgccgaggtctgtttccaaagtcgcccttgatggcggcggaggcaaggcggccgcggcgcggagcagccgacgcacgctagtgggtccgcccgccaccgccccttcctcggcgtccgctcccgcccttgccgtcccccgcgcggctccgcgcctcgggccccgggcgcagccagccctccagacgcccgcggtcccggcggcgtgtgctgctcttcctccgcccgcggtttcc

SEQ ID NO: 38604 - DNA, 2300 bp, Homo sapien
tagagatttccatctttgcaaagactcctttgaggctgctagcaatctctgcttccaacatccctcatccaaaaactaactactgatttacttcttgtctctgtaagtttgccttttccaagcatttcatataaattggatcattcaatatacagttttggtgtctggtttctctcatttactagttttttaggttactagtttttaggttagttgtagcatgtgccagtggtttgctcctttttactgctaaatatgttccattgtttaaaaagtcaacattttgtttttccgtgagattttctcccatattttaaataatatttgcatacatgttttagtatacatgtataatatgtaatttttattggttagtttactagacataaaatttctggttgtatggtaagtttccgtctaactatttaagaaactgccacatagtcaaggtgagtttgtcattttgcattcttgccagcaatttttcatgatttactttgctttgttaagtaattgtttgtggatattcatgagggatattattctgtagatttgttttcttgtgatatctttgagtaatctcataatactgaccatgtagaatgtgttgggaagtgttcctggctgtatttttctatagagtttgtgaagaattcgtattattcattttttgaatatttggtagaatccaccaatgaaatcacctggcctaagctttctttttcagtaagacatccagttactaattcaatgcctttatttgttataagactatttaaatgttctctttcttcttcaatcagttttggtaatttgagtctttctaaaaatgtattcatttcacctatgttttataactattgtcacaaatgtattcatcatactttatccttttcatttctcttaggtcacacagtgaagccctttattattcctaatttttattatagtgtcttcaattttttcttagtaaagctagttgaagatttgtcagttttgccaatcttttcaaagacccaatttttgcttttattgatttttctccattattttttgttttctattttattgatttctggtctaaatatcatctatatcttttctttcatttattttgtagttagttagcttttttctcctagattcttaaggtgaaaagttagtttattagttggagagctttcttgttttgtgacatagacatttaaaactatgtattttcctttaaggactactttactgcatcccatgcattttttttcatttttattcacttcaaaagatttcttaattcccttgtaattttttctcttacctattgtttatttagaaacatgtttttacattccctaatgtttggggatttttccagtctctttctgctcttgatctttagtttagtttcattgtagttggaaaacctatttggtatgattcaattattttgacttcattcagatttgcaaagctttgttgataaatttgtatataaaatggagagacattaaaagcacaagcaatttgtgagtctgacagtttccaagtatgactatgattttactttccactgaaacttctctctgtgctgcacatctgtgtaaccttcttttggttagatttgtgtgaacagtttgggctctctctggtttctgccaaacatgcactcagccttcatttacccagggatatattgagaacttattaaatctatttatggatgtcccaattcccagtctcccagtttaatccccaaataaattgcaagtctgccacttgtttcatcccctccagcagtaaagcttctagttttcataccctgccctgtctgatagaattatcatgacaacttagctggggatggaagcagcccaagccaagtacgaccaagattcccacttgatatggtttggctgtgtccctacccaaatgtcatcttgaattcccgtgtgttgtaggaggcacccggtgggaggtatatgagtcatgggggcgagtttttctcgtgctgttctcatgatagtgaataagtctcatgagatctgatggttttataaggaggagtttccctgcataagctctctctttgccttccgccatccactgagatgtgactttgccttctgccatgattgtgaggctttcccagccacgtggaactgtaagtccattataaacctctttcttttgtaaattgcccagtcttgggtatgtctttatcagcagcatgaaaacagactaatacaccagtgttcttgaagatcagcgcttctcatgaacaaatgctgcttagtttgttgtaa

SEQ ID NO: 38605 - DNA, 2300 bp, Homo sapien
gtgcctcctgttggtgtcacaaatggatggactgatagcaccgtatcccagggaatcactgatggggaagtagtggatctcagtacaaccaagtctcacagaacagtcgtaacaatggatgagtctacttcaagtgtgatgaccaaaataatagaagatgaaaaacccgttgatttaaccgcagggagaagagctgtgtgctgtgatgtggtttataaattaccatttggaaggagctgcacagcacagcagcctgcaactactcttcctgaggatcgttttggttatagggatgaccactatcagtatgatcgatcagggccatatggttatagagggattgggggaatgaagccttccatgtctgacacaaatttagcagaagctggacattttttctataaaagtaagaatgcttttgattattctgaaggaactgacacagcagtagatctgacttcagggagagttactacaggtcagtatgatgtggcagcagacctttccttgaaatatcattatggtgttcctcatctcatttcaggatgaaaatgtggcttcttttccagttttgttactttttctctttctttggatgttatagcagcatattttggagtacaagtgcgcttttgttccttcattttaaaaaaaatttgttctgctcaaaatcactgcatgcgcctgcatgttcaacattgctttcattccgcatataattaggttaccctgtggatttgcatgcagtctcattcattatgttcatcaagatgagagggttttcaaactcaaaaagcatcattcattctgggaactggactataactctgccctgtatttcaggtgaggtaatggattattcaagcaagactacaggtccatatccagaaacacgacaagtcatttcaggagctgggattagtaccccacagtattccacagcaagaatgacaccaccaccaggaccccagtattgtgtggggagtgttttgaggtcatctaatggtgttgtctattcttcagtagcaactccaacaccctctacatttgctatcaccacacaacctggctccattttcagcaccacagtgagggatttgtctggtattcatacggctgatgcagtgacttcattacctgccatgcaccatagccagccaatgcctagatcatattttataacaacaggtgcatctgaaacggacattgcagtaactggtattgatatcagtgccagtttgcaaactattactatggagtctcttactgctgagacgatagactctgttcccactttaaccacagcatccgaagtgtttcctgaagtggtgggagatgaaagtgctcttttaattgtccctgaagaagataaacaacagcagcagctagacttggagcgtgagctcctggaactggagaaaattaagcaacagcgctttgctgaggaattggagtgggaacgtcaggaaattcaaaggttccgagaacaagaaaagatcatggttcagaaaaagttggaggagctgcagtctatgaagcaacaccttctctttcagcaagaagaagagcggcaagcccagttcatgatgaggcaggagacgttagctcagcaacagttacagcttgagcagatccaacagctgcaacaacagcttcaccagcagctggaggagcaaaagattcggcagatctaccagtataactatgacccttctggaactgcttctccacaaaccactacagagcaggcaattttggaaggtcagtatgctgctctggaaggcagtcaattttgggcaactgaagatgcaaccaccacagcttcagctgttgtggcaattgaaataccacaaagccaaggatggtacaccgttcagtctgatggtgttactcagtacattgccccacctggtatcctgagcactgtttcagaaatacctctaacagatgttgttgtgaaagaggaaaaacaacccaaaaagagaagttctggagctaaagtccgaggacagtatgatgacatgggagaaaatatgacagatgatccccgaagttttaaaaagatagtggacagtggtgtacaaacggatgacgaagatgccacagatcggagctatgtgagtaggagaaggagaactaaaaagagtgtggatacaagcgtccaaactgatgatgaagatcaggatgagtgggatatgcctactagatcaaggaggaaagctcgtgtagggaaatatggtgacagcatgacagaggctgacaagaccaaacccctttccaaagtctccagcatagcagtt

SEQ ID NO: 38606 - DNA, 2300 bp, Homo sapien
ctcttgctctagataacatacatttagagaagcctcagtataaagaagatggaaaattgcaacttgttggtgatgtaattgatttgcgtacagtaccaaaggtagaagttaaaacaactgataaatgtattgatctttctgcttctacaatggatgtgaaaaggcagatcacagcaaatgaagtttatgggaaacaaattagtgctgtccaaccctctattataaatcttagtgtgacatcatcaatagtgactcctgtatctctggccactgagacagtgacctttgtcacatgcacagctagtgcaagttacactacaggcacagaaagcctagtgggtgcagaacatgcaatgacaacaccactccaacttacaacatcaaagcatgctgagcccccatacaggataccaagtgaccaggtctttcctatagctagggaagaagcaccaataaacttatctctaggtactccagcacatgcagtgacattggctattacaaaacctgtcactgtgcctcctgttggtgtcacaaatggatggactgatagcaccgtatcccagggaatcactgatggggaagtagtggatctcagtacaaccaagtctcacagaacagtcgtaacaatggatgagtctacttcaagtgtgatgaccaaaataatagaagatgaaaaacccgttgatttaaccgcagggagaagagctgtgtgctgtgatgtggtttataaattaccatttggaaggagctgcacagcacagcagcctgcaactactcttcctgaggatcgttttggttatagggatgaccactatcagtatgatcgatcagggccatatggttatagagggattgggggaatgaagccttccatgtctgacacaaatttagcagaagctggacattttttctataaaagtaagaatgcttttgattattctgaaggaactgacacagcagtagatctgacttcagggagagttactacaggtcagtatgatgtggcagcagacctttccttgaaatatcattatggtgttcctcatctcatttcaggatgaaaatgtggcttcttttccagttttgttactttttctctttctttggatgttatagcagcatattttggagtacaagtgcgcttttgttccttcattttaaaaaaaatttgttctgctcaaaatcactgcatgcgcctgcatgttcaacattgctttcattccgcatataattaggttaccctgtggatttgcatgcagtctcattcattatgttcatcaagatgagagggttttcaaactcaaaaagcatcattcattctgggaactggactataactctgccctgtatttcaggtgaggtaatggattattcaagcaagactacaggtccatatccagaaacacgacaagtcatttcaggagctgggattagtaccccacagtattccacagcaagaatgacaccaccaccaggaccccagtattgtgtggggagtgttttgaggtcatctaatggtgttgtctattcttcagtagcaactccaacaccctctacatttgctatcaccacacaacctggctccattttcagcaccacagtgagggatttgtctggtattcatacggctgatgcagtgacttcattacctgccatgcaccatagccagccaatgcctagatcatattttataacaacaggtgcatctgaaacggacattgcagtaactggtattgatatcagtgccagtttgcaaactattactatggagtctcttactgctgagacgatagactctgttcccactttaaccacagcatccgaagtgtttcctgaagtggtgggagatgaaagtgctcttttaattgtccctgaagaagataaacaacagcagcagctagacttggagcgtgagctcctggaactggagaaaattaagcaacagcgctttgctgaggaattggagtgggaacgtcaggaaattcaaaggttccgagaacaagaaaagatcatggttcagaaaaagttggaggagctgcagtctatgaagcaacaccttctctttcagcaagaagaagagcggcaagcccagttcatgatgaggcaggagacgttagctcagcaacagttacagcttgagcagatccaacagctgcaacaacagcttcaccagcagctggaggagcaaaagattcggcagatctaccagtataactatgacccttctggaactgcttctccacaaaccactacagagcaggcaattttggaaggtcagtatgctgctctggaaggca

SEQ ID NO: 38607 - DNA, 2300 bp, Homo sapien
aaaaaattgatggttcagatattaagaattcaaaattaaatttatcaaacttttcactaaaatacttctcgtgatttttctctcaaaattgagaagccagtttataatcagttgtaaccttacttgaatttcttccactctaactgtaaatcccactttaaagtagagctaacaaaaatggctgagagcagcaattcagaagtaactcggccttaacaaaaaatgaagcgtcggaccttaagccactgcaggttcttgctccactcaatgaacacaatcctctctcaccttctgttaggaaggaatattaattaaagaccttcatatgcacctatataaaaattataagccatattgtctatagttatacaatcgtatatattcatacatacacaaaaatgcatggacttttaaacatacgaaggatgagaatagcttgagttttattactcattacatcacacacaaaagcagttacgggtattaatatacactatgtcattttttttcggcatttgttacaaaagatgttagcatttggttccctcataagagactgcattatttttgtcatttaaaaaaaaatcagttgtaattattcgtgcttttatactgtaaaactacaaattcactttggaaggtagaagatcgaactatgtaatgattattgcaaaaacctggacttactttctgagcaacttattcatttctgtttgatttatttattcagtctctattacctaacctcaacagttgagacattaagttcacattctgaggaaacgtaggtaacaacattgaggctgcagattcagtgctgaacagtcccgtctaagaaatgtaacagcaagaaaagtgtaggagtgatagtcgaaagtgggtctcaaaaactggttattatgataacgtgctgctaaccaattgtgtgactgtaacttaacagtcacacattaaatgaacttcgtggggttcttctgtccacatttgttaaaaaaggggcgggggaataaaatcatgttttcaaactttcatactaaaacattttaatatttttacaatctcgatattactgcagaaccccacgtccacaacttcccataatcctttattattgtgtagtccctccctttagggaactagttataagcactcaaaaccttagctgcttactaatattgtatcattttaaataatctaattaacaatttaattgttctgtgaaagttctaaatgaaaagggccattcttagctcccttgggaaatgtgcctcaaaggtatcagggtctctcttgctaatcttcagttacttgaaccctttcctagaatgttttaaaaccttcttttaaagaaaataaatgaaactacaaatcccaggagccaaagctgaaaacagacatttcctctcctgcccctcccgccccctttaaatctaggtgtctagtaagctaaaactccagtgaggcatcctgaaatatgcctgaaagaaacgtcgcctgtttcttccctgtttttagccgggcgttcactgggctcctttaaatcggtgctgagagcgaggaaggatccggagcgacgcaggatggggtgggcgtgggccgcgggcatcacctgttccgagaggcgcctgcgcactgagagggcgcgggcgaggaggcggtgcgcggtgggaggggcggacggcgcccggctggcaccgctcagatctgcttctccccggctcggggcgccgaggcggcgtccgggaggtgtcttctgcaaaggttgcctggcgctgtccaacatggaggaggcaccggcagcgggcgttacctgcgagcgggactaacccctgcctggcgttccgggcggcagtgcctggtccagagtccagggactcggctgcctgcacgccccgaggcggaccccggctctgactgctcccctggccgcgggcttctcgactgggacgcggcgcgaggagggagcgcggcggccccgagtctccctgagccatgggcaacgaggcgagcttggaaggggaagggctccccgaagggctggcggcggccgcagcggctggaggaggagctagcggggcggggagcccctctcacaccgcgatcccggccggcatggaggcggatttgagccagctgagcgaagaggagaggagacagatcgccgctgtcatgtcaagggcgcaggggctgcccaagggaagcgtccccccggccgctgcggagtcgccttccatgcacaggcatgcacagcatgatgtatatgtccgggcatatatgtacagcttcccgtgcacatatgt

SEQ ID NO: 38608 - DNA, 2300 bp, Homo sapien
aaaagtcttgtttagatgatgagctatttgatgactctacttctgaggattcttcttgttttattttatgatgtaagtgactaatttggtcccaaagactctttattccattgctaatgccacataggggaaactgagactatagatagttttcttaacagtcattttttggcatcatctatatattttctataggataaagataaaggtaaaaggacataaagagtagttaaaagaaataagtaaggacattgacaactggcagataagccaaagcacattttgaggaatctaaacaacccattattctggcatttacttctaaattgctccaacttaatctgaaggatgagatgtaaaaccaaagacagatcttggcattcataacatatattctcttgtcaacactttagaggtgcatattttgtgtactaatgaaatgattgtaatgtctcacattgtctcagttctatagtagagttaggacaggcactatgcaatcttaagtagaatttcagctatgtgagagtagccatgaatttgcaataaaaggtgtaggcaccacatttacttttcctataatcctactattagataacacatataagagctgctatttattttgtcatttgtttccatcctagaagaaagcaaaagagaattttgaaggtacaatgtatcacatttagagcaacctttaggtctgtagctcatcagactggcttttaaaatatgcaagcattccaggttaaaagtctctaaataacttcatgtcattttactgttaaataatgtttagagtttgctatcttttgtagaccttggaaatctaattatttataatgtccagtgacatttacattttgctaaatatactctgcttgtacaagaacatctcatgattagaaaaatgggtagagaatgcctggctgtacatatgcttctatataatgcaaaaatatcagggtgacacatgttatctttttgttatagtttcgtgattttaaaacataattctcaaaaagtttttaactattagcatttaaaatacagaataagaaaaagttatcatagttgagatcagtgtttaccatttaactctccactatcaaatcaaatatctattcaagtttattggtatcttaacataataccattcatttccatgccaacagctcctgagtgtttggcttagtttttgagattgattgaaggtagattgtaaagttgacctattgtgttaagcttatttacacaaacacagtgccttggaaaatcaactctggaagtccatagcagttgaatcctaaggtattgcacatcctaagttttctaatacctgctttatagaaatcccttgggtggtgaatctcaactttgccagttaccttacctgggggaaattacttcaacattcctaaatttgaagtaaaatttaggaattgctttaggacaaaggatttgcctttaatttcatttgaccaatttgcttaagtaaataatttatcatttctatcaaatttatgagacagtcacagatgaacttttttttttcaggctcttgaaacacacttttcttaaaagagtttaaaaataacatccctaagatataagcaatagaaaaagacttaattttgaaaaaaaccttatggcaacagtgaaaaacagaatttggattctggatggttacaaatagattattttcaaaagaagttggatttattcaacttaggtcaatttatcttggtaagaatttaaaagcgctttctgatgccacatccttgtctgtcacctattcttaaataatcagtctatgtcatcacccctcccgaactccccatttcccccatcaaaatgtggacttctctcctgctgctgagtaacgtggggctggttatgactgggagggaggatgggagcgaggcacgtggaccagaaatacttcctagaaacagcaagtacgctgctcaaccctgcctgaactttcctgtaaacagccactgacagactgcatccctgctgggtggatcctgcgactcctagagggaatggcacttcttgtttttaattagcaaggtgaaaggtgaattaaaactagcagtttggcaagtcagtgcaagaggctgacttctgagaggcttccaggagcccgaagagaggacctccacgggagaagggagtgcgtgtgctcggttttgtttttttctctcttttttttttttttttctgaatgaacagctttgcccaagtgactgaaaaatacagcttcttcctgaatctaccggcgtagttgctgaaga

SEQ ID NO: 38609 - DNA, 2300 bp, Homo sapien
gacagacaagcctcttgtcatttgtagccttaatccattgcctagagcgtgaaagtgcctagtataacaagtgtgggaatcagtaaaatcaacattatttttggattttattttcttaacaatactggctgatcaataggcttgaggaaactgacaaatacaataagatctgtttgatgagtcaatctagtgaagtagagagagaattcctactcccttttccccattctccccctctttaaatcctcctcttcctccttctccacctacattcacacaagccacacatccaacggcagagagggagagacagagagagagagagagagagagagagagaaagcagagcgagcgagcgctgtgctttctctattggtctgtggacattaagtaatgaaagctgtagtgacaatgcttagatcattttcttaagaatactaagccactttcagtaggtgtttatgtttttaattgtgagactcactctctcccttcagccaagaagtttccctactattgaagttgagtctctggattccaagtgctgttctggaggtggggggtggggagtggtggtaggagggggtagggcagaatcatttggggaataaaggagagaaagttctgtcctgttaacttttttatacatcccctaaagattcttgtaaaaatatcagctttgaggaaaactgaatgaaaaataagagagaaaattgagaggccacagccaactacttgtttcagaaggaactaatggtgttcatatgactgcctgaatacatgcctatacgtcccacagaaaatttagtaacccttcagcagctcatgaagacacagagatattcttttcatgttactccttgacactcagcagggacttttgtgaactttgtcatcttccgctgccctttaaaccaaaactagggaagtgtctttaattaatgagatgtgatgcattgaaaatgttagccagagcattccagaagctggaaaaccatagacgtttttaaattctgagtatccttttgagaatcccccgttgtaatttataattctcaaaggacctatatttgtcttgaactgattgttggaatgggctttagtaggaatttcttccctgaaattgcagtgggacagaggaagggggtggttgagcccagggggtttgttgggaggagggaatgatctctaacaaggctttaaaaccttcagtggttaaagttgtattgatgaggatatatagacacacacacacacacacacacacacacgcacacatacaatgcacaagttcagcaggattgtataatgagcatgaattgtaaattttgtaggtagcagaattcagatttttaaaatcaaaattgcacccaaaaatggctataaaacaacgcttgccttgggaagtaaatttatagctacatgcctttcacaggcacgcctgagggttctgctcccggctctaatctctacgagatgttttttgcatgtgttgtgtgacaggagggaaggggagtaggttgagctcgcctgttctcccattgtcagccagtctagtgagtgttggggaaacctgtctgtgggatcttgtgtcatctccctctacatgcgtacaggaaaagtccgcgctgctcacggtttctctctctctctctctctctctctctctttctctctctctctctctctgtttccctttcattctgcttccccggagccgaatgaagcagggagcaggattagagactgccaccggctatcagaggagcttagataaaaggaactgcttcttaagcaccactgcagcagaccttgttaattttttttttttttctttccacacaacagttgtgcctcattatccggtgcctggctcggaatttttttttttttttttctttttggagggtttgaagtttctgtgcttcagtgactgttacagaagaagaggtgttagtgttgccatgaggtcttgattgtctgcatttatgaatgaaactgacctaaatcacctgttacctccagtttccagattgtttgaacttctctggccgcacaatacaggaaggaagactaaagcagcaaagggacctacagcgtctgcagcatgggctggttaactaggattgtctgtcttttctggggagtattacttacagcaagagcaaactatcagaatgggaagaacaatgtgccaaggctgaaattatcctacaaaggtaaatcttatttttcttttatttggttagctttgtaataaccgcccccccccttaattccttgaactccctcccaacccc

SEQ ID NO: 38610 - DNA, 2300 bp, Homo sapien
accctcctgaacatcattaaggaaacttcacccatggaatctgtttacagacttttctaaggacgctatacaaattaacacacacacacacacacacacacacacacaactgtgtataaacatttccaccccttgatgtaaactaatatatactactatattgatcttacccttatgcacttttccaggtctgtcttttctacctttcaatgatgcttgcttgaatatgtgattactactgtttattttatatttgcccctgcacactcagacattacctaatgatgcaatccaaagttttttgtctggtagctttctttttatatgactgcagttaagatatgggctctggtcctcttctactgtttttgataaaggtgattttacatttagagtataacatcttttaaagaaacccattcctattttgaataaaataaatacattttatatgtaaactaacactttgcctagcacctagaataatcaataacttacacatagtaaggacacaaaaaatatatatcaattgaacgactgatgaatgagcttatgaaagcctccaaacaaaagaaaaaacaataaatatacaagtatttcctaagtagtcgttttctaccataaagtatttcttttatttttattttttaaatggacagatacaatgtcatgcatttaccatatacaacatgatgttttccatgtataaatccataggaggtaatgcatttgttaattagctatattgaaccattactatgtaattctgatttaagtaaggtttttgttcttgaattgttctgttggcctattggcttgggaggaaccattgttgggatttggaatttataattccatttaagtttatactttattcaagcttctggatcattactacccgataggtaatgctggtcattattttttaggcatgtgctgtgcccacatatttcttatcttttttgtggcttcagatacatgatctatttgttccatttgcagttctttattactgcatgacagactccatgacagagagtatcttgggagactgaaaacaacaagctctgaagtcagatttagcaatagcaataagttgcctcatttctaaaataagaataattgtattacttgggtaattactttgaaaaatatagaaataatgaatataaaggagctaccaacataaatattataaattagactccttcattaggtaagctaccagtaatatctcctagaaaacaatcatcaccaatcgtctttgggctctgaatgggtataattttgtcatggtgcacacaatattacttatccttggtaactggttaaaaaaaaagtgagtccaaataattttaaatagcaaaatagttactaaaactgaaattcaataaaaagtaaatgtgaaaaggataaatcaatataaaaacatcatatttgcgttttcattcttgttttttcctcttccaatgcattagatgaaagttaaaattctgaatctagtataacagcatcaatgacaaatttaaacgtgcaagtcagaggcagttgagggagtcaaaaaagttaaataagactaacaaaaaaaggaaatcttaaaaaagttaaatggtaagacattgtacttactgtcaagacatggcaaataccagttttcaaattcaggaaaattttccacatgggtggcatgaaacacaggagaagaaggtaatttgccagtgttataagcgtaagcccatgtgtgaaaaaaatgaataaaacagaagaacaagggagaataacaaagctaggtcattactgttgggttgggaaccagatgatgaagagtccaaatgcaacataattgtgcatttaaactatgaaaaggtttaattcctttaatatgtttatatgtattttttttctcttgctacatttttcctgccctgcatgatagtccttgacatagattgaaggcatggtgggggtgggggatggaaattaacaccaaacaaaataaccatcttgttatttagtaatccctccttctgtggtattctaggaattcagataactcattaacagatatcttttatttacagtgcctcaagcaagaggagtactttctttttaaatgtttatggtagaagaacatcaagtatagttgtcaacagacttcttaatattactggttgtgcctgtgcctccaaagcatggatttgatagctccaatattgtaatctaaatttcctggtaagaattttgttatttcattacttgtttatggtaaaacaaagtcttggtactttttaatagctctg

SEQ ID NO: 38611 - DNA, 2300 bp, Homo sapien
gcttcaatagtaatttaaataaattagtcttattataagcacagcagagctagttgggttaaatgaatgaaaaatcatgcttattcagtgttcacaggtgtattagtctgttttcacgcttctgataaagacatactagaaactggggaatttattaaaaaaaataggtttaattggactcacagtttcacatgcctgtggaggcctcacattcatagcggaaggcaaggaggagcaagtcacatcttacctggatggcagcaggcaaggagagcttatgcagggcaactcctgtttttaaaaccatcagatctcgtgagacccattcactatcacgagaacagcatgggaaagacccgcctccataattcaatcatctcccacagagtccctcccacaacatgtgggaattatgggagctacaagatgagatttgggtcgggacacagagccaaaccatatcaacaggtatatattaatttaaaaatgaggacataaatttttatgctgaattattgaatagtgtaattctgtttatcgtgtaattgatttaagtgtttatgttttactaaatgcttaaagaacatttttaatgaaccatttcagagtaaaaataaagtatggaaaatatagataaatattctttaaaagatttgtttttgtttttgttttgtttgcttttgagacagggttttgctctgccacccaggctggaatcagtggcacaaacatggctcactgcagcctcaaccccctgggcttaagtgatcttcctccttcagcctcctgaatagcggggattacagggacaccccaccacacatgactgaatttttaaaatttttgtagagatgagatcccactatgttgaccatactggtctcgaactactgggttcagctgatcctcctgcctcagcctcccaaagtgctgtgattataggcaaaaggatggtttttatatgtgtattattacgcatatgtttatgttgcatggatgtttaattagtaagacattaaatttggaaaagacttttaagcctataaagagacatattgctaaaggttgcaaatattgtttttaatcctataaataatatacaagccagtaccagcattcattgaactcaagttgcctgagactatgctaagcattttatagactttttttccccatttactcatcaaaccaaccatatttcagctgggttcagtggtatgcacctgtagtatcagctacttaggaggctaatgtggaaggattacttgagcccaggagtttgaggcaatgatcttgcctgtgaataattactgcgctccagcttggacaacatagaaagacttcatctctgaaaaacaacaacaaaaattaactaaccgtatttcaagagatttatcatttttatcagtgagaaaacagagacttaaaaaaaatagtctcttgcaggtcatgaagcaaaaaattggcaggtgggatttgatttcaagctgcctttaccattgccttgtatgcatctactcatccaatagagctgaactgcttgtatttaattcatttaactatgagaaaaacatttaatattgagggctaatactgtctttttccttattttaaagttcaaggactcaatatctgggttcagtgtctttgtaaacaatgacatcaataagacactacctgtaatagccaccagttttagtgagtggtagaattgtgttgataaatatttatctttattttttttttcatgtcagaatgatgtaggaggacaacgcagcctgataaacaagtggacgacttttcttaaggccagactgatttgctcaattcctggaagtgatggggcagatacttactttgatgagcttcgtaagttccttctttccttctttcttggaaaggccttactgcctaattaagtaacttggcatttatttccctttggctccaaatgcctgattaattttacctgagcaaaccttacaggagtggttcttactaaaattcacacgcaaagtacacggaagtgctctaggtctgggcacacgtcataatgcagtaactcttctctttgtaagagtcctcaaagtaagtgaaggaaacaaaactacagcaagacacagaaaggtgtgagctctggaactacacagttcatccattctccatgcagtctttcattttgaaaggagccaccttctataggtaggaaaatcttggattccttattccacgggtgccctctgctggcaagtacaggagatttggtgaacactgtccctccgacttgttaatgaaagaat

SEQ ID NO: 38612 - DNA, 2300 bp, Homo sapien
tctgccttctgggttcaagggattctcgtgcctcagcctcccaagtagctgggattacagatgtgcaccaccatgcccggctaacttttgtatttttagtagacagggttgcaccatattggccaggctgttctcaaactactgacctcaagtgatccacccgcctcagcctcccaaagtgctgggattataagcgtgagccaccacacccagccccaacattaacttgtctattaaagaaggctactgtgaagctttattgggatattggccaattgctgtacatttgcaggagagtgattttcataacacctggggcgcacagcaatcagagctctaggcaaaactctagaaaaggcaatattgatctttttcacctcccgccaatttatttttctgttaaaactttttggcttctcttttctcttgcttctgcttcttaaaaagtcagtgctctgttcttctttccaggtgccacatattttctaattgaagtctttccttcatttctcaataaccatactctctgtcttctttgctttaatccaattatttctgaactggtatcatcctattacgcatctgttacctggttaattcacaattatttaaaaccaagacttaaaatgccgaatacctcttaaacaaggttttagaaacccaaataaatttttcagtgatacagtgaaaagaggttcatcatattgcaaacatttttacactgtacatatattatggccatctttccaggtcagtacctacagatctactaaatttttaataatgacatattatttttacaagtacatggatgtactcaattttctattaacccctgtatattgtcatcgtaatgataatgcttatcagccccataactatcttaataataatcacacttattaaatacttattatataaccagcctttgcctgatgctaaatgctatacatatatatatatatatatatatatgctgtatatgtatgctatataaatttcagtatgacatcaatgaggtgggaggaggaaaaagcatggatatttttccaagtgctatttattttacctttcaactaatatataccacggatagccttattctgtttattcagtcattgattttatagaactctgtcataaatactggcttttgtactgtaaaaaattgttttggaggaatactggaggtgttaaagctaaatgtttgttgtataaagaaatttaatgctatatatatgctatatatataaaatgttatataaatgctatatatatagcatatatacacatataaaaaggaatttaatgcttatatatgctatatgtatataaatgctatgtatatacacatataaatccacttgataataatataaattatcttattaggtagatgacgttggtagtcttatattacatatgagtaaattgagtcattgaaaagataaataatgtgtcaaaggtcaccattccagtgagtggcagtgaaagagataaattcagaaagtttatctagagcctatactgtcatattgaacttgaaccaaacactactggttgtttccatttttatacccctagggcaattacacaaaattcatcaaagtattaatacatcacagtatgtcaaaatcagtgctagatttttactatttcctaagccgtttatgaaagacatggtggttgaaaactccattatatagaaagagaatataaaatgatagcatctccatatctgaaaagatctacaagcaatttagtctagtcatgttctcacctgctctctggaattcctggagaacttgttcagtacctctttatgctgatacatatttctacattgtgtcatcttcatttgtatacacatctcatttcccacatctggcttatagttcattttttaaaaattctactgctaattgcttttacgtggaaatatcatcaaactatgatgactggattgtttcagtatcttaatttatagcttcttttctttcaaacaggagcaaaatttattggaactttcttcataccagacacctacaatccagatgatgataaaatatatttcttctttcgtgaatcatctcaagaaggcagtacctccgataaaaccatcctttctcgagttggaagagtttgtaaggcaagatatatttatatattttacttaaaacatatatatatatatatatatatatatatatatatatatatgtatatgaaaaaactttggcaaggtttaagccaaagttaatgctcattattcataaatggtatgattcatactaccctag

SEQ ID NO: 38613 - DNA, 2300 bp, Homo sapien
gttatatattaaaattagcataattgaagtttttaaaactaaaattttcataaagggctgctgatggtgtaggttttggtcagaaagacattcctgttgtctctcaaattttatttaatttaggtgaaacgttcaggaaatgtcaattaaatgtaaataaaatatgcaatatttgttatatttaatacaacatgattgaaagagaatctaaaccaacttatatgcatatgtagtaaccttctaaaagaagaattaaatgttgacagattatatacaaagaataatttagtattccttataggtatctttgaatgtaatgaaatgtaatgattgatgaaacaacttattaagcactcatgtttaacatttcatgaagaaatgcagcataaaatttgaagtctatccttaaatgtttatcatgtataaacataatacacatcaaaatttgattttattttacttcccaagacttgacttaactactgagatttaaggtaactgaaatcttgatattcaaagtctgggagacattttaatacactgaagagctgatctcacttaagaaaaattcaacccttattaggccttctcttaaaactaaacaatataggcataaaatatttattttgaatgttaactaattacaaaattacttaaagtctaatgctttttttattatgatcaaagctatcaccaataaatctatcatcaaataaattattggtcctgtggcctatttcctagtaacagcagtaagttaattaacatggaagagaagttgaagactctggcaggagctgaagatcactagattctaccataatgcaaagcactggaagacttaggtgtgaagaaagcagactctagctaaagtcctgatgatgtgttgatttgatccatctcttacttgccgtgtacccctggaagaactatttaactctgtacctcaattttgtttcatcggtgaagtgagataaataattacccacccttaatggctgtttttaaattaaatcatttaatctatgtaaagcacttttaaaaaagtattgggaacatataaatgctcgataatatgatttgtaatttttgttaccaggcttagtttggaatacgtgttttgattgactctacatcttacagaaaacaaccaagttagcctattttatggcaacccagttaattaccacctcctccctcttataaacccttatattttggaatttgtttttctattcattacttccctgtgtggaataatacaggtttcaggtaacattgcattgttccaggcctaacacctatactggggccctgacctaattaaagttagtttctcacatttaagtgtaatttttagatgtctctaaactcagaaacaagagaacttgtctcaaaatgacagcttttgtctgttttagttggtggatcttttcatttggggatgatatggggcacgtataggcttctaccagtgaaagtggtctcgtctgatcaaataattcaagtttcgacaaaagttggttcttcagatatttgcttaaacaaaacacaaaaacaactttagtcaaggaaaaaatgttaaataacaaaatagtttaaattcttgtggtgcatttatttctacatctgagcaaagccagtccttaattttattccccagttctgattcatttctataagagtaaaacaagagcgatgggaaaattatttttaaaaatctatatacattcagaacattataatttagtaagttgaggaaagtctaccaattgttatcttaatagttttttttttttgtactttaagttctgggatacatgtgcaaaacgtgcaggtttcttacataggtgtacacgtgccatggtggtttgctgcacccatcaacctgtcatctacattaggtatttctcctaatgctctccctcccccagcccccagcccccaacaggccctggtatgctatgttcccctccctgtgtccatgtgttctcattgttcaactcccacttaagagtgagatgatatggtatttggttttctcttcctgtgtcagtttgctgataccttaatagtttttttttttttactcttttttagattaaattaacaccatttgaaagagaacattgttttcatcatgaatgctaataaagatgaaagacttaaagccagaagccaagattttcacctttttcctgctttgatgatgctaagcatgaccatgttgtttcttccagtcactggcactttgaagcaaaatattccaagactcaagctaacctacaaaggtaaatata

SEQ ID NO: 38614 - DNA, 2300 bp, Homo sapien
tatctctggcaatattaaatgttttataatttgcattctgttgaagagctaaccctcattagaaataaatatataactaaaataaaacatgaatatatgtatgtatgacatctctaaaaggtaaataagctgttttatagtacctaaatgtataagtgaatcatttgcaaaatgtctttaattaacaccacctattgggcctgttccctgatttgtctactatttaagatttgtgtacttttgcatgttacacccctgttggaaatacattaagtttcagtatgactaaatgttataaggggtttaatatgtacctgtggaaaacaaaataactaatgaacccatcagggagattaaaactaagatgatagcctcataaacactaaactctaatggataagtaactagcatccaagagatgtagtgcacagtaagacatctatttagttatatatttttatctcttagcaatatatatatttaacttacaagagaaaatacaaaatttttattctggtagagtgtttaggggtaacgtatatggatatcattgtcctgctttgaaaaactttttttaagtcagatggactggcaggaatgcatagtgtgataataaagcaaatgtcaaaaaaaaaagtgtagaatctaggtgtgggtgtacagatgctttctgtatacttcaacttttctgcatgtgtgaattttttataataagatgtttgaaaaaactttgcaatgcaagatgattacattatttttaaagcaatcaatttgaaaaactgtggagatgacagtaataacatgacacaattctttatatatagaaagacaagttatgctttatctttaaatgaatacctttaaaaataatgacatctgagcttagctaaattcttttcagacttatgcatattttttgtaaaaaggttttactcttttctctttagattatgtgttcaaacctaattatcttttatggttgtctattatttagggccaacctagacttatcaccttgtgttgtattttagtcaatgcacttactcagttttatggttctctctggtacgtttacaaagtgcactttatactgcacttctagtttcctataaacaaggagacaatctgttctactgtatttcaaatcactgccatcctgaccattacttcatttgcaataaaagtcacaaactgtgcaagtgcatttcatacatgttcatttccaaggtgttaataagtaaatgtctggtcagccttggtacagagaaagagaaagtaacagacatcccccaacccccgccccacaacatggtaggatttgcatgaggcttgatgggataccaagagtatgattcgctgcccatttccctgaggctcccttccatgggaacatccatgtttgttccatctttctaaaaaataaaataagatttctattgaaaggtaaatgttgtcaaccactaagagttattaataactgagctttgacaaatgtatgtcctagccagccctgagaaaactgggcttggggagagtttggaacttgggaattctctgtagtgtctgaacattccttagtttagcaggcacaggaaatatgatggcttggaggttaggcaagcagaagcaagcagtaaggcactgtaagcagtaaggagcagataagggtttctgtaatggttgattttatgtgtccacttgactgggccatggggtgcccagacatttgggcaaatattctggatttgtctgagatggcatttttggataagatcaacatgtgaattggtagactgagtaaagcagattgccgtctgtcatgttggtgggtctcatccaatcagttgaagacctaatagaacaaaaagcttgacattcccacaagtgggagggaatttcctcttgcctggctgtcttgagctgggatatttatttttctgcctttggacttgaactgaaacatctgactttcctggtcctggaacctgaaggtgtttggactggaactacagtattatctctcctgtttttcaggtctttacacttggactagaactgtaacatctgctgtcctggttgccaggcttttgaacatacactgttggttctcctggatcttcaccttaccaactgcagatcttgggactcatcagcctcaataattatgtgagccaatctcttaaataaacctcaatagatagatagatagatagatagatagatagatagatagatagatgcatttctcctacttgttctgtttctctgaataattctaatgcactgtccttgggctgatg

SEQ ID NO: 38615 - DNA, 2300 bp, Homo sapien
tgaaatttagataaactaataaaaatatgagctacaaggagtgatctagatgcccaaatacatgtgtttcacttgaaaaatatttgagaaacttgatacatcagatgtaattaagaaaaggaactaggattgtttagaaatggagcccagctagaatacttggggagggtgtgaagagagggataatgtaatctcttaattgacatgttacttagtcagaggtttttatttagacctatcccttgaggcttttaaaagtaactcgaaaacacacacacacacacacacacacacacacacacacacacacaccaacaaataaacattaaaagccaatctatattcccgatcaatgacgaatttaaacagtgaagactaattgctttcaattaaatatgctcaacaattaaaataccatcagttaactattatataaaccagggatttttaatagtaactaatatttatatgcttcttacatggatttactaatcctcaaaataattctgaggtatgagcaattgttattcccattttacagatgatgaaactgacatataggcaggttaagaaacttgcccaagttcacgcagctaggaagtgatgaaaattcaggattcacattgaggaattcctttgtgtgtatggcgtaacgtgggagaggaaagaagtgtctcatcaggcaatatctgataacagactgataatttgcctcagcatttcagcctctactcaccacaagccttagttaacagctagatacagactatggagtgcagtttatcagcactttccgttgtgcaaacatcagctacttttgtgtgtgtgagacaaaaacatcagctctcttctacttctctcaatcccagctaattctgataaggtcttggaagcgcaaaatgatgtcttctggaacgttctgaaagagaccaaaatctacccacacagcttcatgaggatctgaagccttgcagtgtataaatctttatctttctcatgttcatgtcattgccccttgatatacagttgtctattgggcagacattgttaaaagtaaataaattcttaaaattaaaattaaattcctataaagatctttttttggtgaacaattcatgctggaaaatactaatgaaacacaaaggaagaggaattttgcttgtacgtggtcaatgctattgcattccagaaagaatacgttgaaagggggacttctaaaattttagcatttcactatataataacactttattttttaatatattcaaatttctggatctagtggagttcacaatgaaatatatatatatatatatatatatatatatatatgcacatgtgtcttttaaatattgctgtccctctaaaagaatcagtaggtaaaattatttctgtagtttaaaagttctggctaggttacaaaagacagcaattgttaaacaacttaacattaaatattaaagactaaatgtagcatttaaagcattaagtttaattgtgtctggcttcatataattcagtccttggttaatacaaagttagtatattagagtacaaaaattaatgaagtttcaatttggaaattaaacagtatgtgtttctagacatagaaagatgcctggaattttacctttaggattttatctgtagctggcagcctattaaagctgtttccgcgtgcctttttctcttttgtgcctacgtcaccgatttaaggttcctatttatttatttatttttaagaagaaagaagaggttctgtaggaaacattgactgtatccgacaaccatagcaggactagagaaggaccaatgagggggtgctgggggtagctttaagaggcgaggtggtagcagaaaaggataagaagaaagataattcagcagtcccctataatcttattccacccaagaaatttgggagaatgcgaaaaagcagcagcccagcattcccggatgggcgtggcttttctccaggggctgtccaattgaattccttcagagggagaagattgataagggttgctaggaaacaggagcgtctgcctcccgcctgacccagagattgttctgcacaaaccctctccaggggctcgcagtgtgcagttgagtcgcgagtacggctgagctgcgtaccggcctccctggctctcacactccctctctgctcccgctctcctaatctcctctggcatgcggtcagccccctgcccagggaccacaggagagttcttgtaaggactgttagtccctgcttacctgaaagccaagcgctctagcagagctttaaagttggagcc

SEQ ID NO: 38616 - DNA, 2300 bp, Homo sapien
aaacatcagctacttttgtgtgtgtgagacaaaaacatcagctctcttctacttctctcaatcccagctaattctgataaggtcttggaagcgcaaaatgatgtcttctggaacgttctgaaagagaccaaaatctacccacacagcttcatgaggatctgaagccttgcagtgtataaatctttatctttctcatgttcatgtcattgccccttgatatacagttgtctattgggcagacattgttaaaagtaaataaattcttaaaattaaaattaaattcctataaagatctttttttggtgaacaattcatgctggaaaatactaatgaaacacaaaggaagaggaattttgcttgtacgtggtcaatgctattgcattccagaaagaatacgttgaaagggggacttctaaaattttagcatttcactatataataacactttattttttaatatattcaaatttctggatctagtggagttcacaatgaaatatatatatatatatatatatatatatatatatgcacatgtgtcttttaaatattgctgtccctctaaaagaatcagtaggtaaaattatttctgtagtttaaaagttctggctaggttacaaaagacagcaattgttaaacaacttaacattaaatattaaagactaaatgtagcatttaaagcattaagtttaattgtgtctggcttcatataattcagtccttggttaatacaaagttagtatattagagtacaaaaattaatgaagtttcaatttggaaattaaacagtatgtgtttctagacatagaaagatgcctggaattttacctttaggattttatctgtagctggcagcctattaaagctgtttccgcgtgcctttttctcttttgtgcctacgtcaccgatttaaggttcctatttatttatttatttttaagaagaaagaagaggttctgtaggaaacattgactgtatccgacaaccatagcaggactagagaaggaccaatgagggggtgctgggggtagctttaagaggcgaggtggtagcagaaaaggataagaagaaagataattcagcagtcccctataatcttattccacccaagaaatttgggagaatgcgaaaaagcagcagcccagcattcccggatgggcgtggcttttctccaggggctgtccaattgaattccttcagagggagaagattgataagggttgctaggaaacaggagcgtctgcctcccgcctgacccagagattgttctgcacaaaccctctccaggggctcgcagtgtgcagttgagtcgcgagtacggctgagctgcgtaccggcctccctggctctcacactccctctctgctcccgctctcctaatctcctctggcatgcggtcagccccctgcccagggaccacaggagagttcttgtaaggactgttagtccctgcttacctgaaagccaagcgctctagcagagctttaaagttggagccgccaccctccctaccgccccatgccccttcaccccactccgaaattcaccgacctttgcatgcactgcctaaggatttcagagtgaggcaaagcagtcggcaaatctaccctggcttttcgtataaaaatcctctcgtctaggtaccctggctcactgaagactctgcagatatacccttataagagggagggtgggggagggaaaagaacgagagagggaggaaagaatgaaaaggagaggatgccaggaggtccgtgcttctgccaagagtcccaattagatgcgacggcttcagcctggtcaaggtgaaggaaagttgcttccgcgcctaggaagtgggtttgcctgataagagaaggaggaggggactcggctgggaagagctcccctcccctccgcggaagaccactgggtcccctctttccccaacctcctccctctcttctactccacccctccgttttcccactccccactgactcggatgcctggatgttctgccaccgggcagtggtccagcgtgcagccgggagggggcaggggcagggggcactgtgacaggaagctgcgcgcacaagttggccatttcgagggcaaaataagttctcccttggatttggaaaggacaaagccagtaagctacctcttttgtgtcggatgaggaggaccaaccatgagccagagcccgggtgcaggctcaccgccgccgctgccaccgcggtcagctccagttcctgccaggagttgtcggtgcgaggtaagggtcccagaggaggacgtgtccctctggagggcgccca

SEQ ID NO: 38617 - DNA, 2300 bp, Homo sapien
aaaaaaatgtatattctgttgacttggggtggagagttctgtagatgtctattaggtccacttggtgcagagctgagttcaattcctgggtatccttgttgactttctgtctcattgatctgtctaatgttgacagtggggtgttaaagtctcccattattaatgtgtgggagtctaagtctctttgtaggtcactcaggacttgctttatgaatcttggtgctcctgtattgggtgcatatatatttaggatagttagctcttcttgttgaattgatccctttaccattatgtaatggccttctttgtctcttttgatctttgttggtttaaagtctgttttatcagagactaggattgcaacccctgccatttttgtcttccatttgcttggtagatcttcctccatccttttattttgagcctatgtgtgtctctgcacgtgagatgggtttcctgaatacagcacactgatgggtcttgactctttatccagtttgccagtctgtgtcttttaattagagcatttagtccatttacgtttaaagttaatattgttatgtgtgaatttgatcctgtcatgatgatgttagctggttattttgctcgttagttgatgcagtttcttcctagtctcgatggtctttacattttggcatgattttgcagcggctggtaccagttgttccttttcatatttagtgcttccttcaggagctcttttagggcaggcctggtggttacaaaatctctcagcatttgcttgtctgtaaagtattttatttctccttcgcttatgaagtagtttggctggatatgaaattctgggttgaaaattcttttctttaagaatgttgaatattggcccccactctcttctggctcgtagggtttatgccgagagatccgctgttagtctgatgggcttccctttaagggtaaccagacctttctctctggctgcccttaacattttttccttcatttcaactttggtgaatctgacaattatgtgtcttggagttgctcttctcgaggagtatctttgtggcgttctctgtatttcctgaatctgaacgttggcctgccttgctagattggggaagttctcctggataacatcctgcaacgtgttttccaacttggttccattctgcccatccctttcaggtacaccaatcagacatagatttggtcttttcacataatcccatatttcttggaggctttgctcatttctttttattcttttttctctaaacttcccttctcccttcatttcattcatttcatcttccatcgctgataccctttcttccagttgatcgcatcggctcctgaggcttctccattcttcacgtagttcttgagccttggttttcagctccatcagctcctttaagcacttctctgtattggttattctagttatacattcttctaaatttttttcaaagttttcaacttctttgcctttggtttgaatgtcctcccgtagctcagagtaatttgattgtctgaagccttcttctctcaactcgtcaaagtcattctccatccagctttgttccgttgctggtgaggaactgcgttcctttggaggaggagaggcgctctgctttttagagtttccagctgttctgttctgttttttcccctctttgtggttttatctacttttggtctttgatgatggtgatgtacagatgggtttttggtgtggatgtcctttctgtttgttagttttccttctaacagacaggaccctcagctgcaggtctgttggaataccctgcagtgtgaggtgtcagtgtgcccctgctggggggtgcctcccagttaggttgctcgggggtcagggacccacttgaggaggcagtctgcccattctcagatctccagctgcgtgctgggagaaccactgctctcttcaaagctgtcagacagggacatttaagtctgcagaggttactgctgtctttttgtttgtctgtgccctgcccccagaggtggagcctgcagaggcaggcaggcctccttgagctgtggtgggctccacccagttcgagctttccggctgctttgtttacctaagcaagcctgggcaatggcgggcgcctctcccccagcctcgctgccgccttgcagtttgatctcagactgctgtgctagcaatcagcgagactccgtgggcgtaggaccctccgagccaggtgcgggatataatcttgtggtgcgccgtgttttaagcccgtcggaaaagcgcagtattcgagtgggagtgacccgattttccaggt

SEQ ID NO: 38618 - DNA, 2300 bp, Homo sapien
aaatactttatattaatatatcaacctgtcataaaaggcaatttcatcatcaatcactgatgaggttcacaaaagtgttatagacacctggagtccaacaaagtcaattttaactagcaaatgcagtaaataccatagctaagctataaatactttaataattattgtttaggatagaaatacttctaatgatttttctacaaaacatttaattcctaaataggtaaatccttggataatatttaaaacctcatccattccctaggtacacattgactaaataatgaggtacggataacatagaagtataactgcagaaaattgctctaggaatcaagttgtgttatggatagtctttacattgattattcaagctaaagggatagagacgttattatatttttttaaattatgcattaagctaatattaaaatacatttgtcatccccaaataaataccaattgacttgggaaaaggtagttataaaagaaactcaaccagaaagggagaatttagttatgaggatgcacttgactttttgcggggagttagcagcgtgcaggctgacctaaaatttagcagaggagaatggatagcccgactataatttatatatcactattttgtgccttagcaaaaataatcctatatggttatgtcttatgaaaaatatggctcattaggaaccaccttatcaatgttaatgtcaacaattttgcatatgtaattattattttattagaactgctctttgagtagttgtattgctttcctggctttaaggtttattagttaccatttttaatgcttaatacacgtcagattccatgcaaactacgctgtctacaatattctggaaggtacatcttattactcctaaagtaaacaaagctaaaagaggtgaagtgccatatccactactaagaaatggagccaagattcacactcaggtctgactgcctgagtccataccacgatactattctgcctcatagttttgcttacataaacattattatgtacttattaaaaaatggaatgatacacggcttaactccaacagaatgcagagtgccacaaattagtaataaagttatcaacacaagaaaatgctgcttctgagatttatttttgaaaattagtcaaacatgtcgatcctccagtaaagcaaagcatttgtaaactggttgtaatcatttgttttcgttatgaaagtactgccaaagtgtattttgtgaactgcaaccgggtagttcagaacacaggctttggagctgaggcttcaattctaattccaccgccaacttgggagcccttggacacattccttcacttctctttggttcctgtgtaaaatgggattcatttgtaataattgtagcgatgcacttagaacttatgaacattaaatgagtttaatatacgtaaaacatttacctgtcacatacgcactcaaagaatgctggctcacattacagaacccaaaggcttatttatccttttcgtttataagggtattaaaacgcgttttctatttaggatgggtttatacggctgcaacccaaggagcatctgtacttttaagaggaactgggcacagcaaaacagcatcttcctagtctaacagtgagactacattcacagaggacacatttcatcaagaacgacttaacacgcccagatatctcatattatgcccctgcggtaaggcaaatcaagtatgaagacacacactccctgttttcttcagcactgagatcactggttccctccgttccacaccgcggctccctcggctcggagccacagggaactatgaaaatcggcacgcgaggcctaagtgtccccagaaccagaggaaccacagttgcgtcatagcagaaggacctcttttacagcatcagcagtgggatagtcagtgccgagttttcctggcaggacagccgacaaccaccgccacagaccagtacaaacattccaacccaggaccttttttcgcgcgccgacacagccggaagtgacgcgtacagccagcacgctgggccgccagcgggacagacgagcgggaggggcagcgtgcggggagctgggggcggggcgcggccgcagctccgtttccggtggctcgtcgcgctcgctcactccagctgcagccactctcgcccgtggctgcttcctccatcctggtattttttggagcttccatcctggttcttccaaagtgcccggacccaaaacaggaagtaagtgcgatggaaccttcaggttccaaccgccgccagggccgctccgcccagtg

SEQ ID NO: 38619 - DNA, 2300 bp, Homo sapien
tctacaaaacatttaattcctaaataggtaaatccttggataatatttaaaacctcatccattccctaggtacacattgactaaataatgaggtacggataacatagaagtataactgcagaaaattgctctaggaatcaagttgtgttatggatagtctttacattgattattcaagctaaagggatagagacgttattatatttttttaaattatgcattaagctaatattaaaatacatttgtcatccccaaataaataccaattgacttgggaaaaggtagttataaaagaaactcaaccagaaagggagaatttagttatgaggatgcacttgactttttgcggggagttagcagcgtgcaggctgacctaaaatttagcagaggagaatggatagcccgactataatttatatatcactattttgtgccttagcaaaaataatcctatatggttatgtcttatgaaaaatatggctcattaggaaccaccttatcaatgttaatgtcaacaattttgcatatgtaattattattttattagaactgctctttgagtagttgtattgctttcctggctttaaggtttattagttaccatttttaatgcttaatacacgtcagattccatgcaaactacgctgtctacaatattctggaaggtacatcttattactcctaaagtaaacaaagctaaaagaggtgaagtgccatatccactactaagaaatggagccaagattcacactcaggtctgactgcctgagtccataccacgatactattctgcctcatagttttgcttacataaacattattatgtacttattaaaaaatggaatgatacacggcttaactccaacagaatgcagagtgccacaaattagtaataaagttatcaacacaagaaaatgctgcttctgagatttatttttgaaaattagtcaaacatgtcgatcctccagtaaagcaaagcatttgtaaactggttgtaatcatttgttttcgttatgaaagtactgccaaagtgtattttgtgaactgcaaccgggtagttcagaacacaggctttggagctgaggcttcaattctaattccaccgccaacttgggagcccttggacacattccttcacttctctttggttcctgtgtaaaatgggattcatttgtaataattgtagcgatgcacttagaacttatgaacattaaatgagtttaatatacgtaaaacatttacctgtcacatacgcactcaaagaatgctggctcacattacagaacccaaaggcttatttatccttttcgtttataagggtattaaaacgcgttttctatttaggatgggtttatacggctgcaacccaaggagcatctgtacttttaagaggaactgggcacagcaaaacagcatcttcctagtctaacagtgagactacattcacagaggacacatttcatcaagaacgacttaacacgcccagatatctcatattatgcccctgcggtaaggcaaatcaagtatgaagacacacactccctgttttcttcagcactgagatcactggttccctccgttccacaccgcggctccctcggctcggagccacagggaactatgaaaatcggcacgcgaggcctaagtgtccccagaaccagaggaaccacagttgcgtcatagcagaaggacctcttttacagcatcagcagtgggatagtcagtgccgagttttcctggcaggacagccgacaaccaccgccacagaccagtacaaacattccaacccaggaccttttttcgcgcgccgacacagccggaagtgacgcgtacagccagcacgctgggccgccagcgggacagacgagcgggaggggcagcgtgcggggagctgggggcggggcgcggccgcagctccgtttccggtggctcgtcgcgctcgctcactccagctgcagccactctcgcccgtggctgcttcctccatcctggtattttttggagcttccatcctggttcttccaaagtgcccggacccaaaacaggaagtaagtgcgatggaaccttcaggttccaaccgccgccagggccgctccgcccagtggagcctgtccggcccccttgctgcccgctagctcccgccggctggcgcaagctgtcggcgccggggcactgcgggcggggtcggagcctggccttcctgacgttgcagctgccgtccccgcacgttccggccagggcctccctcttagggccgggcggtgcccgtggctcaggctgcagagtagggaagcgagcgg

SEQ ID NO: 38620 - DNA, 2300 bp, Homo sapien
aagaaaaaaaattagcttgtttggtggcatacagaagcacctagtatcgagagttaaaatgagataaaaatcaccacaatcatgaaatgtatttttcacacctgtaacataatggttttttccagatacaatcaggctggtttttgtgctttctgtatggaagaaaaaaattattctcacaccaaattggattctctcagcatgacaatttttgtaacgttaaggaatgtagctttaaccttttttctctaaatcttaacagaatttctaaatcctaaccaaatacatgaaatcctgtctctaagtacaccataagagcaaaaagataagattttggtgtatcgccatagtcattctttaaatgttaaagtgatggcaaattattcaagttattaaaagacagtaatcctcagaaagctatttgaaatataatttcaaaaccagcttaaagaaatttgaagtaatgaaaaaacatgaaaacccttaactgaaaaaaacagattttgcaatactttcaacatagtggaagaatattttcgtatttggagcttaaaagctacaaatggttttctcccacgaattaaaaatacaggtataatttaaaattttccaaatggcgtcactttaagcttaagacatgtcatattaaaaaataattccacagaatatgcattttgtaggacgtcccaacatgcagcctcgactgtcagaaaggaggcacacataatcaaatccatgtacattaaaaagaggtacacaaagatgaatgagttgcgaaaaaagcaactacacaaattcaatgagagaaagggaggagtcctgactcatactgtatactattatccttttccttatctacaccgagtattttatataaagacatatgctctatcattcaattgcacaaaagggcacttggccacttctactctcaaatctgctctggagattgtggtaaaacattctacatacctccctgaagaaattctcaaagcgaagtacattttagagaacaaagtggacttaacaattttaagaactttctcggaactcggcacaatagggtaattacaactttacagccgcattttccgtgctccaccaggactgtccccgcgccccagcccacatcccttctttaaagagagtcagactgagagagacggttcggccagctatcccgattctctatgtctgggccgtgaatcgccgagcaaggctgaacccccgcaaaattacagaagaatctaaagcgcaaacgagggaaaagaacaaaaaagcaaagggggggaagttgggtcgagacccacccccactctctcgaccccacccaagcctacctctcctacgctggaccataaaacaaaaccgaaaacgtaacaaaaataaaaactaaaaatagaacaccacgagaaaacaagtagggcttccttactgtctccactccttctggcccagttctctactcaacctcccggcccaccccaccccccaggggtcccggcgccatttagctcctccgaagccgccgccattttccgcccccgccggatcgccgctgtgcctcggcagccgctcgcttccctactctgcagcctgagccacgggcaccgcccggccctaagagggaggccctggccggaacgtgcggggacggcagctgcaacgtcaggaaggccaggctccgaccccgcccgcagtgccccggcgccgacagcttgcgccagccggcgggagctagcgggcagcaagggggccggacaggctccactgggcggagcggccctggcggcggttggaacctgaaggttccatcgcacttacttcctgttttgggtccgggcactttggaagaaccaggatggaagctccaaaaaataccaggatggaggaagcagccacgggcgagagtggctgcagctggagtgagcgagcgcgacgagccaccggaaacggagctgcggccgcgccccgcccccagctccccgcacgctgcccctcccgctcgtctgtcccgctggcggcccagcgtgctggctgtacgcgtcacttccggctgtgtcggcgcgcgaaaaaaggtcctgggttggaatgtttgtactggtctgtggcggtggttgtcggctgtcctgccaggaaaactcggcactgactatcccactgctgatgctgtaaaagaggtccttctgctatgacgcaactgtggttcctctggttctggggacacttaggcctcgcgtgccgattttcatagttccctgtggctccgagccgagggagccgcggtgtggaacggaggg

SEQ ID NO: 38621 - DNA, 2300 bp, Homo sapien
tcttagttaatacctcttaggttttctcctgcatctctctagctggtccttctcattctcctttgtttgacttcccaaatttagtggagtgctctagaactgtaatctaggctgtcttctctaacctctttaagaaatctttaaaaacaatgtgtatgccagtaagatttataggtctaatcctggcctgttgaactctagttttatatatttaactctcagtttgacatcttcatttagataccttatatcttatattattagtattaatactaatattaataaaaataacctaccttttgaatcttgaactgtgtgtgttacccattaaaagtgaaactaggtcagtttcttaaatattaataaatgtactgaccacatagctcagactataggggaaaaaaggtgagtcaagaacatatttaggatgacgggaccaggcacattggctcacgcctgtaatcccaacactttgggaggccgaggcaagtggatcacctgaggtcaggagttcgagaccagcctggtcaacatggtgaaaccccatctctactaaaaaaataccaaaaaattagctgggcatggtggcacacgcctgtagtcccagctactcaggaggctgaggcaggagaatcacttgaacctgggaggcggaggttgcagtgagccaagatcgtgccactgcactacagcctgggcaacagagtgagactccatctcaaaaaccacaaaagatgacagcataaaaacaaaaaaggtgactgtatccccagtacctgcatatagtagaggtaatatatttggatatatttgttgattgaacaaataagcttgataatttacaaagtagcatagaatcattcactaatctctaacatgagttgcagaactttaaaaaaggagccaggattcctgttctttttctcaacgttgtggattaactggggtcctgaaatgatatcattaaaatgttaaacctgtgaccattttgcacctataaaataagcattgtactttttgctttgaagtttttaaaaaataactattggcaagattaccaagagtacagtttgcatctcaatggttgggatataaatttgtgcaattttttgggaaaatatattgcagtatgattgaaaagttcgaaattttgtcatatcctttgatttaacaatttttatttactaatattcaaggaaatagtgtaaaaatatgtttttcagtatgggttaaggaaattaaaaattgggaacaacataaatgtccagtaacggataactgttaaataatgtcatgctttttattgcagcataagttttattttttgcttttctattttttgagacaggttctcgctctcacccagactgcggccttgatctcctgggctgcagccatcctcccacctcagcctccagagtagctgagattataggcatacaccaccacacctggctaattttttattttttttctggagactagatctcactatctcaggctggtctcaaactcctgaggttaagtgatcctcctcccaaagtgctgggattataagggtgagccaccacgcctggtgcagtgttaagttttaagtaataacttttgttagatgcctaccttggtttccttcacacttttcaatctgagcagattctaaaaagcaggatataaaattgcacaatacactataatcacagacacacatacaccgggagatgagattagaaggaactacaaagagtatgaaaaatcgttgggaagtttatggatgattttaaccttcttttttttacttttttacatttctttctcccatcttttgtagtaggtattacaaaaaagccagcctttaaaaaattaatggattcagaatgataacaacatgaaatctaatagcttaatggttctccagcaggatctgtacctttttcactgaaaatgcaaagaggatctaattagaatgccgcaaaaattagaattttaatccctaatttttgctgaaacgtccccttgaacctcaaatcatgtgcttttttttttttttaaggtctttggttggcttttgaggataaagatgagaagcttattgaaagaaacctttaaaaaccatttcatatttcataaagtttcacattgctttcaagagcttgtaatttgtcttttctggcctaattgtttaaggttttgtttttgttttttccacagattcctagatagggttgttcatctgtcatcttaaaagggttttctggatgaatagggtactatataatttttaatgctttaagataaaacat

SEQ ID NO: 38622 - DNA, 2300 bp, Homo sapien
gcatttatgggaaggcatcattaagattcttcaaatgcaatgattatatactgttactgacatatttttaatttctctttggaaattttaggtggcagtagtatggcttattagatactgccgagctaatgttggagctctttctctagctcttcagcagcctgctaatgaaagtacatttgaaagctgaagaggattaaattatgtttttgtgacagtggaaaaagagaaaaaattttaaatggagcataaatgacttgttagcaattcataaactttccatgcattacaaatggttacaaagtgagcagcgtttcataattattaaatggacatttttaaaaagaacattacataggctgtattgagtacttgcctactgtaataaagagcaagagtatgtcagatgtccatacctgggtaaaggaaatgaagataatcttaatttgttcagtgctttgagggaattttctgtagattttctttttagctctagtttacaatgtcacccataagtttttttggagtagttatgatttgagagtgccaaaatctaagtttgaaataaaggaactgttagacagcataggagcaaatgtatgttttaaatgttgattctttttctagagaaaattatacaatccttacctttattataactaaaaaatatttactgtttaaaaaaaaataaaaatagaagcatttattttcaactttttttttttttttttttttgagacagagtctgtgttgcgcaggctggagtacagtggcatgatcttggctcactgcaacctctgcctcgtgagttcaagctattctcctgcctcagccactctagtagctgggattacaggcgcctgccaccagctaatttttctgtttttggtagagatggggttttgccatgttggccaggctggtctcgaactccttgcctcaagtgatccgcctgccttggcctcccaaagtgctgggattataggcgtgagccgcaccctgcctattctcaacttttattaatccactttaaaatgggttactttaaaagtattatatgctaagtgacttaacattcagctccctaaatgaaattctgatttttattgaggtttttagcattcattgttttaattgattttttaaaaatttctctgaatttctagatatacacctgaagaaattgagaagctcaaggagtaagttttaaagtttttttcattaattctaattttttatgtcttacgtccttaaaagttttactttgaaaatttcaagaggtttttggcagactggtataattgaattgtgctattaagcatgattggccttaaaaagatcacatcaaatccattacttgcacaaaataaccattctcataatgtataatctggtctcctgatgccattcaccagatgcttcctcagaccactaataggggttccagaaaagattaaggggccatttttggtagcctgaagactaaatttggggaatttatataccaggatgaaaaccagggttgtgctacatggcttggtttagaatggtgacttggcaaatgtttcagtgaatatctgggctgactcaaccttgcaaaggctattgaatctcaggaagtagaattttgctttattgagttagaccttaaagtatggtttaatgaattgtatggatcatgaaaaaatttgaaggtagattctgtttataatgataaagacctgtgaaactttagatgtctaaagaagagtttgttgggtatatgctcaaaagggaaagtctggggcttgcctgggagattgtgtcagtaacctgaggggaaattggtcttttttgaacacatatccaagttacttatttcttctctgacccaggaaaaaggcaattgctgcctgtttttttttcacccacagacaactgtggaccccaaaaaaaggccacactttcaaactttggctctcaaagtattgctgcccacaacttccaaaccagtcaaatgggaagaagaagaatgaagaataaatgatgaaattaaaagggagaaaacaattgaaccaaatgctgattggcagactcttgttttaggctccggataaagcatggcaatgactgggcaacaataggggcggcgctaggaagaagtgcatcttctgtcaaagatcggtgccgactgatgaaggatacttgcaacacaggtactgtgactactactggtagcgttttcttgtcaccacttaagcctcctgccccttaggatactgccttttctttgctcttggggagcgatttagatcattcac

SEQ ID NO: 38623 - DNA, 2300 bp, Homo sapien
tggtagaaacctagtttttactaaaataggttgagcccattggtgtaatttcccttgtccctcatcattcattcctataagtaatggcctcttgaacttacttttgcagagcagggaatcttaggtgacagtaagaaaaaaagcatgccatttcttgtctgtcagccattgacgaagctcttcccacttcactgtttataaaggacttagtgtaacttgagaatacattcttctttgtagttatgttttgggtggtttttcttttcataattggtcagtgctttccattaggattctttattttcttttctactgagacccttactgggctagtaaaatgaaactgtcttagtgggtatatatggttttccaccagagggtcattcagaaacaaactcttagtactattgcttacttcctatcagtccttgtaaatagagggctgaatcagatttgtaaaagaagttagcagtggtagtctggatgatttccttttttcagggaagtggacagaagaagaagaaaagagacttgcagaagtggttcatgagttgacaagcactgagccaggtgacatagtcacacagggtgtgtcttgggcagctgtggctgaacgagtcggtacccgctcagaaaagcaatgtcgttctaaatggctcaactacctgaattggaaacagagtgggggtactgaatggaccaaggaagatgaaatcaatctcatcctcaggtttgtgtcctgaatcttgtaatgacaaaagcaacttaatttctgtggatgtcttgatagactttcctcttttggttttcctggatgcctagtgtctgaaaagtatcctttccatagagcactactgtttaagatcttaagtatttcatattgagctctttttttgtgttgtgtttgttcctttttttttttagtgggtttagtgctcatgcaaagtaccagattgaaggcgtggagactgaagtcctctctatatccacagaacaggtatggcacaggcagcggcagtgtagcttttccactgtcccaccaatgtgcctcagtcctagcctagggggaacacgtttaggataagagggctgttcagtctccatgcccttcaatccttggctactgtgctaagattgccaagaagggggcccagtctgtagttacctccacacctccaaagtagaccaaatcaaacacatccatttcatacaaattcaaaaaagctttaagatatcataatcccagcttatttttttaagtagctggtttaaccattaagatttattaactaaaatgggcaaaaatactagcaagaaattatttaagaccctgaagtaatagagactgtcaccatggctactccctaccgaaaatcaaattgtcacaacaaagctagaaaacgaacagatttttttaaacctcaaattttgttgtactgttgtgttgttttttgattgcagctattgcttttgtgttattttgttttggatttttttttcaactagtcatctttataaatagctcatttctaaatatttttgcttaacaatggaaacgctcagatccaggaagtaaatgacttagtaaatgccacactatgaaacattgcatatatacaactaaatctgttcttattctaacctttagcatactccttttccttcacagtgcctcatctggctctaaccatttatagtttagcccattggttgtacctttaattaaaagtggttgctgttggtatttcttagctgttagctctgaaagcagatctgcactcctggaatcctttcccgtgtaacttaacaatagcatctcattggcataacctgccattccctttatttgccagtgcaattacctgtagtcagaggaggggttcttatagagaaattaatttaatgtctaacgatgcttattttgtaactgtaggatagcagaacttgatgtagctgatgaaaatgacattaactgggatctgttagctgagggatggagtagtgtccgttcaccacaatggctacgaagtaaatggtggaccatcaaaaggcaaattgcaaaccataaggatgtttcgttccctggtaatgtattacttactttttaagctcctccccttttcttaccatatttactccttaggagtgagaggttagaagttctttgccccagctagagatatcatagcagatttctacttacaccacttccctgtttctctcagtaattgtttccttccccagagaagagttaatactgtttgtaattcctaaagcccctaaaatgaaaatgtacacac

SEQ ID NO: 38624 - DNA, 2300 bp, Homo sapien
tcctccccttttcttaccatatttactccttaggagtgagaggttagaagttctttgccccagctagagatatcatagcagatttctacttacaccacttccctgtttctctcagtaattgtttccttccccagagaagagttaatactgtttgtaattcctaaagcccctaaaatgaaaatgtacacacttattcttgttcttctacgtaaactatcaggaggaaataaaatcatgccacataacgatttaatttttatgtttttagagacagggtctagcttggttgtccaggccgacatgcagtggtgtgatcatagctcactgtaaccttaaacctgtcggctcaagtgattctcccacctcagcctcctgaatagctcggactacaggcacacaccaccatgtccagctattttttttcgtagagatgaggtcttgccatgttacccaggttggtctccaactcctgggctcaagtgatcttcccagcttggcttcccaatgtgctgggattacctgcatgagccagcatagctggccactcataacctttcagtcaacaacagatgtcatacatagtattggtctcacaatattaaaatactgtatttttactttttttctatgtttagatacacaaatatttaccattgtgttacagttgcctacagtatttggtacagtaacatgctgtaagggtttgtagcctaggagcaatagactgtatagatcatctagcctacgtgtgtagtaggctgtaccatctaggtttgtgtaagtacactgtgatgatcccatgacagaatcacctaatggctcatttctcagaacatatccccatccttaagtgattgatgactatatttttattttgtacaaagatgtacttctgaaaacctaagtttaagtcaacttttgtgagttgtataatttcaaatatcttagctaggtgtgttagagaaattctgtgataattttgtagaacaaaggctctgtaattttctaattttattaattatataaatctagagatcttaagttgggtttgcttaaagtgaagcatactttttgttgcctgttttgcatttaggtattaaacttagttgtacagtctgtttaatttaggttactaaatttattccccttattatagcactcttaacttccattattccaaaggaaaatttaatgctgaggaactttgccttgatgaaaatgtggttttttaaaatacccaggtataggccaggtgtggtggcttatgcctataatcccagtactgtgggaggccaaggcaggaggatcacttgacgctaggagtttgagaccagcctgggcaacatagcaagaccccattactacagaaaaaataaaaaccaattagccaggcatggtgggcatgtgcttgtagtcccagctattggggagcaagagcctgaggcaggaggatggcttgagtccaggggttcgaggctgcagtgagctatgattatgccactccagcctgagcaacagagcaagaccttgtctaaaaataaaattaaattaaaaaatccagttagagaggataagcgtattttacgaatagagcaaagcaaagtctagaattggcttccctgcgcaagaataccatattactgtttggaaaagagaagttgctacctctagaccaacagtcaagggcccttcagccctggcggggaaaacatacactattcgtttaaaaaatgaaaataagctgtttagcattgccagtattcttcctaaataataatcctatcaagacaccctagaatagaaaatgtcctgtttccatgttctttgtaatgtctacctttttttaacactataaatcttagatggcaagaataacaatattaagaattaaaatttgttacgatgtttataaaaatctcaggatatgttgttttttaaaatatcttatttttataagctctcacatccagtatgcagttatttattccaaatactttccctccttacctccccccacctcccttgctgcttagatggtggtctgtcggagaatcaatgttctttttgtctacccatctcccttcagtcttaataaaaggtcttaaacagttacatgagaaccaaaaaaacaacccaacgcttttggagaataaatcaggatctggagttccaaacagtaataccaattccagtgtgcagcatgttcagataagagttgcccgcttggaagataatacagccatctcttctagccccatggcagcattgcagattccagtccagatcacccatgtttgtaa

SEQ ID NO: 38625 - DNA, 2300 bp, Homo sapien
ttaaagcctagtatttttggactaccagtccagacatccatagtgcttacccatatatacaagaaaactagtttttaccaagttcctgtctttttgcaggttggtcttagtgtgttcctctttacttcctaccgttagaaacatttaatcatgtataccaagggttagcaaaccttttctataaaggaacagatatagtaaatattttaggctttatgggccttctggtgtctgtcacaggtactcaactctgttgtagtgctaaagtaaccacagaaaatatataaaccagtaggtgtggctgtgttccaataaactttatttacaaaaactggcaatgggctggatttgtgggccatagttagcccacccctgcactatatgtcatgcaagacaaattcattagattccttatctctcttaagaaatgtaaatgacttcaggtctccaggcaaattattcaatattaaattgcctttatgataattgagtacactagagaaacttaaattaacaaaacatttattgtaaattattcttaccacagcttaccttattcttaccacagcttcagcagactctcctgctaccgttgactcagaaacaataacactaaacagtggaacactacagacatttgagattcttcccgtgagtaacgcttcatatatattggccatttttatgcatgagaaagatcagttgctatcacttttgtgtttcatttgcttatgattcataaaagtctgaggccaaatgaatggtagactaaatcagacttctacttttataattttaatcagcttttctctcatctgtatataaaccaaaatgttatctatatgaaaatgacagtgctaatgagtatatacatactgtggatttgtactgagttataatttataaccaaaaagttcatattggttatttgagaaagtctgtggacaaactaatcatgagcaatttaacaacattcattcagtaaacactgtactagccactggggatacaaaatgtaacagtcccagtgctaagtggtttagctgctttggaaatgtgttgtagctcctgaagaggttaagcacagttaccaaaggatccacctaagagaaatgaaaatatctgtccaataaaaacttgtacatgaatgttcatggcattaaacaaccaaaatgtctagcaacagaaaaatggataaaatgtgctattgccatgcaaatattactcagcaatgaaatactgaaacatggtacaacattgatgaaccttgaaaaataggctaagtgaaagaaaccagacaacacaaaatatcacatagtactgggctcccatttatttgaaatgtccaaaataggcaaatttgtagacgaaaagtagatcagtggtttcctgcagctgaagtgtaggttgaaagtggagcatgactgaatgccctttctaaaacaagtaaacctataattcatatttccttaagaaaataaaaattttattaaatcaagatttaatttaccatgaagaacacagagttattattagtgcaagactttattcatcctctccccagccaaatcccaagaggatggccacctttggaactttttactggcagcttacttaacctaagtcagtctcctaatctagtggtctttgaaatggggatgtataagacaaccatttgacacaggtagaaaacttttacttttttaagcccattcccctggtaaacaatatatgtacacacctacatatttgaggtatgtgttcaggtttttacttatggggtcacaatatttaggctttcccttaatttattaacaggataataatagtactccagcttcaaaaaattgtgaaaattaaatgttaagtatattaaataaaacacatataatatatacatgtacatataaagtatttaaaataaagcctcacatttgtgattaatatatgctacctttaggaaaatgatttaacctttatggaaaggaaaagaaattgagtcctcacagagttccaggcactttcataatcatttctaatcccaaacactttccatgagaagtagttactgtctccactttagcaataaggaaacctatatttggggatttagtacccaggagagttgtttcagctaagtacacaagactgaaaaacaggctacatgattttaactcccagacctattttagagtgcaaatacttttttagaatattaagataaacctaaatcaaattttttatatagaagcttatggtcgtgaaaagtttattggtcaattttattatacttcctttaa

SEQ ID NO: 38626 - DNA, 2300 bp, Homo sapien
ttattatgatcttcactttttacatatgaaggagatcaagagaggttagataacttgtctaagatcacatagcttgtcaatggtggcatcagggtttgaaggcagaaacgatcaacctcaaagcttgtgctcttagccaccgtatctcttttctctagattctaattatgcatctctgttttccactctagcttcaagactatgactatgcctgtgtcttcaccactatattaccatgtctggtagttgtctggtacatagcagattctcaaaagtattttgttgaatgtggctgaatgtgagtgaataaagttatttgtaccgccattcaatcttctaagataactgggtgcaggattgcgtagcattgctgttttatcagaaagtcctgagcaaacaaacatgatttgtaaaatatataacttgtaggtcagatatgcaccgtactaatcctgctcagtgttgcaaattccagatctatgtatctacatggtttgtagtccatcccgtgtcctaaactgttgagtggacgccgggaatcatggcttggattctaaatgttgtgtgggtacaacgttccaacccagatcctccctgcacacaaacgttttcagagctctcttcagtctcggcgctatagtgccctgagaatccagcgtggctgtatatttatccatgattcgaaatgcagagtgacgttgttacttttaacgacctgtccacctccagttgtctatgccctagagcctggaagacgagattggtatgcgaagcgctggctccacagctgcaaacttgcttagtcagcaccatcactggcggcatgagtggacaagtcaaataagtatctagcactgtcgcctcctgactttctataaacacataagatccctgtcacagaacaaatcaaggcaaacatgcgaacaaccctaaaccaaaattaccagtgactgccattctgtcctcgttaagcgaagactgaggtggttaaagcaggttgattgtttttaagatgctttcagccaggtgcaaggctatctgcagaaatgtgctttgcccacgtggatcgcatggacactaattactaagggctaaggagctgagaaacgtgcagccgcggagattggccgccccacggggaataagctggcacctctagaaataaagctccgcagccaatgcggcgccttggcccgcgggattggcggcctcggtcgtgacgcgacctgggcgggccgacttgcgacggaggcagcgggtccgggtcgggggacctgagaaggagccgggaggtgatccgcagcgctgcgacgggaccgcgcgattcctctcccacgcatctggcccgcgttcctgggcctcggcaccggatcccggcgggggtgtggacccagggcccactctccccggcgcggccagggccccccagcgtgcgagcgcctaggggatgccgaggtttggcgggcgcgggaccaatatgggcagggccgaggcgggattctccctctcgctgtgcctagaccgtactcctgctgcagttccggcagagagcgcggggagagcagcggcgggagctgcggcgagcacgccggccctggggtagatgcaacacatgagagggaatccaagttgcttgggtcggccccggcagcgacctgaacccgccgccctgcgggaggggtgtgcggagcgctgggctgtgctccggcaacttcactcctcccgccgccactggggaacgtagtgggggagacgcagaaggctaggcgaggggttctcaatgcgttcttccaagaaaactttttctcccttgaacatgaaggaatacgtgcttaccgtagaaaattgggaaaacatgggaaattattgtgtaaaaatggggggcgacgtgtgggagtctctcccggggcgaggggactgcgatttgctgtgctagccgggggcgagcggcgggcggcgctaccctggcggcccagaggggcggagagccacgcggcgccaagggctgagatttgaggaagtgggagctgcccgggcgggggcgtcccgctgagagtctgccacgcagtgtttgtttcctttcacttcctgcggcagctgctcaagatgaggaggtgcgcggggccggggcggagcagtcgcgttccccgcgtgtgagcccccacccatccctggcgccagcgcttccccgaccactcgggttcggctatgcgggagccgtgaggaggaggcttgcagtcgtggacctgagacctcgggaggtcatgctgtcttgcttttaagtggcttggggaaagtga

SEQ ID NO: 38627 - DNA, 2300 bp, Homo sapien
ttgaaacatgaacttcttagtctagcattttaatactttttaatggtgaaatttatctagacttatctataaagtcttttgcaatttgtggtatgctgagtaagaactacagaagaacaaaaataaaagatttttttaatggcaacttaaaaaattatcaccacttgtactacttacaaattttcctccaaaaagttactttgactcatagtcaatttttaatcttggaacaacttcttgctatcacaaatacttcaagtgcctaaaacatcttccttaccagccaatatctcccgctccactctaagaaatgcaaactcgttcaagtttaacctgaatgcaacataatttggaatctttcattaaaatatatatcacacattttgaagccaaacatattttaaaatacctgtttttggtgatttggggtacatatgcttatcagtataacatattttaaaagatttttttctacatactcaaatctgtgttccattcattttttcactcccacacctttttgtctatccgataattcaggaatctttacagaaacatcttgtttccattgaaataaacaacaagagtaggaaaaagagtgaagcgaaatggttctaaattctatgcaccaacaggcattaaacatgcataaacttttaaagagatgccaagactcactaaaaaggagaaaaaaaatacaacgaaggtttctgagtagtttttagttactcaatttaaaaactttatcttgtaagcaaactttaacatcatccagagcatcgcacttatatatgaaagaaaaagttctttatcacaccttcagaaattacaactacaaattcctaatcccttatttaaaatctttttggctagatatgtttcaaaattcagaacttttcttagaatagtacgtctgccatatattatgaaacacttccagcaagctgtactgtaatcaaacacaatatttctgtagaaaacttatgaatatttacacaaagggaacattcagttacacatagcctcacttcccttcaggtcaaactttactgctaaaggagttagaaacgacagacaaaggaatggggcctgtcatgacatgttaatttgaaatctaaatctttatctttgataactagttcagagtcagtgtaaacatttggtctttccttccacaaaaaaatgaaacagtgtatttaaaattaaaaatgaaacagtatattttatttcagaaggtaaaagcaaaatgaattaatctgtgaaactaagtcaatcacattatgatcttctagaacttgggtagctccactctggttaaagattccatttcttggcacaacagtaaaagacatcagataggcccgggggtaagcatccctggggtattcaaataacttgggtagcaatgaagagctgcagaagagcaaggagacccgagatgatgtagtgtgctgcggcatacctgagttgggcaaactcagcctccgaagattaaaggaaagagcccaagtaggaatctgtgtgatcactgttcttttgccaagacacggggtggacaataagattcctttacaaagcactggtgtaagtgttcgcctggtgctgcaaaaagcggctcactgggaatggggaggagcgtgtggtaagccagacctgcggcgagaagttgggtgaaaatgggtcttaaccatcgcttcctgcatctatcccagagggttgggtaccttcgtgggcggagcgcggcctgcccagagtgccttctagatcctgggtcaggcgccaagctccccagcatcatgcaggaagctgcagccccgcagagttaggacagctcatttggcacccggcgagcccttcccaggcccgcagcccagaatagagccggggcccaagacgcccactggagacagggtcgggtcccactaccgcgcaggcccggctcgcccccgacgtcaggcacggggcgggacccttgcagctgtccgtccagtcccgttccccggaaagtgaggggcgggaccctcgcggctttctatccaatcctgttccccggcgaatgcggggcgggaccctagcggccttcagtccaattcccgcacctttgaggcccaagggggagcgagccggtgctgctgcaggctgaggctgcggcagaggcggcgaggcgcgggcggtgaggacggacaggtccgttgaagcagcattccctccctcccctaatccttcaactcgggggcgggggaaagttaagtcgtgcagaaccgcaaaggtgcctggatttggtgggggagtagtgtcat

SEQ ID NO: 38628 - DNA, 2300 bp, Homo sapien
ttaaagagatgccaagactcactaaaaaggagaaaaaaaatacaacgaaggtttctgagtagtttttagttactcaatttaaaaactttatcttgtaagcaaactttaacatcatccagagcatcgcacttatatatgaaagaaaaagttctttatcacaccttcagaaattacaactacaaattcctaatcccttatttaaaatctttttggctagatatgtttcaaaattcagaacttttcttagaatagtacgtctgccatatattatgaaacacttccagcaagctgtactgtaatcaaacacaatatttctgtagaaaacttatgaatatttacacaaagggaacattcagttacacatagcctcacttcccttcaggtcaaactttactgctaaaggagttagaaacgacagacaaaggaatggggcctgtcatgacatgttaatttgaaatctaaatctttatctttgataactagttcagagtcagtgtaaacatttggtctttccttccacaaaaaaatgaaacagtgtatttaaaattaaaaatgaaacagtatattttatttcagaaggtaaaagcaaaatgaattaatctgtgaaactaagtcaatcacattatgatcttctagaacttgggtagctccactctggttaaagattccatttcttggcacaacagtaaaagacatcagataggcccgggggtaagcatccctggggtattcaaataacttgggtagcaatgaagagctgcagaagagcaaggagacccgagatgatgtagtgtgctgcggcatacctgagttgggcaaactcagcctccgaagattaaaggaaagagcccaagtaggaatctgtgtgatcactgttcttttgccaagacacggggtggacaataagattcctttacaaagcactggtgtaagtgttcgcctggtgctgcaaaaagcggctcactgggaatggggaggagcgtgtggtaagccagacctgcggcgagaagttgggtgaaaatgggtcttaaccatcgcttcctgcatctatcccagagggttgggtaccttcgtgggcggagcgcggcctgcccagagtgccttctagatcctgggtcaggcgccaagctccccagcatcatgcaggaagctgcagccccgcagagttaggacagctcatttggcacccggcgagcccttcccaggcccgcagcccagaatagagccggggcccaagacgcccactggagacagggtcgggtcccactaccgcgcaggcccggctcgcccccgacgtcaggcacggggcgggacccttgcagctgtccgtccagtcccgttccccggaaagtgaggggcgggaccctcgcggctttctatccaatcctgttccccggcgaatgcggggcgggaccctagcggccttcagtccaattcccgcacctttgaggcccaagggggagcgagccggtgctgctgcaggctgaggctgcggcagaggcggcgaggcgcgggcggtgaggacggacaggtccgttgaagcagcattccctccctcccctaatccttcaactcgggggcgggggaaagttaagtcgtgcagaaccgcaaaggtgcctggatttggtgggggagtagtgtcatcaagcatctcgcctgctggggtctcaggggtaccctcaaggttgggccgcggggctgctccgttgtagtgcttagatttctctcacttgatggcctcttgagtgcagagttgctcttgggttggtgggaagagcctccgagctctcattgccctctgctcctgcttctaccccttgccactctgcgacgaacctgttacccagccactgaaaacgtatcctctaccctttgaacccgtctaatggaaggtgtacttgtctgaaacctacttaattgtatgatcatttactcctgctctctagcaggtggactatttgcgtgtgtttgcagtgattcacgaaaagtttgtcttgggaactcccaactcctagtttgtctgcattccaccttctttcactagcttgttcatttctttttccctcttaaatatttgttaagcttgtttctttcttcccacagtcaccgacttagtccagttccctgtgatctcaaaacaattgttgcagcaggctcctggcagtctcaagcagttcatcttcttggtgtactggtatgtgacaattccttcacgtattgttcgtggttcttttccactttctgtgaattcatatctaattgcccccagaaagtcaattctaattaaatctagcataatc

SEQ ID NO: 38629 - DNA, 2300 bp, Homo sapien
atataaagagataatttgaaaatgagaaataataattaactcaaagttctttagcttctttctatctattgactttggctgcacaccattttgaccatccataaaaatgggtttgtacctaatggaaatgtagatctggatccaagtacagactctgccactttctagccatgtgcccctagggcaaccaactttaagtgaatttccttatcttagagtggttaatcatacaattcaataaagtcagaatttgttttcaatgcctgtgaaagcacattataaaaacaaaataatcctgcctgaaaccaccatattgtggtaggcacaattactatgaatggcccccaagattccacccctgctaatccccagaacctgcgaatatggtgagatcattactcctgtgattgtgatattctctacagaactgaccttaaaatagggatattatcgaattggaactaatctaatcacttgagtccataagagcaaagagctttctctggccagtggcagacaagtaagactgctttaatgcttgagaaggatttgtggtgtctttgaagatgcagatggccttaaagaactgaaagaggctcaggctgacaaacagtaaggatatagaaatgtcagtgtgaattctaccaacaatctgaaatagcctggaggtggattctcccctagagcctccagaaaagaatccaaatctacagaaaccttggtttcggttttgtgaaattctaagccaagtactcagctaagcccacccaaacttcacatttacagaagctatgagataatacatttgtgttgttttaattgttgcatttgtgtaattggttaaggcagcaatagaagactagtacacacatacagagaagataagctattctgtttacctctgtgccacttaatagactctagaaaactggaagcaagagtattagttacatacccactatagtgcttaacccaccaaccggtacacattaaaaatataaattattggattctttcttgaagagttttcttgaattctcaaccacaaagattaagttaaataagatggttccaatagcactaagaaaatgattatgctagatttaattagaattgactttctgggggcaattagatatgaattcacagaaagtggaaaagaaccacgaacaatacgtgaaggaattgtcacataccagtacaccaagaagatgaactgcttgagactgccaggagcctgctgcaacaattgttttgagatcacagggaactggactaagtcggtgactgtgggaagaaagaaacaagcttaacaaatatttaagagggaaaaagaaatgaacaagctagtgaaagaaggtggaatgcagacaaactaggagttgggagttcccaagacaaacttttcgtgaatcactgcaaacacacgcaaatagtccacctgctagagagcaggagtaaatgatcatacaattaagtaggtttcagacaagtacaccttccattagacgggttcaaagggtagaggatacgttttcagtggctgggtaacaggttcgtcgcagagtggcaaggggtagaagcaggagcagagggcaatgagagctcggaggctcttcccaccaacccaagagcaactctgcactcaagaggccatcaagtgagagaaatctaagcactacaacggagcagccccgcggcccaaccttgagggtacccctgagaccccagcaggcgagatgcttgatgacactactcccccaccaaatccaggcacctttgcggttctgcacgacttaactttcccccgcccccgagttgaaggattaggggagggagggaatgctgcttcaacggacctgtccgtcctcaccgcccgcgcctcgccgcctctgccgcagcctcagcctgcagcagcaccggctcgctcccccttgggcctcaaaggtgcgggaattggactgaaggccgctagggtcccgccccgcattcgccggggaacaggattggatagaaagccgcgagggtcccgcccctcactttccggggaacgggactggacggacagctgcaagggtcccgccccgtgcctgacgtcgggggcgagccgggcctgcgcggtagtgggacccgaccctgtctccagtgggcgtcttgggccccggctctattctgggctgcgggcctgggaagggctcgccgggtgccaaatgagctgtcctaactctgcggggctgcagcttcctgcatgatgctggggagcttggcgcctgacccaggatctagaaggcactctgggc

SEQ ID NO: 38630 - DNA, 2300 bp, Homo sapien
gtaagtcttcaacttctagttgatgaataaatgatggaattctcagtgatactgcactgttatcaaataaatataaaaggagctcctggaattggatgtaatacaggtaaagaagtaaacacagccatataggcatggcttcttgcagggacaactttgtgaatcggctcagacagacagacaggcaaatacacctcattgcctcatacatgttatttgctttagtttttgttctgaaccttcctactccttcaagtatctgcatttactttatcaaattctcttttattagagactgaagaaactgtcatctccttatgtgctaatgagtttaataatgtcctccagtcaccacaagccttctttcaaactacacaattccaactgcttccgtctcagagtatcttgaaataatgatctgaccgcctgttagaccagtgaagggaaggaatttgggttgatttaagaagagaatcctcatggtcatggtagactgatatggagagaaaacattttgaggaaaaatactcaactaaattcatttctactccagcatgcagtttcaagtcaagttccaccttagctccaggtggcaggcagagcaggatgcagaggcacagcacaagtaaggggtgagtgccgaagctgctggctcctgttccagtctttcttccttggcctcgcctgaacttttactataataatagtcaccatttattaggtgtctcctacgtgcaggacactttacacacagtatccctaatcctaataacacccttattttatagatccaatgactgagtcaagaattacataacctggccagacagctggtacatgggaaaggtgagattcacaccagggtccacccagcatctctacttataccatgctctgctttaaggttctctgagaactcagacaagccttgggctaacaattgtgttaacaggacatagcaggtgcaaggacccactggtcatcctgctacctgatcagaaggaaggaaagttgtatttgttgctcacctactatgttttaggcatagtactaggtgcttttacctagtacttaattcccttatcctcaactcatttattcctcgcaataacctgataagggagatgtttttatcctcattttacatataaggaaacaggcctagagaaatgagcacagtgtccaaagtcacatagttaataagatgtgaagctctgagtttgaaagtctccggtttcaaagccatgaaacttatggctccccgttttagacacttccttttgggaagagtgtggaggaattaatcagaaagaagaaagtcatactcaaataggtggtaggagcagagacaattcaatacagacagaagtcttagatgagagcagtgagccagggcactggactgggactcaggaggcttcccctagactctggttccaccgatgcagcctcaggcaggacttcacctctctgggcatccgtttcttcatatgttaaacatacggggttttaattagatgatcgctgaagacccctctagccctaaaactctgtgtctcttaagtgctaagagggcaccaacagcgttcctcctccccaaggagcataatgtgatggttcctgccggccctggctgactctcgccgtccttggagataattgggttcagtgccacctggaccagaactggggatgcggaagcaagaggcgagtctattgctctctctcggtcctgggccgccctgtgattgttgggcgtccggaaactgtctcccctatgggtttaaaaacaaaactgagcgcccatggggtgtgacagtcatctgcaggggcttgggtggcccatcaggcgaggctttctcggcacccgaggctccagcctgatctcggtcttatcctgcgaccgggctggttctggcgggtcgccagggtgggcggcggccccagccgggcgccccggcggcaagagcggcaggctgcgcccctggcccgcgcctagcctggggagagagctgggcgggcggcgggagctgctctcgcgggccgcggccctcgccctggctgcaacggtaggcgtttcccgggccggacgcgcgtggggggcgggggcgggggcgggggcgaggccgcggcgagcaaagtccaggcccctctgctgcagcgcccgcgcgtccagaggccctgccagacacgcgcgaggttcgaggtgagagaggtccgggcgcgtctggcctcgaagggagacccgggacgtggggcgcggggcgggagtggccggacctccacccagtgcccccggg

SEQ ID NO: 38631 - DNA, 2300 bp, Homo sapien
tcttgaccatgttctttattctagatattctaagtttctcctgtttataattttctatttagagaacttcctttagtcattcttttattttgaaaagcgttagctttagaataactttaagagttagtaaatgtcaataaccttaagcctagtgaccctactcttgcttatccatttcatcgttggccttggcaccttgcagccctccctgtccacccagtggttttcattactctcacagaacacaagaatttcattaggcaatgtgaccttggaactctcaatgtgcccattaatccacgttggcagaaatgatataacatagtgattaatagcaaattcttctaactacttcttgtcatggtacctttgcaagtccaccctagtttatgaaggtataaggaagagtttagtggaaaacagagagagagagagctgaatcagtattacccttgtcttcaacatctttatgagtgcctttgggtgtgctgggccgaattagatgaattttataatgaacaaaagaagaacgaaaccaaaaggaaataatatttttaagagaaaggtcaaaggcaaagcaaaaaatttctgagtcaagcaatgagaagggttttttaaaaaagaaaaaaaaactttgggagaagtataagatgtaacatgggttgaaggaagtaaaggcaggaaaaattaagatctataaactctgagaaggtagtttgagcagaagtaaaaaacattagtgaccaaaagtttggaaatgattcaagagtagttaagtgcagccaagtgcaaacagaatagtcaaattttcactatcttcagacatgaaaatttggagaattgttagatagccacaaatgcaatatagtgggggaaaagaccacagagcatatttgtcaagatataagtcaacaggacagagaatagagtccatcatagcaccctctttaggaaaaattgttgctaattaatttatatttgaatataatttgaaaatactttggtagatggaatttgttattctctgttgactcttacttataggaaattctttttgtacaaacccttttatgctatagttcaaaaatattgatctattcaatacacatttactgagcccactggtgctgtgggcactagaaatacaacaggtaaggcttctgtctaacagtggtcttcaataggaatacagaatgagaagctgaagtcacgtggccagagctggaagcctaattccattgtttactagctgtgtaaaattcactttgatatccccacctctaaactgagaataatagttcctcacttgtttaccttgaacatgctccttgttttgagaatcaaatgagatgatatatatgtgtgataggctctgtaaattcataaaatactatataatctgagtaacttttgcattagccttgtttaaatccttctttatatgcctaaaactttttatcctaaaaccttagcccaggtccttgcacatagtaagtgtgggcagcaattattggatattccagcgaatgaaatgaaaacatattaatatttttactctcacggctcttatgtgctactaagatgacaagagacaataagcataataaattctttaatgatatagtatactagaaggtgataaatgctgtggaaaagaaaatcaaagtaggataagaggaactgagagtcctgagggtacaagatccaacttctaattgagaagagatttttaggaggtgagagtgtcctccatgtcagtattttggggaggataattttggacagggggaacaactagtacaaacaccctgaggtggagtgctgcctctcttgtctgagtaatatccaagaggccagtgtggctggagtggagttaggcaaagacaaaataaataaaaatgagatcagagaggtcacggagagggcacagcattgtaggccatgactgagtgaattgggggctaccacagaaatgtgaagagaagagtgatgtgatgtgactcacatttcaaaagaatcatccaggccatgcttttgacaatggacaaaggcggaagaggaggaaaggacagaggcagagagacaattaacaagctattatagaaaatcaggtggagatgatagtggcttgcatgatggtggtagagctggaggtgcagggcaaaggtcagattctgaatatattttgaaagtaaaggcaacaagatttcctgacagattgattatggtgtgtcaaagaaagagaggaatgcaggatgattccagtgtttttgttgacaactataagtctggagctgcca

SEQ ID NO: 38632 - DNA, 2300 bp, Homo sapien
tatatgtgtcatatatatgtgtcgtatatgtgtcatatatatgtgtcatatatatgtgtcatatgtatgtgtcatatatatgtgtcatatgtatgtgtcatatatatgtgtcatatgtatgtgtcatatatgtgtcatatatatgtgtcatatatgtgtcatatatatgtgtcatatatatgtgtcatatatgtgtcatatatatgtgtcatatatatgtgtcatatatgtgtcatatatatgtgtcatatatatgtgtcatatatatgtgtcatatatatgtgtcatatatatgtgtcatatatatgtgtcatatatatgtgtcatatatatgtgtcatatatatgtgtcatatatatgtgtcatatatatgtgtcatatatatgtgtcatatatatgtgtcatatatatgtgtcatatatatgtgtcatatatatgtcatatatatgtcatatatatgtcagagagagagagagagagagagatggagtctcactctgtcgcccaggctggagtgcactggcgcagtctccgctcactgcaacctccgcctcccgggttcaaacgattctcctgcctcagcctaccgagtagctgccactacaggcgcgtgccaccacacccggctaatttttgtatttttagtagagatggggtttcactatgttggtcaggctggtctcgaactcctgacctcgtgatccgcccgcctcagcctcccaaagtgctgggattacaggcgtcagccaccgcgcccagcccatatatttttattctactaaacagaatagtagaataaaattagacatggtagctgaaaaggatgattttttgactattttaaatagagatttttaaactttaaaaacctcagaaattaggaatttacaactttattacacaaacgtgcgttgttaaaacattcaagagtaacagtatgccctgcattaacagggataatatataagaaaaatagagatagccacacaaaactatatattctctgacattctttgacagaaacttcaaaagtagaggtgaaagatacatggattttggagccactgaagccgtgaaatttcagtaaaaattatgtcaaatgtgacttcaaattaaattcgagaaacatttattgagaacctgttctatgtacagcactgtgctaggtcccatagggagagtaagtcatttaggattgcactctaaaatctgggcatattggtgcaaagggaggtgaacagcaggcgtaggtgagtgtcagaggacctgacccaagctgggaccctcctgcaggtaaaacggtgggtagtgagaagctctaggaagggggcgcttccgaacacgcgcgtcgaggagggcgttccaggactctgagggagcagcccagctggaccgaggccgcgtcgttcctgggcttactattcccagacccggactcccgattccggagtcacggcccaggacgcgaaaagactctacactggcaccacgctcctccttaggcgggccgtcagtcccgggtgcgggctgcgctggaggctgaggtgggagcgacatggtgtggaggggcaagaaatgtcggcactagacgcgccaagaaggagattctacgagcaattcccccctcgggccattgtgttgctgtttattagcccctgggagggcgtcaggacaaaaggaaccctcctcccttcttagtacttaggcccaaggtcgggtgtgggagccggcgcgctgctttctaggcaggcactgaagctacggcagccacgcaaataggtatcagccgttaaagcttggctacaggcaaggggggggcaataggcccctggcgctgtggggccccgcatcccacaatccccgcggctagcctgtgtggctactggcggcagctagcgggctgcgaaagcgagcccagcgtccttgacagcagcccacgcgtcggggcggggcttgagcccgctgctttaaaaggtccgcgcggccggccccgcccctctggtgccgcgattggatccggcgggggtagcgttgatttgataggcgcagagagggtggggctgcgcacgcgaggccgggggccttgccgctgcctcccgggctggggcacgagtggctgcggagtgtgggtggttgggcgtgaggggccgacgggctcgcgcgcgcgccgtctgctgaggtccctcgggaaggaggagagcgcctgacgccgacccgcaggcgcagcccggcagtcggcggcgcgccgagggcggaggtggtgcgtgcgtgcgtgtgtgtgtgtgtgtgtgtgtgtgtgt

SEQ ID NO: 38633 - DNA, 2300 bp, Homo sapien
atggtgggagggaaatgcaatttaggaagacttgtacctctgggaagatgaacatgacatactttcccctatttctctcactaagtacaataataaaccctgggcattatacataaaacaaacataagaagactctgaaaggtagcgagtagaagaaagactggttaaggacactagaaccttaggaatgacacagtagtgggttgcctggatttactttttacctcatatatcccagactgggtgttggataagccaggaacctgcaaatttcaacaggcaaagggaaaaaaacaacaacaatgaaaacctctccacaagatactattctctctagccaaaggaccagagaaagaacagcctagcaaaacagaaaacttttcagccgtatctgctctactttaaacatcacacaaaaaaaccgtagtaccacctactcttaaaaaaggctgaatgggaagcttagaattccgccctcctgaggctataacagtgtcccagtaccaccattagggttgtatcagagaaggccagagagataagatttcttccctcttggctggtcaaaaactctctctctcttccccaacaccccccttcccacaatgttgacggaacaccacactgtggagcctaggctgccatcttcatccaaaagtaatgtgctggttcctggccatactggggtggggtcagaagaggcctgttagagagttatgtctttcactgtcacccagtggtaaggaggccaccccaagtaccatgccagtggaaaccatgtaggaagcctggactccaagtcccacacagtagtaatgaggatgcccttattgggtgtcagtggaagccaattgggaaacttgaacttcatcctccacttggcagtaatgaagcaatgcccccctcccaccttcccctgtgggagcagtgtcacaaaaagctagttaaaacagaaggtttaaataagatccagagtttcataacataatataaatatgtccagctttccattgaaaccatttgtcataccaagaaccaggaagatctcagattgcataataaaagatagtcaatagatgtcaacactgagatgacagaggtgttagaatcactgacaaagattttaaagcatccatgattaaaatgctttgagcaatacatgtgagaaacaaatgaaaaagtagaaatccacagcaaagaaatggaagatacaaagaagaccaaaatggaaatttggtgctgaaaaaatatgaaactgaaaaagttcagtggatggacccaacaggaaaatgggagttacagtggaaagaaccagtgaactgaaagacaaaacaatagaaatttcctaatctgaacaacagagagaaattagacttgttaaaaaatgaacagagcctcagggacctgtgggacaataacaaaagatgacacctgtcagaattcttgaaggagagaagaaagaaggtgggactgaaaaagtactcaacagctgaaaatttcccaaagttagcaagagacataagcaaacagattcaagaaacagagcaaaccacaaataggaaaaattcaaataaattcatgccaaaggcacgataattaaaccaataaataaagacaaagaaaaaatgttgcaaatagagaaaaatgacaacttgcctacaagtaagcaattgaatgacagtagatttctgatcagaaaccatggaggccaggaggaagtggtaaaacatatttcaagtgctgaaagataactgtcaacacagcagaattattcttcagcaatgaaggaaacattaagaccttctcacaggaaagacaactaaggaaatgtgttgccggcagacttaccctcaaataatggttaaagaacattcgttaagcagaaaggaaatgataaaagaaagaactttaggctgggaggccaaagcaagcggatcacttgagctcagtagttcaagaccagcctgggcaacatggcaaaaccctgtctctacaaaatatacaaaaaattaatcagacatggtgatatgcgtctgtgggtcccacctatttgggcggctgaggtgggaggatcacttaagcccaggaagttgaggctgcagtgagctgtgatcgtgccatcatgccactgcaatctagcctgggcaatagaatgagaccctgtctcaaaacaaacaacaacaacaaaactttggaataacaggaagaaaggatacagtaaacaagaatatgggtaaatacattaggctttccattttacttttagttttctgtttgttccccctgttcttggtttctct

SEQ ID NO: 38634 - DNA, 2300 bp, Homo sapien
ttatatataatataattatatgtattatttatatattaatataaattaatataatataattatatattatattaatataattatatattaaatatattatattaaatattaaatatattatattatattgattatataattattataaattaattatatataattattataaattaattatatataattattataaattaattatatataattattataaattaattatatataattattataaattaattatatataatataattatatatataaagtccttatatattaaatattatatatttataatattatatatataatatttatatttccctcatcctttatagcatttcacactacctgtggcttcactggagttattgcattgaatttgctgccttttacttaagtcaaactttttgctcacagtgaaaggaatagagaaagatgtagggagaccccctgaaactattgctacagaataaaagatgaaatgctcctaattattgtaaatacaaaattgcatgcagtattgtgtaaagacaatgccaggttggactgccagaatgagccaacagcgcgtgacgtgcttccccctgcagagagcctatgaatggacgtgcggtcagggaggtttcacatcaccaagattcctatcccagaaaagcagatgttcatagctctaggaatggaatgcgacccttgtggagagcctataaacggatgcatggggcgggggggtgcctgtccatatggataagatagggctataaacgtcctcatcttgccatggctcttctacacctctttagggttaaggcatactcctttctgagaatttctcgtctaaccagttgtctatcttcacgtcctatttccatggattgtttgtaaccagcttttgttgcaactgttactgctgattaatatcttgctaatcataggttatggaaagattgtgtttctgttttaaggctctgttagaaattactaacacacacactatattgtaaattcttatctctgtatactgtacttctccatacaaatgtactgtacttctatatacaaatgttatgttaaagaattacttcatccccatgtgaccatctcacctcataatcaaatgaccctaaatccctcactaacctacccctgccctcactaaacttaataataaatgctggtatatccagtgcattgttggcaccgtgggaccagaaggtagtgacccccctggacccagctttcactatcttgtgtgtgtctattatttctcaacctgccgatccgcctaagaacaaagagagagccccgttgcattgcaggctgctggccagatcccacaatacatacacagattccaaaatgcattcttaactcttaaaagattttggttacttatcactattctgtctacttttctgtaattgagaaaagtatttgtcaactcattttttctctctgtgacagctcagtcatttacaaagttttattttatactttactccttccttcaatttgtgctaaaacattgtgaaaattaacatttctttggaacacaactttttcattataaattaaatactgatataattgcaaagtaaacaaatgaatttccataaagctaatttatctttatattttccatacttattacttcaaattcttgttacattttcaattttgtttgaaatatcatatggtattttaaattgaaatttactaattattttttagccagtggataaagagaaattaaaaatttgaacaaattaattcaatttttacttcacttctcatttgaaggtcttcccagtaacctaccaaaagaagtctctctcttttttttttttttttttagcttagattctaatcttcattctgcctattctggctaaacttctcaactctggctatttttcaattataccccaatccctaagccatgtaactcttcgaggtttttgtttgttttttcaactgctcattaagacgtcctacaccttagcaaaaagatcacacatatttcttcaatgctttggagccatagtcatgtactcaaaatttattttatctctactcccacccttcctccacccaaacttatccttgggttttcactgattagtgctttcaagcctgcctgccttagttcatgtagctcctcctctggtactgggataaacacttgtattaccattttaaaggctatcattactctttacctgtgaagagtagaacatgaagaaatctactttattcagatattctccagattcctaaagattagagat

SEQ ID NO: 38635 - DNA, 2300 bp, Homo sapien
tattgcttcactattaaggaaaaatgctggcactctagacccattgaaagactcacttgggggtttctttttaggagagctggaaacagagaattctttttgttatattggcaggttttagtttcttcagggatttgttgttgttgttttgtctctttattttggtctaaatatcttcaaaacttcagtgatggaaatatgttttttttaaaaatacaaattaaataaaatttagctcttcctacaatagtttgggctctaaatgatttctctcgatcaaacttccatttatttttaatattttatatattcacccatttcattttttaggagattttatgaagatggagcaattgtcttgggtgaagaagcaaatatgcttgctggcatgcttctaggactcaatgctattgatttcaggtacttaaccaaatgcattcagtttttaaattattctatatcttaatagtttctacttatgatttttttctttcagttgtctaagtaaagcacacagttggatattgttatttgattcatgttgttctctttcaaatgacatcagtttgttttctaaatgagtttgctctcagaaaagagactgcctgaaacttaatgaattgataggcttgctctgtagcttggataaaaagaaaacttagactatatcccattccccaacagccccctccctaatgaaggaaggctttgaatcttatctcttagtatttttcagctactgctttaaaattaaaagaaatagacttaaagtagtttcaaagccagaaagattctcattatctcacgtgttgagataagatcctgagaggctatcttgggtatcttacgtctcttatgttatgtatggagaatattaaaaaaaaaaattgttaaaatttacttttattgtcaacaagatgaactggttctacactaaaataacaagtgctaaaaatgggcaatacaagttctttttagatttatagacactttttttgcatttctttaatcgatcccagattttacattatattgaaagtaaaaggtttgtctataagaaaactcaaacacaaggaatgaaggaaatattatatttttattgaaatataacatttgaaaattcaggaatattaacaaaataagtataagacaaatgaaattctacttttgagtcttgataaaaataatgctgttcgttttcactgaagttatcttttatagtaaagcacttccttttctaaatatttgtcacttgacaagtctaactttattaaaatttaataagctagtattaggtttaattagcttaattgtggaggatgaacatgatagatggaatgtgaaggttgtctttttgatccctctatggatgttaactttttatatcacgtcactagctctgtctaaatttgttacagtcttgttttgtttgtttgttgttttattgttttaaaaaaaacaaggccaggcgcggtggctttcacctgtaatcccaacactttaggaggctgaggcgggcagatcacctgaggtcaggagttcaagaccagcctggccaacgtggcgaaaccctgtctctactaaaaatacaaaaattacccaggcatggtagtgggtgcctgtaatcccagctacccaggaggctgaggcaggagaatcgctggaacccgggaggcagaggctgcagtgagccaagatcatgccacagcactccagcctgggtgacagagcaagactccctctcaaaaaaaaagaaaaaaaaaaacaaacaaaaaaactgggattaagaatgttaactgttggtttaatgtaacccattgatagtgtattaatttgtacaatgccttgtcattggtattgaaggtagaatattttattcaggcgtttatttctgacaagtaacaattaaattgcaaacaaaaaaattcgcttgccatttgatgagagaaacgtctctggcaagagatttttcatgaaacttaactttgatttaaaattttatatattaataggaaatatttattttctattgtcttagtttctgcctaaagggagaggggctggatggcagttttcctgctgtaatagactatacaccatatttgaagtatatccaaaggtatgtgacattttgagatatgttttttaaaatcttatttaaaattgaatgtcttgtgcaatgtttgtctgatcaaaactactttgtactaaatattcgttccaatatcagaaatcattaaagggtacaagcttcagttgcatttttagtatttattatttaaaaagcacacaccttttat

SEQ ID NO: 38636 - DNA, 2300 bp, Homo sapien
aaaacacttttatttgttaattgcccagtcttgggtatgtctttatcagtagtgtgaaaacagactaatacagaaggtaaatcaagattataataagattgcatttaacacatatttgttttgaaaaaattgaaaattctgatgatactgaggagatagtgttctgtcttctggcttaaatgtaagttactttaatccttttactaaagattcttcattaatctcctggttaagtgaattttgttattaagtaacttttgtttctcaagaagggctcatgggtttttcatgttggagaatgcttcccatttacatttgaagaccaccttggttagttagagtaaattattaatggttacttcagtagcatacagaagcagaaaaggtatagaaaagaggaattttgcagggagttgagggaggaaagctgttcttgcagaacatttcttcatgagatgttctactattacaggaaagccaagagatattttgttagagtgagttctcccagtagaatgtgtcctccctaaaaagggacagtgtctgcacataggagaatagaaagtgggacagaaaaaagataagtaggttggtaaaactgtagggagtttaaagcagtgttgaatacattatgagttctaggcagttcactgataatcacttctcagattttctacctgtactcccaagtctctgggagtagcgttttgccttttttttcattatttttgtaataaattgaaaaggagactcatttttcatttctcattataattagataacatgattttaggagataattgatgtaacttatttttctaaaatagtatatatgttatgaaacaatttcattaactattctaaaaagttatatctaaatttctgacttgtttccttacattctgatggctagaaatataataaagttttctggatttaatttcatgtgcgcatattcaagttgtcaaccttgctggcatcaatgtcaacaataaagtgctgtgggccgttttaccattctggaggagaagtatacctatattctagcatacatatattatttttccacttaaaggagctcatttaaatgaatgttacaaatatgttccctagacttgaagattctacataagtttcaggaactaaaatatttttattgtacatattttcacatatacagaaaaatacagaacaatgaaatatggtatatgtttacataggtttaccaaatcataacattttagtatatttatgttttcaaagtattgtaaactacagttattagaacattatggtccttaataatttagaatgaatctctcaaaaaaatactttctgtatacaaaatgaacaagatttctgaaatattatctaatatccaattaatattatctaataccagaccatggtcacatatcactagttaccctcaaactggaaaaatttgtttgtttgaaccagggttcttttggtggttgactcttaagattccttttaatctagaacagtttactctcccttgccacgtttttttcccacctttgattcaaataaatcaagacaatagtcttgtaggctaaaagagtacaacttctactgttatgtggcatccattaccttgttacactagttgctgaatttcctgtgacttggaagttagacctaaagcttgttgtttcagattcagattaaagattgtttcgattcagattaaaggttcgccctcttacactcccttcccaaaaaaaacaaccgtcatagatgatgctggccctttaattttgtgttacaaaatctggttgttctactgtaaatgatgctaagattaatcactgtgtttgggctctagagtcgtttgcttatttgtttttaaagcagagtatattaactagaataacatgaggtttttgtgaaaatgcttctataactaatgcttgcatttatggagtgctctttatattcttcaaagcaattagtagaaagcatttaatgagtatttgttgatttttgtattaaagtttttatgtactcttttcttttagatttattatccttttcctgtgtgaaaagataagacaattactttcttcttaattacaggtttttggctactgatgttacaaacaataaaatattggagcatagagttgaagaacagactcaaaccaggtaggtagataataaaagtctaaagaatcaataaaattactatttattttgataaaggacattattgatattattgacagaattggaatatgaactgtagagtacggttcaaaattaagtttcctgaattt

SEQ ID NO: 38637 - DNA, 2300 bp, Homo sapien
gataatagattagaaaattactaactattgcataaagcggacttcctgcttatttattgcttggaattaccatcttcagtgcagtcgagggtgagtctaaccgcatagggtgcaactatgttactgtccttcctcttcacggcaaataagacacacaattcatctttcacaagaccataaaatgggacttccttttttaaaaaaaagttcctcaatagaagcatgcttaaaaatctttcccacatcctctaaaccttccaaagatccagtcttcccttcattatactttcctacaataacaaatttttttgaaagagtacactcaacctgtctgaacttcaagattataatttttatctagtactgtacttatctctgccacctactcaaattacccttaaggaaaccaaggatacctgaaacgccaaaatcaaatacttatttttcaagtcttaaccttatctgtcctggggatgaaggaactggtgcagtgttcactagaatgatagtaattatggagctcttaaggagctctactctgtgccaggcactgtactaagcattcaaaaatgttcatttaatcttcacaacatccctgagaagtactacccccttttaatagattaaaattggggctcaaaattacccagaggccaagtagttagtgaagcccatatgattccaatgtttgcagtctcttcccaattctgtggcattttctccatctctttcactatttcatcaacgacgcttataatcaattctcttatttcacatgctctccttggcaatttcatttcctcccaaagctttaactacattctatattagtgcttcccaactttttaaatctttctgtaaatataaacattttgtgctctctgtagcttatattttgaaaataagttttttcccatagaaattacaatattgaatatgtttgttcaaactacacttccttccaccactcaagatctgttaacctctaatgaattgccccatgattgacatcaatagaccttgatgcagaaatattttattggagagatatcaaatcaatctctatttcctcttcccatgtccacttctgctagacatttctctcgagtcataaacatctttaactgtctaataagcatagttccatgactgtcgccccaggcccttcaacataaacctgtctaaaaccaaactctcatttcccttagcaaacctgttctctgcgttctccagctaatcttgtcacaacccacccttgtctattctttaaggtacctacctgcaaaaccgtaacgctgatactctgacttccttgagctaccaggtaaaaaaatcaaccactacaggagtgcctattatggcctggagtagaggaatgcaaaatagttcaaaatatcctcttcctcctgaagaaacagatttttttttttttttggagaggcatgttccaacttataaaattaaaatatattcacaagcattttaatttgatctttaatctctgttttacaggaaaaaaaaatgagatgttactttccactccttcattgttgaaataaacttacactcaactaaaagaaaacaggtctgaatacaataaaagtcaacaggacagcgcaaatagccaactacccaaggacacaaagtgacctggaggcgttctgcggtggcgctgccgtcaaggccggggccgcctggccagaccctccctcagacgccccccggggccgccctcactcccgcacgtccctctgcagctgtcctcagccggtggggtcggcagtgaccgcgggaaaaccccgcttgctgtgcgacccagggcgcgctgagcaggggctgcggctgccgccgctgtccggctccggttccggccccggccccgggcccggccagagctgagtccggactcagccaaagcccctcgccttcagcttcccagacgtccgaccagtggaaaattagcatacctggggcagaaggcagctgcagggccggcagtcctggcaaacctagaaggcgggaataaccctggtgacgggcggggccgggctccggcgctaactgcatccactaggtttggtcaacacagagccgcgccaactctctgaggctgcgccaagacctgaagcggcggaccgagagcccgggtctgagactgagagagcaacggaatggaggcggggtagaggcggaaacacaacctgcagggccagagcgaggcgcgagaaggacggcggcgtgagggggcggggcgcgcagcgcgagaaggcaggcacgaggggcgagcgcgaggcggggca

SEQ ID NO: 38638 - DNA, 2300 bp, Homo sapien
tacactctaagaactttacactagactgctaatcagagaaacctgaaaggtctgtcagtccacaaaaggttaaaacaaatggttttttgttaacgataaacagctgataaaaatgttaagcttggtgctaatagaagcgttttccaaaatgaaaaatttaaatgattacacagtagaaagtactagttacaaatttttccttctatgccagtgtacggttttcacttacccctcccagatccttaatgtccttttgaagtttttcagatatggtgacagaaggtaagtcaaggtaaaatacttttccccaaagtggcttacatttggatttttctggcctgttatcagttttcagagatttcagagatggtctgtttttttcatttttgacttggattccacctattaaagatgtttagaatcagatgttttacacagacacttttactatttttaaaatatttcattatacaatattacagaataaaaatccttacaaccctaccagtttaagttattagcattgaaatgtatttctttgtagtactacttaggatagaggcaaaatgccctatatactttcacagaccgcatattgtaaaataatagttgactcagcaagaaatattcgtgtgtttattcctgaggcacggaactatataaaactcttttgaaagattttctttttttaggatgtaaactccatggggatatttaatactcaactatttattgagcatctgccattctgctgaacattcaaaactggtgtttaaacttcatttagcgatgaaagaatcctctgttacgcagaataacctagtcctcaagggtttcagactgctcaagttttagtttcatataaagtttgtctgcatattaacaactaaacggtccatttcacatacaatttgtctacgtattaagaacttaacggtccattacgaagaactaaacctttcattattttcattagaaacagatctgagatccaagcaactgctttaaaaattaatttttcaaacgcaatctgttcttaaattggtagttactacacacacacaaacacctgtacaaaaaacttaggtgctggaatgtttcaccaaataaagtgactgaaaatggaaatttgcttttgtttccctgtttgtaatgttgaaaccagcaatggggtgtttgaaatacaatgctttcccccaacttatgaggaaaggaaaataaactttcaagggtaagaccaaaaatccacccacaatcactcaatctaatcctgaagcgaaaagccacgagcgcgtctgactttaaattgaggatgcagtccgtcgcctccaagggcccgggcggaggcttagcatatgcgagagcccgggagcagacagcgccgcagtcccggcgaggtcccggatctgcacattgtttgctagttttcaaccgaaggcacgaccgggaatcaatctgggaccgccgctgtaaacggcagagcgctcgaggggccgggtcaggatccgttccttcttaggcaaaacactgaacgggggctccttccttcagaccccagaggccggtcagaagaaaagaagctgaggacccggcgggagaagtctgaagaatcaatggtggaaccacgaggggaggaaaggattaaagggactgcaggcggaggaggggcttcttaccctggaaatgtcctttactgtggatcctcatggctccggagttcatggcagtcgcccggcacctacatgctgggtccggagaaagtgtcgcaccgggcagccgcgaaagcacggcttcccccggcctgttgacaggacggccgcctctctccttccgccagctacggcctctacgcagtagaggtaccgcgtctgcaggtcgggtttccggggccggatccggctccaaggcgcggaggaggaaggcgcaaagcacaaacgagtgggctgcggcggttgaagatttgaaaacgcgtcacgcggccgcggcgccgatacgcgcgccccgccccgtctcacgccacgcgccgtgccccgcctcgcgctcgcccctcgtgcctgccttctcgcgctgcgcgccccgccccctcacgccgccgtccttctcgcgcctcgctctggccctgcaggttgtgtttccgcctctaccccgcctccattccgttgctctctcagtctcagacccgggctctcggtccgccgcttcaggtcttggcgcagcctcagagagttggcgcggctctgtgttgaccaaacctagtggatgcagttagcgccggagcccggccccgcccgtcaccaggg

SEQ ID NO: 38639 - DNA, 2300 bp, Homo sapien
aattatcagggaaatgcaaatcaaaaccacaatgcgataccaccttactcctgcaaggatggccataataaaaaaaaatagatgttggcatggatgcaatgaaaagggaacacttttacactgtttgtgggaatgtaaactagtataaccactatggaaaacaatatggagattccttaaagaactaaaaggagatctactatttgatccagcaatcccactactaggtatctacccagaggaaaataagtcattatacaaaaaagaaacttgcacatacatgtttatagcagcacaatttacaatagcaaaaatatggcaccagtcaaaaggcccatcaatcaacgagtggataaagaaaatgtggcatatatataccatggaatactattcaggcataaaaaggaacaaaataatggcattcgcagcagcctggatggaaatggggactattattctaagtaaagtaactcaagaatgaaaaaccaaactttgcatgttctcactcatatgtgggagctaagctatgaggacacaaaggcataagaatgatacattggacttggggactcaggggaaagggtgggggatggtgagggataacagactacacattgggtacagtgtacactgctcgggtgatgggtacaccaaaatctcagaaatcaccactaaagaacttattcatgtaaacaaacacaacctgttccccaaaagcgattgaaatacaaaaataaataataaacactcggaaaaaaaaaatagcctcaagtaactactggctacagtatttgaaaggcacacctctaaatcttaatttttttcctttctaaaatgggagtaggcatgtgcagtggctcacatctgcaatcccagcactttgtgaggccaaggtggagcccaagagttcaagagcatcctgatcatcatggggagactcttgtctctacaaaaagtaataataataacaaaaaatagccaggtgtggtgtcacatgtctgtggtcccagctatttgggaggctgaggcaggaggatggcttgagcccaggagcttgagctgcagtgagccgtgttctcaccacttgcactccagttggggcgacagagcaagaccctatctcaaaaatacatacatacatacatacgtacatacataaatataaaatcagagtaatagttataatcaaattcttgaccaaaggatcagataatacatgtgaactttgaaaaactaaaaaatacaagtattactttatgtagataactattttattattgttttatactcaagaatttctatcattttgaatcagaggaaaatggaataagcagcctgagaaaactgagttccccatatctggtagagttttgaggctgtctggcaataaagaacaaaaatatcccgtagagttaagctaaatcatccctctattacctgcagagaccttccctgggaggtcctctttgactccctggactgaattaatggtcctctaggtataaccatgacacttttcacactgtattgtaaaaaaaagtggtctgtctgctcaactttacccaagaacaggtgcctctgatccccgtgtccttccggttgtcaaccgctgggtacatagtatatcctcaatctgtatttgttgaataattcactagcactgtattcgtgagggtatggttctccggataacttaagtaactactaatctgtggtaaacagaacagctctttaaggacgatgcagatgaatactggctgctgtaacggcccagttggtgcatctcggatgccaggaggcggtccagtgctgatctctttcttttgcccttccctcccgcccttccagtctgtgggatatagaggacctcacagtcacgaggtcgcgacggtccgtgccgtcgtggagacaagcgggacacggagagagaactacatttcccagctgactctcctgcgcgcgcccttgcctgcgcgcggggggcgagtgcaccgggcgctcgctccctgccgagctcttgtcgcccgcccgagcctttgccaggggatgaggtgggaggcgctagaaaccacttagctacagccaaccgcccaatgcagcactcgctcgctccccccgccagcggaagcgtccgcgaagcacaatgcagcactgagccgcggtggaggttgcagcgccacggccgccgcagcaccggccggggctgggtggaggtggccgcggggaccccgggggcgcggagcgagggaaacggactcggcggcgccggcatgaggagctgagcgtctcgggcgaggcgg

SEQ ID NO: 38640 - DNA, 2300 bp, Homo sapien
ctcatatgtgggagctaagctatgaggacacaaaggcataagaatgatacattggacttggggactcaggggaaagggtgggggatggtgagggataacagactacacattgggtacagtgtacactgctcgggtgatgggtacaccaaaatctcagaaatcaccactaaagaacttattcatgtaaacaaacacaacctgttccccaaaagcgattgaaatacaaaaataaataataaacactcggaaaaaaaaaatagcctcaagtaactactggctacagtatttgaaaggcacacctctaaatcttaatttttttcctttctaaaatgggagtaggcatgtgcagtggctcacatctgcaatcccagcactttgtgaggccaaggtggagcccaagagttcaagagcatcctgatcatcatggggagactcttgtctctacaaaaagtaataataataacaaaaaatagccaggtgtggtgtcacatgtctgtggtcccagctatttgggaggctgaggcaggaggatggcttgagcccaggagcttgagctgcagtgagccgtgttctcaccacttgcactccagttggggcgacagagcaagaccctatctcaaaaatacatacatacatacatacgtacatacataaatataaaatcagagtaatagttataatcaaattcttgaccaaaggatcagataatacatgtgaactttgaaaaactaaaaaatacaagtattactttatgtagataactattttattattgttttatactcaagaatttctatcattttgaatcagaggaaaatggaataagcagcctgagaaaactgagttccccatatctggtagagttttgaggctgtctggcaataaagaacaaaaatatcccgtagagttaagctaaatcatccctctattacctgcagagaccttccctgggaggtcctctttgactccctggactgaattaatggtcctctaggtataaccatgacacttttcacactgtattgtaaaaaaaagtggtctgtctgctcaactttacccaagaacaggtgcctctgatccccgtgtccttccggttgtcaaccgctgggtacatagtatatcctcaatctgtatttgttgaataattcactagcactgtattcgtgagggtatggttctccggataacttaagtaactactaatctgtggtaaacagaacagctctttaaggacgatgcagatgaatactggctgctgtaacggcccagttggtgcatctcggatgccaggaggcggtccagtgctgatctctttcttttgcccttccctcccgcccttccagtctgtgggatatagaggacctcacagtcacgaggtcgcgacggtccgtgccgtcgtggagacaagcgggacacggagagagaactacatttcccagctgactctcctgcgcgcgcccttgcctgcgcgcggggggcgagtgcaccgggcgctcgctccctgccgagctcttgtcgcccgcccgagcctttgccaggggatgaggtgggaggcgctagaaaccacttagctacagccaaccgcccaatgcagcactcgctcgctccccccgccagcggaagcgtccgcgaagcacaatgcagcactgagccgcggtggaggttgcagcgccacggccgccgcagcaccggccggggctgggtggaggtggccgcggggaccccgggggcgcggagcgagggaaacggactcggcggcgccggcatgaggagctgagcgtctcgggcgaggcgggctgacggcagcaccatgcaggcggcagtggctgtgtccgtgcccttcttgctgctctgtgtcctggggacctgccctccggcgcgctgcggccaggcaggtaagttagccgtcctctgtgcctttgggccataccatttcccgggaatctttggagccctcaggcgtattgaaaagggggcatccccatttcccgagtgcgcggggagattttttttttttttttttttaattcgggagggtggtgagaagtggagcaaaaatatatgtgtggaggcgcgcagatgcactggaagccttcggtcaaagcctgtttttctccttctgaagaggaatggggagaatgggaaaggggtgccctgcttctgggccccgctcctggttgctctcggatgagctggtccaaggctctcgggctggtgtctctgcgtccttcccagttgggttccgagagggagggggcggtggggattttcgtaggggagacgtaggactgcaggatgga

SEQ ID NO: 38641 - DNA, 2300 bp, Homo sapien
tcatgctgctataaagacacatgcacacgtatgtttattgcggcattattcacaatagcaaagacttggaaccaacccaaatgtccaacaatgatagactggattaagaaaatgtggcacatatacaccatggaatactatgcagccataaaaaatgatgagttcatgtcctttgtagggacatggatgaaattggaaatcatcattctcagtaaactatcgcaagaccaaaaaaccaaacaccgcatattctcactcataggtgggaactgaacgatgagatcacatggacacaggaaggggaatatcacactctagggactgtggtggggtggggggaggggagagggatagcattgggagatatacctaatgctagatgacgagttagtgggtgcagcgcaccagcatggcacatgtatacatatgtaaccaacctgcacaatgttcacatgtaccctaaaacttaaagtgtaattaaaaaaaaaattcaattctttagcagtaaagcagtgggaagatgtctaaggacaactgatatgccaattcgtatagccgtttatccacgaagctaattctgcagtacttaaaaatattttatatgctttatacttctttcaaacttgagtcttgagcttgtactcaacatcgagttcggccctgacatctactctttatagtcggttacctctttctgaagaaacaggcttccaaagagagaccaggggactcattagatgtctcatctaccttgatgattgctaccttgatgattgaaaacagtaacctgcttcctgaatcaaacacaaaacaggcaacatgcagtgtctttgctatgccacaacagggactattagaatttttctcacaattcggactttggttttcaaaagggcttgcgagggaagttacacacaagagaaaaacaatgaaccgaatgaggacaatagcccacgaatttagaatggaggaagcccgtccaccacagcgaaaaagcacagtaccacattggcgggtgctccaatatttgtgaaatgttgatgaccctttaaatgtttctgtgcaacctccacaacaaatactgtgaatcttgcttattaatgcgtttctcaatacgttaaaattcaggaaatcattaagtctagtccttaacagtgaagggcaagcaattttctgtcattgaaattacacaaaacaaaacaaaaagctcacgcctgaattgcttcggactattcaactggaagatagaaaaatatatgaagtaaagaagaataacctacatagaagttcctatctcttatcttcctgaatacttaccagtacactattagtttgttctaaacttttcttatataaaaagtagctgaatacttttagggaaatggattgttttgtctgaatcatccagataattcaaacaattcattttcctaagaacgatatgtgtgagtctgtcctgcccggaaaatgccctctgtcctactcaggacacaagtcacgctcagcttaaacaggcaaggaattgtcccctaggaaggaaatacgccgttgtcgttcagtgaactctgcaaccaacagcaagccaaactctcccttgcacacagttcgtcaagttaattcttattttccaagggcgctttcgtatttccatctttcaaagactccttcacccactggcacctaaggcttgccctaacgcatccagcccctgcctcgcgatggtgcgctccgcttataatagctccgtcctgtccaataaagttgtttaaaataagaaatgtgccagataatagccaagtccgaaggaaaaaaaaaaaaaaagaattcctggggtggtgtattggtgttggaatgtgccattagttttggagggaggaaagtccctggtgtgaattgcctcgcaggtcgtaggccgccactggaccttcagtcgtgcactgcattagcgccgtaatggcaaagatacgaagaagcgcgcaggcaggggagccacggccgcgcgcacaggcaagagctggagacgactgcggagcgcgtcccccacgcccgcgtggtgcgctctggggcggccccctagcggcagggcggggcggggcagggggcggagaggcctggcgcacagggcgagggcggctgcggcgcagtctgcagcatggcgtacccggggcatcctggcgccggcggcgggtactacccaggcggggtaagtgctgactgcgcgggatcgcggcccaggcggctccggggcgctaagaggccaccttggagatgctgcggccagcggggtgaggcgctgctgg

SEQ ID NO: 38642 - DNA, 2300 bp, Homo sapien
gttccttgtatattctggatattagtcccatgttggatgaataatttttgtaaatattttctcccattcaacaagttgtctcattactctgttgattgtttcctttgctgaaagtttgactataacatgtcatgaagaagattctcttgaattgtatctatttggggatttctgaactttttgtatctggatatctaaatctgttgctagacttgggaagttttcagctattatttcattaaataggttttctattcctttggtcctctcttcaccttctggaacactgaaaacttgaatatttgatcactttatggtgtcccttatgctctgttcattctttttatttttttctttatttttgtctgactggattatttcaaaagatctgttttcaagttctgaaggtcttttttctgcttgatataatccattgttgaagctcttgaatgtactttttacttcattcaataaaataaaatccaggatttctgtttggttaccatgatatctctctttggtaaacttttcactcatgtccctaattatttccctgatttcattatattgtttatttgggtcttcttatgtctcactgaacttctctagtatcattattttgaattatttttcaaggatttttataaatttctttctcattgaaatctgttgctggataattagtgtgtttctttgtagatgtcatatttctgggaaaatatttccttaactgttcatgcaattcacaatgtaaaggctgtagatacaacacactttttaaaatttttttttttgagatggagtcttgctctgccgcccgggctggagtgcagtggtgcaatcttggctcactgcaacctccgcctcccgggttcatgccattctcctgcctcagcctcccaagtagctgggactacaggcgcccgccaccatgcccagctaattttttgtatttttagtagagatgggatttcaccgtgttagccaggatggtcttgatctcctgacctcgtgattcgcccgtctcggcttcccaaagtgctgggattacaggtgtgagccaccgtgcccggccacaacacacttttaactttaaaccttattaacatattctccaaaatgccacctccaaatctagagtacacaattaaaaaaaaaataaataaataaataaaaataaatgagtcttttgtttgtagtgcaaactgatttccagggtgtaaatattcccaacatagtggaataaactactaacttttcgcaaattcaaactactaacatggtatgactgagtctggaattgagaattaacatccaacagcacaaaattacatactacccatatagaaaaatcattaaaaattgatgcatttggagtatttattatcttgattttcagtaagttaaaaaatttctaattatacgattggcagtgtttaaaaataggctggaaaaggccaggcaccgtggctcacgcctgtaatcccagcactttgggaggccgaggtgggtggatcatgaggtcaggagttcaagaccagcctggccaagatggtgaaaccctgtctctactaaaaacacgaaaattagctgggcgtggtgggaagtgcctgcaatcccggctattcaggaggctgaggcagagaattgcctgaactggggaggcagaggtcgcagtgagctgagattgcgccactgcactccagcctaggagacagggcgagactctctcaaaaaaaaaaaaaaaaaggctggaaaaatgcctgaaaataggctcactggccagtatgagccagctcccacatatgactgttccaacacaaagccctgcaggtcttcagaattctcagacagagataataatcctgaaggaatgtcaaatatttacctgtatgtgtgtttaatactgttgttattggttcctagctgccttagataggtcattctttgtaacaatgaaataaacatatttcatagagggcctctatagggctaattggaaatctgcctacactgttgagtaatgtttatagttggttactgatttccagaggtcaagagggcaatgtgattcatctgctattacagtttatacttcttgattcttctatttggccactctgcaagaaggcaatcctctaaggatcaccagcttctacctataagacttcaactcaagatgcaggcaagtaaatgatatgtatataatattagactattccatgcagctccaatgttctaattctactaatcaggaataagaaagttcctaatctttgtagttctactgatccatgggt

SEQ ID NO: 38643 - DNA, 2300 bp, Homo sapien
tcattcaggagctcttcattcatctattgttcagggatcacaaaagagccatgataatgataaatgcatattatgcatttcacctctgagagcataaaagcttctggaactctgttccaaaattaaggtgtaatggcagtcatggtactgcacacagtagttgcaattttcattctccatcatcacaaccatcatcttcactaccacttctccaacacacacacacacacacacacacacacacacacaccccatgagagcccacagatagccttacagggtcctacttcaattttctataatgaattaggtttacattctagaaaaatccttcactcttctaaaggtttgttcagtagaatttgggaaaagagtataagttactcttcaatgtatcagaagcatttggaccaggtgactccatcttcaatagaggctgagtaaaataagcctgagactggccgggcgcagtgactcacacctgtaatcccagcactttgggaggccaagtcaggtggatcacctgaggtcaggagtttgagaccagcctggccaacatggtgaaaccccatctctactaaaaatataaaaaattagccagcatggtggcgcatgcctgtaatcccagctactctggaggctgaggcaggagaagtgcttggacccaggaagcagaggttacaatgagccaagatcgcgccattgcactccagcctgggtgacaagagtgaaactccgtctcaaaataaataaataaataaataagactgagacctactgggctgcattcccaggacagcaggtgttcttagtcacaggatgagataggagtaagcacaaggtacaggtcacaaagaccttgctgataaaacaggatgcaataaagaagccgtccaaaacctaccaaaaccaagatggcaatgaaagtgatctttggctgtctcagctgttcattatatgctaattataatatattagcagcctaaaatacactcccactagcaccatgacagtttacaaattccatggccacatccagaagttaccctatatgttctaaaagcaggaggagccctcagttctgggaatcatctgcccctttcctgaacatctcatgaataatccatcccttgtttagcatataatcaagaaataactataactatactcagccaggcagcccatgccactgctctgcctatgaaatagcccttttattcctttacagtcttaataaacttgctttcattttatggattcacctcaaattctttcttgtgcaagatccaagaactctctcttggggtctgtattggaccccctttctggtaacatatgcattacctctcctcaagctcgaggcaaagtcctaaagtttcggataagacccatatgagggaggtgaaggatgaagggattgagggcaaagggactgagaaaaggggagtgtggaagagcaagacagtgctcttgccattacccagcaaaagccaaaaggatccagtactacttgctttctgctgtaagggaattttggaaggcttttaatgatacttacagcagagtgccatgcgtaaagcctatgctaacaatttcacatgcattatcttatttaatcctcataacagttctctaaggttctcttcttatccttatttatcagaagaggaaactgagctttgaaatctcagtactttgactaagttcacacaactaatgagaggcagagctgggatctaggcagtctgactccaggcccatctccttttaacacaacgatataataggggacacccatgctgtcctcttaaatgtccctttgaatccacaaaatagactaagtgaacgaaaccactgcaactcttcttaaaaacatttttaaagacaagaagcttattcgcattttaaatattcctgattgcccagtcctcaatactccaggtttatctatgctgatttcaattcgtcctctaaggttgtagaaacacaggatctgtggttcccgcattaagttcaattccattgcaattgccattttaatcttcccactctagtctggccacaaggtttcctaaactctaaagggagctttgttctggtggagggaggtaaaatccccagacctgaggactcgaaggggcagtcaaggagaggatagctcttctccagagcttaaaggcaaatattttctttttccctggtttctcaccttattgctttgtgtactgagtgaacttatttgtttttgagatccagtaacccatgcaagaaatttcataacacttctcatttagtacttt

SEQ ID NO: 38644 - DNA, 2300 bp, Homo sapien
atttgtggtgatgctggtgtaaagaaacctactatgctgccagtcatatagaagtatagcatgtacaattatgtacagtatataatacttgataatgataataaatagctatgttactggcttatgtatttattatatgtaccttttaaattatttttgagtgtactccttctacttgtattttttaaaaagttaactgtaaaacagcctcaggaaggtctttcagcagatattccagaaaaaggcattgctaccacagaagacagctccatgcatgttactgcccctgaggacctttcagtaacaaaagacatacaggtggaagacagtgatatcacatatcttgattctgtgtaggtctatgctaatatgtgtgtttgtgtcttcatttttagcaaaaaaattaaaacttttaaaaacgggacaaaagcttatcgaataaggatataaagacaaaaactatttgtacacactgtacaatatgtgttttaagctgcgttattacaaaactcaaaaagttttttaaaacttagaagtttaaaaagtaaaaatgttacagaaagctaagggtaatttactattgaaggaagaaaaatatttcttataatagcatagcctaaatgtagtgtttataaagtctacagtagtgtatagtaatatcctaggccttcacactctctcacttactcacccagagcaacttccagtcctgtaagctccattcatggtaagtgttccatacaggtataccattttttatcttttataccacatttttactataccttttctatgcttagatacacaaatacttaccattgtgttacaactgactacagtattcagaaaagtagcatactgaacaggtttgtagactaggagcaatcggctatataccatctagcctaggcctgtagtaggtgataccatctaggtttgtgtaagtgcactctatgatgttcacacaatgacgaaattgcttgatgagacattcctcagaatatatttaataaattgcttaatgaggcattcctcagaataaatccccattgttaagtaatgcattttgctaggtgttatggaaaattccagactgaaaaaactagggtgtcatccctcgaagactgcagtccaggacaagacacacacacatgataataactcttttgaaaggcaaattgtcttaattgctgtgctaaaagtataaactactgtatagagaaagaaaatattaattgcaactaatggctaagaaaagacctcttgaaagacatggggtctgaccaaccccacaagaagctatgaggagagttgcaatccagacaaagggaaggttgactcaacaacccctttccatgggaggaacaggcctcccatgtggccgggcctctggagcttggcaagcgtatgctgtggaatttaagacccatggctgagtggagatcattgggaagactctgggatttagattacagagtttgggagtgtatggatgctttgccccatagtttatcaggattatttcaatcttaaacaaccagggctgtggtttttgaccttctctgtagaaagacacatttgcatgtatatcataaggtatcccgatccctctttcatttgttttatttctttaatctacctaaattaagacctgaaaactcaagatcttccaagttatgagccccataagaacccatggcttccaggcggaggggaaagataccaccttttctataaactgagacaagatggcaaaagaattgcctagaagcctagtccaggtgctgttttctcagctactcaaagagatccttcttgctcctttaggaaagggggattcctagacctctccaaacctcaatcaccctgggatgcacagatgccaagggctcgggtgtaacccttaaaatccccgcttcccgggggtcagcggcaccatcagcagcaccgcagtatagaagttccggtccttccagctgctgggattctcagcttgaactcttccaggaaacaagttcttttccgcttctcttgcgaaatccagcagaccgtcccgcccttctctggcttcttatagcagcgagagccacaagccacagcgctgagctgcaggcgcggcgaaacttccctctacccgcccggcccgcggcgcgcaccgttggcgctggacgcttcctccttggaagcgcctctccctcaggtgggtcacttttcgccacaaggctcccgtcccttatctgcttcagctcacctccagtccctgctgctaggaccccactccccagcccatcgcactgaag

SEQ ID NO: 38645 - DNA, 2300 bp, Homo sapien
aactcaaatagacacaggataatggtctaatgaacaagaatgtcaggatagctaacaagtactttgaataagatataaaacagaatagtgtgtttgaattttatattttgattactcttatccatccttccattttataaaaatatggctgattcgtaaaaataattaagcagtattaggaagtatatttgctcaatgaagaagacatagtacccttgggctgttatttacagaaatgacatcattcatctttctaatccattctaagttgcttatgcgttggtcctcaatgctgtttgctacctacatttatttatccagagtgaaatagtaactatcaactgagccacactatcttcttcaaaaattccactttattcattttttggtcaatatttcacctatttttgaagttttactatttgcaaatacattgttttctttgtataaaatacatctaatgtctatacactagtaatattacttgttctcagcttcaggaaacactttacagctgtaagttgaacaaacactacgttgttaaacatgccattgttgtggtgttaaatacatcaatagaaaggagaagatggatctgttgcatctgctgccactgctctataaatttatttttatttcaaaagttcttaccaacaatttatttaaaataaacaattcctgagatttacattgcactatcccagtttcagtaatttttattctgaaggtttgcaaggaattggcatttttcccttatatactcagaagctttgcaaacactttaaaagactatataaaacctttaaaatgagaagtacatctatgtattttttaaataaaatattaaggatattaagccattgtaatgatgtaaacaaaaagtcaagcttttattgggtagttacaaaagttataattagattcttttttgttccttttttgcttaagaattttatgagttgcctgaataggaaaaattaaattaacagtttttttttccttttaacctgtttctgcttttgtgtcaatgtcaaccgggatgcgaatggggcattgtgggagacaggagaggacaatactggggagaattagcgcattggcggtagcctttcaattccagcgctgaagcaacagactgagaggaggtgaacctttaccttctcccaggcacagacaaggcgaggtgaggcagagatggattgcagaaccgcattaagcaaccgcggggtggaggagagtgcagggtgtctccaaaccctgggagggctatcttctcctttcagagcacatttctgcccaggtctttttattctcagtgcagctcgctccctggtggcttaaattacggtaaacgaaataaggtccgttaaaaaccacttctgagaggggtgattattgggggttttgaaagcacagaggtcttatagagaccaaaaatatgtgcctcgctaagatacagaaaggcttgtaagtgaatcttcataactctgggtacgtgcatgtatatgcacatatacgtatgcatgtctcgtttctataccttatataagttttctgcccaaaactttcctcgtccgtgcgttccctaccacggcgcatctaatctgtctgccctatttgtggctgcacagctcattcttgcaaccggctggggagctgttgcttctgccaacgccgccgtcagccagagcgctgaagaaaagctgaaggccagcaggcaacgaaagagtaaagaaaacgccctcctcctgcccatctcctccaccacagcctccccagtcctcccaggtgactcccaaacagtagaaagttggctcagagatagggcagaagaaccggggggctgggcggctgaggccgggaggtgggagaggcgggtcctgcagccccgagagccccccgcggctgcagcggcagctgtcacctcctggcctcgccccacagcacacctgagcctcctgggcagccccgagcccacagctcccagcagaggcgctaactgccctcctcaagcacaggtcgccgcgtccccaactccctgtcctcaccccggcccgcccgtctcctcctccgccctctcccgactgcagcgggggcagcgctttggcgctcccaaggactccccgccactctccccacaaagcagcggcggtggcggcggctgctgctggatcttcacactgcagccagcagcccaggacgcccccggccggacgatgggtacccgcgcctgagcatcccccgggcaggcgccaggcgcgaaggcagggggcgggaggaaaggggcgggggaattcctg

SEQ ID NO: 38646 - DNA, 2300 bp, Homo sapien
aaatgaagtcaacagaaagttgaggtggaacagtacatcctggggttagccttatcttgagggatagttctcagccatgttagggaagaaattgggctgtcagtaaggaacagtttcatgaagaggaagaatctcacctgtgtataaaagactagtttgagtttgtgcactgaaaaggggctcctgggtagcagtacctcataaattctcctactgactttgatcagtagctgtgttaggtaacaaatcacaccattgcctgtccccatgttctctctggtttaatccatgactggaaattggaaataaataccagaagtcactctggatgtggtgaaggcagaggctttgcctcccagcattctatggagggaaagaaagcagggaggactttgtaaaatgagaatctttttaactttataaagtagatgtatcaaagggcttatggtttcacactcttagctgaatttgtggggtggagaaatctagaaatactgtgggtagagacccttattataatccaaataaagaagtaggactatgaaagaggtagtgtaaatcaagaacccttaaggcatattaaagtgagtaaaaagacttagtaaaaagaatagagttggagtatataacttggatgaaacatgaacaaataataccaaggattttggcctgggaactgagaggaaaaaacatgttaatttagacacaagtggggtatttgtaaagggaaacatgtttaataaggaaaataattgtttaaatgttttcattttaaatttgaaaagacagagttacatccaaggagagaagagttgtgaataagtgactggagataataatttgagaattttctgtgcaaaaataatctagaatgggagctcagttttttcttctttctcaaccccaattaactagttgtgtctaccttgagactcagattgaaaaatatttttagtccacaggtaagctcagaaggaaagccccatgatcaatttccaatttcaaacgtgcaatctagtggcaagagtggctttaaggaccacttacctgccctcacaaaagagacatatagatggtgctgagctaactgggcaaagaagtagagcgagagatccaaccacatcatgagcgcagagcctaagtattttccagagttggatgtgagaaggtattgccgggcaaggcctcatacagagatttagaaagaaatccaagaaagtgcagtatcatagaaaccaggagaggagagaaggccataatgaaggctctggtcaacatggacactttcttccaacaaagctgtaagaagaatgagagtgagataataactagactgggcaatgacatggtttggcaccatggtttacatcttcggaaagattgtattgcttcagggagtgataaagtgaatcacaatgaggaagaatagtccatttttatgtattacacaattaattaattattaagtcacctctctgccttcatttacttggataatttatcattgtattatcattaaaattagatcattagtttggataatacagaactcagggaaaaaattattcttaggtttcattgttaaaaattgaataaacgttttttaaacttgttttaaaattactgtttagaactcatgtggatgcaattttaagagatgcatctcttaagacacaattttaagaggtgcatctcttaaaatcacattaagttaagtaagccaaatcttactatagaactttctcatcatatattcaccattagatagattcagatatgtgttcctgaagtctttagttagtgtctaagtagaacagaggagttctacaaccatactttttatttatcaaacggaaaaaaagaaaggaaaaagatgtccagattctcaccatctgtctgacttacaaatgcacctgactaaaaataaaccattcaggaataagccattcacacttcctctgcagtgactttgaagtgtttgtcgagatacccgtattaagaaacttggcgctctggtcctttaatggtgctgacattctgactcacgtatgcccgagggaaggcagaacacaggacagctgagaacaccagaggactggcagttgggagcctgatggaggacaagtagggcctcgaggacaggtgcgtgacagaagcacaggaaaaaaaagaaaaatggtaagttgacctggaaaaaaaaattgaggagatttgtaagcagagtaagttaaagtagcagaatactttcatgtagcccttacaacaacaaaaacaacaagaaaacaaataaaggggggaga

SEQ ID NO: 38647 - DNA, 2300 bp, Homo sapien
actatatgaatgtttcataacttagtgtttgatactgaggccacttctattttttaacgatataaataatagcacaatgaacattcttataaaaagattaattttttaaatgataaaaatgaccagatttgtactttcaagggctagaccatggtaagagcattttgtatcccaccaggacaccaagtgatgcaaaaggcaattggaaactccagaaaaaacaaactgaccaaaaagaaaaacaatcgctccacttcacttattgttccaaaaaacattaaaacagtcatattttaaaataaggtgctttattttgagtttgcctagccattcaagaatatattcttatcaaccaccgtaaatactttgtattttaaatgcagtattggacagatagaatttattagctgttaaaacttgggcaaataactacatcctgatgcttgattttaaaatttgcatacagttattgcaagaattaagtgagaaaacattttgagcaccaaacacaatgccaggaatgtagaaatgctccttgaaaaaaatctcccaaaacaaaaaatgagcagtagtagcacttactgaatttaactaagtgacaagataaatagtactgtcagttaagtgctttagaccttcagaaaaagcataattaatatgggctggagaaatgggctggggcttggaaggtgacagcattcagatgggcagggagaaaagaatgtaaaagccaagggatggcttttccacatgaataaaggaattcagcggttatgatgtctcaggctgtggacttcacctgaaatgactgagatggaagattttgtgcccgaggaagtgggaaattaaagttgaaaaggtatattgggcaaatattgaaggcattggtgagcaagcctaggacttgatttgtgggccacgaacatttttgtgctgtgttgcatcaggaaaaattaacctggccacaatgagccatgctttagactggtcagttaggatatgggagttcaatttgatccatcatcaaacagatgggaagtaaagcggtgtgggctccagcatgtggcccgtgacagaggacatggaaaatgtcagtggccccagtgcatctgtgacagccgctttggcctcttgtagggctgcgcggtgactgggagctaagcgctcccctcttagttggtcttggctggtgctgaaagcgcttgagcacaccgctcctagggctgatgacttctgaggaaccttattggaaaagcattttgctctaagattcagtaaacgctgtcccgtgccaaggaagtcgcgtcaacctgaggctctgggatcagacccaccggactcacgcgggctctgccacgtgttgcccgcagtctcggcccgttccctccgctttggtaacgggcactgactgtccgatacctcagcgatcgtaggagagcagagacgtccctcatgccgggcgcaccaccggcgggccggcggttccgttggcttccctgacatacttcctacagtcatttctttcagctgagatcttcccctttaatacctcgttaattaacgtgtaaccttttggttaaaatgtcagagctaagactaaatctgaagaaaagaatgaaaccaccgtaagttcttcagactcagtcgtcagcaaggttatggcccgaagccgtgcagaggcggcgcgcggggaagctactggcagagctgtgcgcactgggggtgctgcaggcgctggggagagtgtggagaggctgcgtggagctgcgcgctcggggtgggggctgcactcccaatgaagcgcgtgaagggcaagcggtgatgggttctgcgccagtggggctgggagcgtgtcgggggctgtacgtggggctgcgcgcaaggtgagaactgcgcatctaggcttggggactgcgcgcaccaaaggcttgcaggcgctggggagggtgggggggctgtgcgtggggctgctctcaccggaagctgcacgctcggggaagcgcggaggcgggggtgctgcgcgcttgggagcacgtgggggaacacgcagggactgccggcgcgaatggcttcgaacgcatgcgccccacccgacatttcacagtcgccatgacgaccggtaggtccgcaacggctgcggggacaagaccgttgaggctgccaggcgagtcaggcctttctggacctcgcctgactcggctgggctgtgcctgaaattgacccagctctatcagggattatgaaaaaacaaggagtaagcccgaagccgctgcagtcttcccgccccagccagtctaagc

SEQ ID NO: 38648 - DNA, 2300 bp, Homo sapien
atatctacaaactaattgataaataatctcacacttttaatcattttactttggaacatactctatttattctccacactaaaatattgggcaaaaaaaccttttataagaagtgcagaaataaaattgctaaagtctaattataaaacaaaaatatttggggtttgattttaaatgttttaattagaaaaggaaaagcagttttaagtgcagcttgctatatagccatattcatatgaatatatattattatgttaacacaataataactctttgcccttttcatatggaaaatagattgtgaaaaacagaatgacctttgttctaccaaatgttaaacaataaaagcatatcgttttgtctgaccatttaagacccatgatcacttttaaaactcaacaatgcttagttaaaaagtcttaattctttgtagtctgtgctacacatacaaagattacacagatttcttttctaaaacttttaaattattttctagtttcactagaaacaacaggtgtaagattctatttccaccacaaggtgtcagtccacggtaatttaagcttcaaagggctttaaactaatccaaggaaagtcagtgactacagaaaatacttatattaaaacatgctttgttaaacggatgcttgaaggcggcatgctagttaagagtcatcaccactccctaatctcaagtactcagggacacaaacactgcggaaggccgcagggtcctctgcctaggaaaaccagagaactttgttcacttgtttatctgctgaccttccctccactattgtcctatgaccctgccaaatccccctctgcgagaaacacccaagaatgatcaataaaaaaaaataataataattaaaaaaaaaaaagtaaaaaaaaaaaaaaaaaaaaaaaaaaaacatgaacagtcttcggtgccctagcagtgaataaaaaacaatcatggaaaatgtggttgcgcgtttattttcctttgtgttttctactcagcttagtcctgagaatgttgtataccaaatccccagaattttgcaattcatgtctcagaccctatcttgaggctggttccaacggagagaagtaaatcccctgctcaagttgtctttttctaaaaccttggaatattaacagttaactttactttaggtttggaatacttcattgagctaggatatgggaagctgcacttaaaagctaaggcaaggaagggagggacggagtaaacatggggtttaagggtttttttttcggctggggagcagggtttgtgcgattaaaggtacacaatttgaacaattcagggagcaagtcactctcagaaattcagcttcggattcctcaaactgtcaatcacagccacttcaggaccggctgttaggttttaaataaggtggctgggcgcggtggctcacgcctgtaatctcagcactttgggaggccgaggcgggtggatcacgaggtcaggaattcaggaccagcctggccaagatggtgaaatccccgtctctgctgaaaatacaaaaattagccgggcacagtggcaggcgcctgtaatcccagctactcgggaggctgaggcaggagaatcgcttgaacccggggctggaggttgcagtgagccaagatcgcgccaccgcactccagcctgggcaacagactgagactccgtctcaaaaaaaataaaaataaaataaaaataaataagctaacgtgtgggagggtttgtaagctctaaacggtctatctcaaagtgtgatctgggaatgcttccatatctcatgggaacttgttacaaatgagaatctcagaccccatcccagacatactgaaccggaaactgtgggcggacagcccaacaatcggtgttttaataagcccccgggtaatcttatacacgctaaagtctgagaaccactgctctagagaaatgcacaaacgttccttagtggagattaaacaaaaggcgaggggttggagggcgcgaaacggacctcaggtgcagggcagacggcatttgagaggaaactgggagaggccggagtgcgacttggggagtcttagcctccaaggacgttccggaaccctgcggacgcggggcgccagcaggtggcgctggacgcgcaacggacaaggaggcggggcctgcagctggcttggaggctccgcgctctggaggctcaggcgccgcgtggggcccgcacctctgggcagcagcggcagccgagactcacggtcaagctaaggcgaagagtgggtgagtcccttgaatcgttctcactggccgt

SEQ ID NO: 38649 - DNA, 2300 bp, Homo sapien
aggacaggtaaatatatctgtcttcttcaccactgttcctagagtgccagccagggcatatagaagtggctcaatatttttgaagtgaatgacttgctagagcagcatttaggcaaactagtgcctaaagtcacacattttgggaactaccactctaaagttatttaattgtataataacttcaaaggaaaaaaatgtgttaatgcccctaggccactagagatccatttaataattattgcttcgcttcagttgagtcacttactactttagggaacagaagagatttctcagagagcacctcatgacctggaaaagtcttgcaaaatcattttcatactctgcatctccagctgaaaaacaatgataaaattagttaccatggaagttaaaggaatcatgctttgcattaacaccaacagtcttctggaacacatttggtaacattagatttcccatcaaagatatttgtttattttaatagttcaagcatgaaaaagagatatcccttttggaagctgcaaattgttgactcactgattctcatttaggaaaagggatttcacattactttatctattttctcaatagtcaaagcccatgttaagagagcttttaaacatatttaaaatatatggcttacctacatgttttacatgataatttatggttatagaagttagaaagtgcaatttcttttaatatccccgtggggaagttatataattctatagttttttaaaatatatggaaaagcaatatactttccgttaactgctaagattcatgaattttctccacaagttctccagaggaactactagaaaaaactccacgaatctcattatttgacagttttgttgaagtgaaattattaaaattgatattagatttaatgacttgtttccagtaaccaaaatggaaagtattctaccagctgtcgatggttccacaccctgacacatcgttaaaaccttagcttctgcctaaactttaaaccttaataatatttggcggtaggggaggggttacatttcaagtcaaacaaaggatgtatttccaaagcagcatttacaaaggttaatctgtgtatggactacaaaggggaaagtgcagtgccccagtgatcgatctaagacccccctctcgttgttgttgttgttgggtttttttggtctggttaataaaccacctagagggataatttttaaacttaatttgttgaaatggtactttactaatgtatgaaaaaaatttccccaaatttgagaatttttggtaagttgattttatatttgggaataaagatctcttgcttcttctactgacaccttctacacaaaagataaaaggtacttttacttggtaatccgcagggagaaaatttacagaaacccagagccaaaggtgctctcaggggatcccctgaaacattcaaagccattgcggccccagaaggtaaatggctttcgcaggaacacaggtctcctgactcacggcctaaccttcctttcccccacaccaaagctcgcgcggcaccagctagagtgaaggtcaaagtcaacagaataatctctgcagtccagggtctgtgagggtcctcctatccgagggagttttcatgaaagggcatttccgaacattttattccaaggacacagtctagtcaaaagacgtttgggatagggtaaacatgaggcaaaagaacacttacaaaagaaaaaagcgcagtttcttggaggcttgtcagaagctaagactggggagatgagaaccagggcccttggcgagagttggggtgggaatcgcgtaagaaaagcaatttctagagcggaaaggtgaccccacattacaaaaagaaatggagtagaaaaataggcttgactattctaaagctgcttcagaaagaatctccggaagaccacggaggaaccccgcaggggagccaggcggatactcagccgctcgcggtagaagggcgcgcaaagctgcggagccgcgtgtgtggagctccccagtgcactcactgctggctccccctcggtgctctgggcccttcccagctccctccacacagcccggctcccttcacacacccccgccccctccgagctccccgactcctccccgcgctccacggctcttcccgactccagtcagcgttcctcgggccctcggcgccacgagctgtccgggcacgcagcccctagcggcgcgtcgctgccaagccggcctccgcgcgcctccctccttccttctcccctggctgttcgcgatccagcttgggtaggcggggaagc

SEQ ID NO: 38650 - DNA, 2300 bp, Homo sapien
ccacggctcttcccgactccagtcagcgttcctcgggccctcggcgccacgagctgtccgggcacgcagcccctagcggcgcgtcgctgccaagccggcctccgcgcgcctccctccttccttctcccctggctgttcgcgatccagcttgggtaggcggggaagcagctggagtgcgaccgccgcggcagccaccctgcaaccgccagtcggaggtgcagtccgtaggccctggcccccgggtgggcccttggggagtcggcgccgctcccggggagctgcaaggctcgcccctgcccggcgtggagggcgcggggggcgcggaggtgagcgggtcggggaggagcgcgaaagaaggtagcggcggcggagttgagggtcaagatgcagtctgcgccacgcgctgcatccatcctccccgattctgcgccctcaccgggcgtccgccctgagctgcggggtccctcatctcctggcaccttaaggtggaaagtgagaagggtggagaagggtgtctgttccactgattccccctcctcctcctcttggttcctagagctaagggcaagtcctgaggttgggcccaggagaaagaaggcaaggagacattgtcccaggtaggatgtgtcccagcaggaaaggacaggcaggttactttcgcccccttgatagtctccctgctactttgggttgatgcagggcatttcatggaagatcatgcagtgctgctttgcgaacaggtatttctagcagtcatttggtttatttcccagtaatgtaatcgtggtgtttaggccatttctgttagaaagtaattggcctcttctttgactgtcctaaattatctttgaaccctgtgttcagcctcagccaaaacttgttgaaaattatgccctaaaaatcttgctcttaaaatagagcagagagataaagagcatttttgttggaagatttccatttattatctctcccaccccgtggagaaggattggtgtcagtttttactcctcgggcagttagttttttagatggaaagacagtccaggccatagttaattatcgctcatcagtataggagaaaaagaattcagactcctgccccacccccacccccacccccaacctcctgacttagattctggtccttttaacagccccgctgcttggaaccctttttgttttctaaaccacctccccatccttccttttctccactttattatttcttcattttattgatctgtttattttttctttctttaaccctataatttttttactccgattctctcttggttgcttcaaagcttagaggctatttaatggaaaagcaaaacaaaacaaaacaaaacacccgtcctaaataatttgcaggatgtttagaaacataaagagtaactatgtgtgctgccattgggatggctgcactctctgcctcttagctagtcactctgtcagggtatggggaaatgagacaatattgagaatgacaacttgagcaaattgtgcagtaaggaaatgaaaagctttatccaagtcactttttattgtactggtgctatggaaaatgtggtgaatgaacatagttgtattttagtactgaaaaaacaggacaggtgaagacaaatttttaaagaaaggattgtaaatgagttagaaaagtgagaaagaagatacaccaaaaatgtgaaagagtaagactgcaggcgtgataaaggacataggacatcaggagatgtatttatccctgctgggccagaaaccaggacattgaggtaactgagacattaacataacaataacattgataaatcacctaccccttaagggcccacatgtgttttcagcaaaaagagaaatctgatctagagaattattacatgtctttttgtcctgaatttttttgatgtattccataacaaagaatttttattgcatccttagttacactgccagccaatgtggaggcagtgatcacggacaagacaaacatggttcttccctcgtgcagtttattgtccaatgggggaaatagtaaacagtaaagaaacaattatataaaatattacaaaataaatttaacaagggctgagtgaattattctgctatagagatggaacagtatatggaaagctcccaaggtacataaagtggttgttgttttctctttctagaagagaatgctgtgggtggacaatatacagataaggttagagaggggaagcggggactaactcattcaggaccttttacgtgatagtcaggaagatggctgtagttctaagtacaaggagcaccga

SEQ ID NO: 38651 - DNA, 2300 bp, Homo sapien
acaaaacttggtctcttcggctaggatttacaatcaaatgctgccagtcctaatctagtgttaccatttttcttttagggccagaaatattcaacgtctgaggcagaaggaaccttcaaaatcacttatcaacctcattctagaaatgaggagagaagctctgagaagtgaagtaatatttattttcattgaatttatatgtaattttaaattcataaattctatggaagatacaaaaatgcacgtttaaatcttgaataatttttgaaagtttaaaaaacagattaaaagagttagagttttttaaattttcagttatggtgtttgagttattaaattatactgatgatcatcatgagaagctttccattatagtcttgacccttcttgtattattattcagtctacaatggataggcaacaacatgtcaactgaaaaatcataagatctataaatttagaaaggagactttgtttcttataatgagttacaacctgcaggctggccattctgcaggctgggaagcccaggctcccacagagacagtcaacaggcactttgaaggaggtggggttggagcagaagctttatgctgaatgagttggctaaacagacatattcaacagattgtaagaagagctgtgaatcttcactaagaggggtgctgaataaacatgcatgtgacatgcatcccatgctcactgtggagtggaaacttaacatttaaatgcattacagtccctatacatcaaaaggagaagcagagacatgaatgtactagtgctcagtctctgtaaacctgccagaaccagtccatagtgggtggtcttttatcaggggaaagttactgaatcggtcccttgtccaatcaaacctgcagttatgacttgtggaacaggagggtcttgttagtcaacatctggccatggatgagctgcaattatttcaatattgcttatgtcgagggcagttcttatttaacagctagagaaaaataaaaacattgcagcagttaaaacaaaggttattctttaagtgtaggtgtgagtgacttaactcttgcctggcatggccttaggtcttgcttataatttgttattgccacagagtccattctgttagccttctgatctccattttaacattaatgctggtcagttgttgagtctaagccctcaaagggagggggagccgagcttggtggcatgtgcacctgtactcccagctattcccgaggctgaagcgggaggatcgtttgagccagaggttggaggttgcagagctacgatcctgccactgcactccagcctgggggacacagtgagaccctgtctcaaaaaaccaggggtgagggggacgtgaaaagggaggaggtaggggggtatagcgaggcgtgtccgtccttccgtcccgtcagggcgaggaattcagcttttaaggtttatcgggggtcctcttggccaaaagggggtccgttcagtcggttgtggggcttaggatttaatttttagttctcaaacagtaataaagataatgataatcttgaccatacgggatgctgtgccaagcaccacttaacaaacactgtcatctcattcaatcctcacaacagtcctattttacagatgagaaaagtgagacttcaagggataactcgctctagattcaataaactgactcaaaagccttttaacattctgtacaataccttttatgtttgtttatttaactgtccagttgggccactaaagtacagataaaagctggggaatgtaagcgagactggtcacttccctggggtgagagaaacgctttcaacactatccgtccatcgtatcacgcctaacgtatcccatagacatccctcacccctccacccactcatgcctgtttgaagcaagactatgaagaccgaaacacaccgggagcctaaggcaccactccccgctacctaccgaggtgcatcctgcaggctccttaccgcaagcctgcaaactcgccctgccgggcgcggagtgcaattaggctttggggtggtttggctctccggctttccgtagcctctggccccgccccctagcaacgcgctggcttgtgttaacaaccggcccgggatcagaggtctgggtcaactggggggcggcagcggcgctaagcggactgtatggcggtggcctaggcccctggcggaattttgggacctttcgcgactctagcgactctcaggctgccttcccttctcggtggcggggcctctttgggcccagcggctgcgggcgcactgtaggacaggaagatc

SEQ ID NO: 38652 - DNA, 2300 bp, Homo sapien
actgatttaatgctggagaaaattattaacctctgtgatgccaatctcaaactcttatgaacctgctttttcatcacacaaacctaatgtctttaatcacttttactctctatgaatttatcttaatactttgtttcctgcataacagcgtgatataatttgaaaaatattggaactgaatttcacttctggcttatcacctactagctatgtggccttagaaaaattacctcgtctatctgtggttcatttcctcctcctgtaaaggaaagattataatgcttcagctctgctcacaggtctatcgtgaagttgctatgaaggctttttaaactataaagtgacagtaaatgtattattaacaattctgtttagttagttactgcattaagtgaaatttccatttaatctaaaactctaccaagctccaaggattactatgaaaaagaagtaggaattcagtctatcaacttcactaccaataatagaaagatggggtagtctagcagtaaaggctttagtcagacagaatctcagtgctaccgctttctagctatgtggcattaaatgggttgtttgatttctctaaatcccaggtagctcaacttcaacatggggataacacctacctcgagattattatgagcatttaactgagctgaacattttcttagtaatgcaactttaaggaatatatatattttcaaatgctcaggaaaagaaaagttgtctttataattataactttattatttgtgacaaaaaaatacatactgtgtagaacctaaatgtattttccaaaatgcaaatggaaaatcatttggaaaattattccataaagtatggtttattattccaatacagtattatataaatattaaaattagacctataaagataataaaatttatactacagtttataagtcaattctaattaattgaacaacactttataggcaacagagccaagtagcacagattatggtgaggagcttcttaaaacactttgtgagcggtgaaatcaacaatttttatgtgtcacataatttgtggtccagtaatattactagtaatgataatgaatatgtacactatcatttgcaatacacaggggtgttttttgaaacattatatacttaattctagcaagaatgttagaactagtagttattcctgttttctcaactctaaatcttgcattcttttcacatggactagtaaggaactagaaaaattaattgtttttgttaaaatctttatagaataatgccaaattaaaagaaaattaaatatagcatatggtgttttattctcttgtgaatcataaatatgtatccatcagaatcagctgtattaattctgttgtcataatagctatgcattttaatctcatttttattaaaatgatgggttcaataaaattttaaaatactaggcatgtaatgaaacatggcttgtgacctaactgacatttatttggtagaatgtttatgtaagtactgttgcatgtggttaaatattcactgtagtcattacctcagacaaaattcttttttatggtacacaactgagtctgtgagatatttccttttaaaaaaagagtgaggaaagagatgtcagcacttgccccaaaatattctatgttttattgtacgttaaagtaaaatacgttatacgttttattatacgttttattatacgttaaaatatcctatggttttattataagcaggaactacattacatatatgagcagcaaaaacaaaaaattaatacatattttatattattgtcagggagtacatacctcagaaaagaggattataacttatttaatttttggtgttttttttttggtacctatcatagattggggttattttataaaggaattattttgaaataatccccaataaaacatcaaaatgtaaatttttatttaattgccttaaagtatttttggctatgtttctaacaaagtatcctttgttctttctcacagctattaattgatggcaaagttattttggctttgtttacctatgttaagaagcctgagaagcaaaaaataattgactggtctgcagcacagcatgaagaattacaactgcatgcaattgccactttgtcatcagtggctcctttattaatagaagaatacatgtcatgccagggaaatgctcgagtccttgcatttctagaatggtgtgagagtgaaggtgagtggcccttcaagattcttgtcaaaattctaatcttcatatttcaactgaatgctcagtatatgcatagaaataa

SEQ ID NO: 38653 - DNA, 2300 bp, Homo sapien
ggaaaacatcaacatgtaatatcagaagagttgtcatcagtttctttggaaaggctaccaattttactaagtgaaattgtaaaacatagtacatcagttaggactctgttggttgcatgtgaactattctaactagtttaagtcagaaaaaaaatttcttacaggctctatacctatcaaatctaggaggaatttagactacaggcattgctgaatctaaggactaaaactatatgagtaggatcttctccttccctagcagctcctggcttacattctcttaggttcatgcctgtgtctctgtggtttctgcagctgcctatgcatctcaggacccctgattgcccacatgcctacggtagtcctgagccattcaccatgactttggccatggctgagtactgcctattcctggagccagaagcagggcaactccatccaaaacatatggatagagtggggaatcagggtactattatcagaagcaagtatatatgaatattgggcagcaagataaacaataactctgcaacaagtatgttggtcaaaataaaattatgttttctctgctataaaagcaaatgttagtcatgagccaaatggtaaaaaagaaaaaaaaatgcagctggttttactcttaatatataaatatacaaagcaaactctaatgctacttctcttctttaatggggaagggaaaggtgtaatgggggaagtgttttccctcatttggtagtagaggtatcttgtcaaagaataggagataaatgcctttatgctggacatagagcaaatctgtgtccctggatgcccttatgaagtctccctctcctgccttcattcccttcacacccctcctccagcctggaagccacaaaggacatgagttcatgtccaggaatcagagagacaaggacctgtttcttaggaaaataaactggaatttgagtctagattctgggcccatggggcacactcagcagtgtactggtaaatggataactagctttccaggagggaaaagccctgatttacatcatgttctcaccaattcacacagtataaatactgccactattaccaatctcaagctaccaacatgatgccattgaatacatggttgggaaaacatagataggttctttcattattagataagagcaggctctatcacctcaatgtacccacattttcctccttcttctttcctcctcctcctcttcctcctcttcccccaactcacattcctctagggattttccattatcctgtctgtgaagacagtagcatcttcattgagaggtaggggttgcagctcttgtcattgttctaattagaatgagttgccagttcaccttagattggcggcttctcaccctggcccagatgcccatcctcttgtgccccataggagtagataacatgcatcagcttatcagtgagctttgttctctcctgaatccctttctctagtctaccaccttcaagaagatattagaaggcataatttgtttctttccttcacagggaaccctaagcatgggtaggagcatacaacgagatgcccatacaaaaaataccagatacatcttaggtacacttgaattgatgtgaagtgtccatggctaacaatgaatctttgctccattttgtagactataagctctctaagaacaaggtagagaccatatctcattaattattgtacttagtatctccggaaataaattattagataatgtgatggtggcctcagctactggcagtctttcccttgagctctgcaaatgcagcaaagtactgagctcaaagggaagattcagccaacaaaatactacacaagtaatgctcaacacagacaacatgttagtttaaatgtatttacttcataacatgatagattttctccaaaatggtgaggcataaatactactacatgaatataaccaaggtgtggaaatagtattacttgcttgagtatcatttttgtatgtagtacaactaaatgtctcagattgattaggactgtaatctagacaatttctgatgtctgtgaacctttcttcttccatgtattttgcccatcagcaagaagaaaggtaaaacagggcagattattatgtagcagctatttaatagacaaataagtgtaagttgatggaaagcagtaatgttccttaatacagacacttgcacttggtagacagattcacccaagtttgcatattataattccagccaccacacagtgagtgagtgactctttctcacaatatcactaactctaagtctctgtctct

SEQ ID NO: 38654 - DNA, 2300 bp, Homo sapien
gtgctctttattttttgccgctgaagacctgattttccatctggttgtatttctcttcaacctgaagaacttctttggtatttcttatagtacgtgttcactggctacatatacttttagttttctttatctggaaatgtattttacttcaccatcattcttttagaattattttcactggatatagaatttaatgtagttttgagttttgttttattctttaaagatgttgttccactgtcttctggtctccattatttttctgatgagaagacatcaatcattcaaatcacaattcccttatatgtaatgtgtcatttttctctgacagctttcaaaatatctttagttttctgcaacttgctgacaatgtgccaggtgtgtgcaatgcaattctgacattacctagagtgaggtcaaatttcacaagttaagggtacagtcttccataagagctcccttattttgttataggtagttaggcatgagtggggcacgtgagggctctcccccagccactaggaatgtcaggtgatggttcagcaattatcacattgactctctaaaagtgacaaattggtagccagtgcaagggagaggccatttcctgatgatccacagctactgcactgaagtgtccactgaatatagatgccagagagaaggaacttactgagcatgcacattaagacacaaaatggcagagtatgaccttccaagggcacagcaccagaaaagggaaaaaagcctcagatgggcatgtgtacaactaaacacaccacgcacgctcacttcccaagcacaaggagtgcactgcacatgcaggcagcccactctaagggaagaatcatgggaaaggggccagcctataaagtcctaggatcaaggtaaagcactgcacttgttcttcaagttgcctgattggatctcttccaagtgtactttcctttctttcctgttctaatgccttcttaataaacttccactcctgctctgaaacttgcctaagtctcttttttttctgctttatgcccctccatcaaattctttattctgaggaggcaagaactgatgttgctgcagacctgtacagattcatcgctggtaactcagatactgagaggtgacagcatgctggcagcccttgcagccctcgctggttcttggcgcctcctcggcctcggcacccactctggccgtgcttgaggagcccttcagccccccgccgcactgtgggagccccttcctgggatgggcgaggccggaggcagctccctcagcctgcggggaggtgtggagggagaggcacgggcgggaaccggggctgcgcgccgcgcttgctggccagctagagttctgggtgggcgtgggcttggcgggcccgcactcggagcagccagccggccccgcaggcccggggcagtgagggtaattaggatccgggccagcagctgcggagggtgcgcggggtcccccaccagtgccggccctgtggcgctacactcgatttctcgccgggccttagccgcctccccacggggcagggctcgggacctgcagcctgggcaccctcccccccacctgtgggctcctgcgcagaccgagcctcccgaccagcgccgccccctgctccacggtgcccagtcccatcaaccgcccaagggctgagaagtgcgggcacacggggcaggactggcaggcggctcccgctgggaccctagtgcgggatccactgggtgaagccagctgggcccctgagtctactggggacttggagaacctttatgtctagctaacggattgtaaatacaccgatcagcactctgtgtctagctcaaggtttgtaaatacaccaatcagcactctgtatctagctaatctagtgaggacatggagaacttttgtgtctagctcagggattgtaaatgcaccaatcagcaccctgtcaaaacagaccaatcaggtctctgtaaaacagaccaatcagctctctgtaaaatgaaccaatcagcaggatgtgggtggggccagataagagaataaaagcaggcttccccagccagcaggggcaataggctcaggttctcttccttgctgtggaagttttgttcttttgctctttgcaaaagctcttgctactgctcattctttgggttcatactgcctttatgagcagtaacactgatcacgaaggtctgtagcttcactgctgaagccagcaagaccacaaacccactgggaggaatgaacaactccagacctgctgccttaggagttctaatgctcaccgtggaggtttg

SEQ ID NO: 38655 - DNA, 2300 bp, Homo sapien
gtgatccacccgcctcggcctcccaaaatgctgggattacaggcgtgagccactgcgcctggcctgttttaaaatatttttaaaaccaaattgtgagtcatgtcgatggcttatttgggactttattcaagactctttagtgccactgactttaatggtttgcccatacatcaaactgagcaaccctaaggaggcattctttcctcttcatggcagaagtagtagtattttccaacaatgacttctgccttaggtctgaatagtgtcctaaacattttgcctcatgttcattttagctgcacattttaaaggggacagtttccagttacacaatgtttcttttactatctggtaatgagagttataataaatacttcaggccctgaccacattttgtcagaggtaaatattatgctttcttttttgtttacagtacacaatgatcctcatcattttgagatatttctatatcaatctcccatttttttttttttagttgctgtgatcatttccccatgtatatgttatgtgaaagaaaagtatttgagattgtgttcactaacaagaaataggcattggaaaataagtacattgggctcaacactattctgacacaataggaaaacctagtaagatagtaatcttaatggcagcaaatgtcattaaattaaaaacatctacacagcaacaacctaatgttcatattaatgagaggtaggaacactgatagtaatcaacatctgttgctggtgttaatattcaacattaaagtaatccacagagggaaaatacaactactgcaggttaaatgacaactacagcttttctgattggtggttgtaagcagaaggtccagtagcagcaaagtaatcaagacggggttttcacatcatgtctttccaaataatcactgtcctaagtgaggagtagaagacactgtcacattgaggtattagtcagttttcacagtgccataaagaactgcgcagactgggtaatttataaaggaaagaggcttaattgattcacagttctacatggctggggaggccttagaaaacttataatcatggcaaaaggggaagcggaaacaagcaccttcttcacatggcaagcaggagagagaagaaagaaggaggaacttccaaacacttataaaaccgtcagctcttgtgggaactccctatcaggagagcggcaggagagaaacagccctgcatgatccaatcacttccctacttccacaatggggattacaaatgaagatgagatttgggtggcgacacagagccatatcgtatcaaagtatgaaaggtttctaggatttattagtttgggttgttaagagttatacggctggcaacgctgtgcagggccgtttacttcagctgcatacattttttcgctgcatgaggggttggggagagctactctcttctggtcctgaaaagtaatcaagagagagagggatttttcacatcgtgtcttaattctcacaaaggcacgcttcaaatgacggataaaaacccgtcttcccgactccaagaagctactttctgacagttgtaaacaagcttctttctcttactgcacaggagagtcctcttacagatctcagatcctgacattattttcaataaaactttgtgcggccgctagttttaaattcatggtctcctggaagctttggctggagactactcagctcgtcactgaactaacggcttttgggggttcttttttcccagttgagtttctgtgtcttttacacgtttggttttatggtccgttggaggttttttcacgctgagggtgaagattcttagtttcctcaattagcataaaagctgctccaaggctgctgagtcttcagttccattccattcaaaatgttaattcctgagacacgcaacctacgccctactgtcctttgtcccacggcttctcgagattatctctgtgttttaatagataaaacgccttctctccccacccgtggggtgcaaagcacagcgcatggggctggtggcgcccgagagcatcacacaacgcatgcgccagtccgcaggtgtgggcggaggagaaatcgcgtcggcggcaggggatgacgtaaaaaggccgcgctgtactgcggcttgtgccgcttccgcaagaaggtttcctggcctgttgcagccatggtgcattgcagttgcgtgttgttcagaaaggtccgtgcgggtcccctcagcctggtccccttagcgctgacagctctggttcttctttgctcccctgtctctccactactgtcttcgtgg

SEQ ID NO: 38656 - DNA, 2300 bp, Homo sapien
caccttttggcatagctgctgcagtggcttcatgaatttttgtctttttttacactgattcttattctggattcatttatcttgagatagcaggccatcgcagctacagattttaatctgtggtagatatcaagcaattcatctttttatcgtagtgtcatgactttacttcttgggagcactgccagcatcactagtggcactttgtatgggttccatggtggtgttcaaggtttacagtgtagcgctgaacatgatgaaaaatgcaagagaactgtgagagattactttttactgacttataaaatgtactggcaagatgaactgctcatggggagacgattagcatcacatggccttttaagtggcaacttgggacacttgagatcccgggatagttacaggaggtaactacgaaattattacagtattccacgatgtactacagttaattttatgcagttatgatttaatactgcatttttacatttgcttacatttctcttgactgcaaatgctgccatgtaagatctgtaagtgtgtgtgtaagttttgataaattttaagtttttataatagatgtgtggccaggtgcagtagctcatgcctgtaattccagcactttgggaggccaaggcaagaggattgtttgtggccaggagtttgagaccagcctgggcaacatagcaaaaccccatctctagtttttaaaaattaagatagatatgtgtatattttatggaagtaaatgacaaaatagattagcatctatatattttttgcactcataacacacagcttttcttaattttttcaatatttccaatctatttgctttgtaagttttttcaaattgttgcaaagctcaaaaaatttttctaatatatttattgaaaaatatctgtatataagtggacacacgcagctcaaaccagtgttgttcaagggtcaactgtagtactaagaattttttactttatttcataagcatttttttttttgagacggagtctcgctctgtcgcccaggctagagtgcagtggcttgatctcggcccactgcaagctctgcctcccaggttcatgccattctcctgcctcagcctgcagagtagctgggactacaggcgcccgccaccacgcctggctagtttttttgtatttttagtagagacagggtttctccatgttagccaggatggtctcgatctcctgaactcgtgatccgcccaccttggcctcccagagtgctgggattacaggcatgagccactgcacttggctcataagcatttttttaatgcatggtttttgagtaaaggagaaacatgattagagatcagatcaatttcagaaaaatagttcaggcaacaagttggagaatgcaataaggaaaaaatgcctaaacactgaaaggagctcatgtggtgcaggtactagggcagtggtactggagagaagagagtagggctttgggaaaagaagcaggtgtagtctgaaagacttccatttgtgtagtctcaatgaatatgtaaaccatggttctgttactttagagaacattggaggaacagattttacctggggaagagtttggttttgttatgttaacatttatttttgaggtggctattattcaactgatatgtaagaacaagtttcatattggggaatttcaaatataagttaaatacacattctgctcacatttgctttatactattaaaagctttcatcctggtggaaatgtctgacagattggacatagaaaatatctcacctaggtgatggttattggtacaagcagaaattacccaggggagaaagtctagaatgaaaacagggccaagtcagaaaccctcaggataggtgggacaataattgataactgaaaaaactaaaagggacttaagagagataatcaaatgggaaagggggtcagatcggagatgtggaggtgagctaagaaaatgttatagaattggcatgtgaaaagctattaacgacttttttagaagaagttttagtggaagaaagaactagaaaaaggttctaaggtgatacacttttggtatacaaatattctttctcttttttttttaagtatggaaatttcatcgataagctaagactcttcaccaggggaggatccggtggaatgggttatcctcgtttaggtggagaaggtggaaaaggtggtgatgtctgggttgtagcccagaacagaatgactttaaaacaacttaaagacaggtatcctcggaaacggtttgtggctggagtaggagcaaacagcaagta

SEQ ID NO: 38657 - DNA, 2300 bp, Homo sapien
atatgatcatatctacttctaaacactatgaacatctatcacacattagtaaaaaaggggaaaaacccctgctgacatcctgattttagcacagtgagacctgtgtcagatttttgacctccagaattgtaagataataaatttattgtgttttaagcctttgaatttgtggtaatttgtcacagcagcaatagaaatctaacacagtgaccaaatgggaatctctgtagaattttggtggtgaatggtacactgcagtgaatttaagatttgactttctccttgaagaatctctaatgagaaaaagaggaaagacaggattgttaattgcagatctaaattcttatctaaagtatttttgagaattatattccaattatctaactattgaactccaacagggtatttaagtattctgttccatctttgctatgccagaggcaggcattttagaccccagcttgaacagtaagtctaggaatagggttgtctttccttcctttttgtgctgtgattttttaaaattattgtaatcaattgcaagtacctcccagctaaagtcctctaatcaggcagtattcatcagtgattgggaaataagttataagatgattttgtacatagttatttgattcaattcagctttatagatgagagaactgaagttcagaggaaataagtgattatcgtttgtcacattgctattatccatctgctattgccagagctggcctggagcccagaaatcttttcaccacccaatgctatctttcttcctcattattacatttcccagtctggctttgggatcggattgcttctggccttagataaccttatccatcctctaaagcagtatcacacataagaaggaggtagcagtggactgatagtagcctctctaccctccctttttaaaaagtctctgacaaatagtctcattgttactagagcaacgcaaaatggaaaatgctaatagcaaacatatagtccttattatgcgtcagatactgttgtaactgtctctgtagtaattcatttaatcctcatcacaattttctgatgtagatatactgttacagatgagaccttgaggcacaaaggggttaccttacttgccaaggttatacttacttgggatgggtgccatccttttgtataaactatgatactttttcttctttttattttgaaaaatttctaagatacagagaatttgaaagaatagtacaagagacacccacaaacatattcttcatgaatccaacaattatacactttgccacactttatatccatttgtgtgtgtgtatgtgtgtgtgtatgtgtgatcatttcgaagtagtaggcatcacaacacttcagcatcctttattttttaaaaaatcagatcattgctatttaggactttggaatcttttagtttaattcagatattcattcactaatgcaggacttcacattggagagaagccaacagagaaagggacaggacagtagaaattgtgtgggagagtaaaattagttcaaatatctaatagctagctatactgtactttagctatattaggtccctcagttttcaagacaacagtatgatgtgggtgatcttatccccatttttccagataacctccagatgtagagataactttcccagggccacccaatcaatacacagcaaagccccatacaaatctgggctgtttggttctagactttgagctctttttctactttttgcctagataaacactttgaggggaaaaaaaatccagatttaagaatttttgctaaccttcctacgggcaagtcaccttcaagtcacctgggtacttaggtatccaactcaaaactacttttagttttgtttcgttttgccttttttttttctttaaccgataacccaattctagacggaacataaggtgcaagagaaatccggggaggtggaggcagagaaagggaagggcaggaggtggtcgcaggatgttgcctgcggctggcggcccagtggattctgggaattgtagtcccagccatccagggcattgccgttcagggccacgggaaaacctgactgcgctcccagaagcctccggtgtacctcgctgggaacgcacttcctgggacgctgagagggagacgctccaagaggctcctcagtgtgggcgagtaaaatgccctgcgtgtgagaagcaggtaggtgtggtcaagatgttccgatttctgggtcttttgcataagtaactgaggattttatgtaaaatggctaaatccaggagaatcaggagcgttgg

SEQ ID NO: 38658 - DNA, 2300 bp, Homo sapien
gaaaacctgactgcgctcccagaagcctccggtgtacctcgctgggaacgcacttcctgggacgctgagagggagacgctccaagaggctcctcagtgtgggcgagtaaaatgccctgcgtgtgagaagcaggtaggtgtggtcaagatgttccgatttctgggtcttttgcataagtaactgaggattttatgtaaaatggctaaatccaggagaatcaggagcgttggaaaacgctgaccacatctgtggatgtgaaaattgagtaggtatttggtaaggctttaaaaaattattttgtacacaggagtatggaaatgtcgaggtgtgttgccggagccgccaaggactgggagctttgctggcgcgggtttgtgggggagcccaagctgctatttttgaataaccagctgatgctggttgcgtaatgatgacctgcttgcggttcaaacccactcagtgttgcagggatgggctagctctgagagcgttaacagtcactgttgcggtctctctccattggctctaactagtagggcgttttcttccttctgccaggtctgggtctaccacacacagggctcttcgaaaagagggaggaggagaggaggcggaggggggaggaggggggcggagggggatgcggattgctctggaagcttggtttgctttcctgtaagttctgtgcacccggccttgtaaggggcccatagccacgttagggaaaggtcagacttggtgacctcacttaaaatgattgctcaaggattctattgtgcgttattaattgtaaaacgatttcctctgactttggagtgtgcaattatgattgataccaacccaagaaacacatttggggcgggggaggggttgggggggacttgactgaaatctccgagcagccagttgcagagagcattctacataatgatcgtaatagggctagtgatgaacgcctcaatccaggaaactctcaggcgcacataataatgagtttccattctcatcctacctgtttgagataaatggtatttgaagaggaagtggctaatgtttaaagtagatatatagaagcatctttaagtatcaggttgagccattggtggaactattttttttttaagcattctggttgcaaatttcaggatgcagaattcagatcaactttgtctggtcttgttgtcagtgtccttttttaaaaatgtaaaagaaaatttcttttacttccaagacaactgcacagtctttcaccaccttccttatcctttcaccgtagtcatgaaaatgatctaaaacattcattaaatatcaatcatatattcccaagacagcaaagtgtttttcatcctcatttctcctatattctcaagtcacaagatgagttaatttttttcttctatttctacgtatttttctatattctatatatttctcatatataatgcatgaattaaggaataaacagcctttttatttttttttttttattatttgagacagatcattgctatgtcatccaggctggagtgcagtggcatgatcatgactcactgtgtcctcaaactcctgggctcaagtgatccttccatgtcagcctcccaagaaactgggacaacacgtgtgcaccatcacacctggctaattattattattattattttttgagccagaatctctctctgtcaccaacactggagtgcagtggtgcaatctcagctcacggtaacctccacctcccaggttcaagcggttcttgtgccttaacctcccacatggctgggactataggcatgagccaccatgcccagctaatttttgtatttttaggagagatggggttttgccatgttggccaggctggtcttgaactcgggctcaagtgatcatcccgcctcagcttcccaaagtgttgggattacaggtgtaagccactgtgcccctgctaaactgcctttttaaaaaacttactgtctgccctttttagtataacatttcattggttttaggtgattactaatcatttcttctaatccatgggaattcaagcagggtttttagagaagtactatgttaatttggagtatttttcctatttctttaggctcagattattgctactctgtattcagatcttcatgtgtctcttctaagctgaataaagctgttttggaactgtcaggtacctcaaagcgtaagtacgtcctttaattatatcttatttccctccctcctgctaccacatctgccaacaatgactctttttttttctcttgttcaacaaaatagaggtataggacaga

SEQ ID NO: 38659 - DNA, 2300 bp, Homo sapien
cacccgtagtcccagctatttaggaggctgaggtgggaggatggcttgagcccaggagagaaggttgcagtcagccgagatggcgccactgcactccagcctgggcgacaggccctgtctcggaaaaaaaaaaaaaaatactgcgaaggtaaaataaacatatatttaacatattatatatttgaaacagccattgtcacagtggataacagtcacaggtgtataatagtgaaagttcgttaaattaatatttcttcgtgtttgttgactcgtacaacccattagtgttttgattggttgcatttgtcttttcattcataactgctgaaaactttctccctaactaacctgaggaagtggtaaaagtcaaacttttttccggtatgaggccacccttggtgctgtctgtaattatctagacatggcagccaggatccaacagctttgcgttttaactcatatggtctttcctggcgaattccttgcccccctctgctccccacttagcttgacttcctgtcttttatcatccgcaatctatcaagatcctacaatgtgctcagtgtagggcggaacaaatcactgttttacctcacaatttaaggaaggcagggggctagtttttaagataaaaatcttttaacaaaacataaactccccaaaatttcctacaagccaaacagcattgtcacaccctcacaagctcttattacttacacagccaaatgactcaagattactaacgtttctattcataaggagtttgctggcctcagatcaacacaatcaagccctcccccaccttccttctctctcccctgggagactgacgtttggaactcacgccgcaccaggttttttcagaatgaagacgatgtgtgttcgctgctggaactgtttgtcctgggattttataaacacctcccccactcctttttaaagttctgtttttgaggtgggggaaaaggaggtcggaatctgtttagcctttaaatctcccaattcagaaatatattctaagaatttaatagaaaaagaccaagggctgtgtctgctatttactgcagaactgggtattcctatcagaaatcacctacatgtgtcaccaagatcagagacaaggatgagggaaacagcatgatccctgccttctggagggttacagttgaagcttccgctgcttctgcacttgacctcaaaacaaacaaaaaacccaccgcaaacaacaacaaaaaaatccaggcccacctttccccttggatctttcacttgacagctttctcggcccaaaataaggcaccctacatctgaatgcatccctaaggccttaccgcacccagtccaggaggcagtcctggcagctgccctccaccgaactccgcgctttttcacacacgctcgtggaaggagaaaaccgctcaaacaactggactcggcccgtttcctttcggtaacctccccacagcccaacacgctgtccccagacgctgcccgctcccaccccggtcccttcgtgatcctcccgcgcgcgggcggggcgggggaggagcgcgggggcggccgggaggggcgcggccgggagggggcgccgccggggcgcgagccagacacagagggccgcggaggacgcgggaggcgagcggggagccgaggtcgtgctaggatcccgcgcccaggggccttcgtcgagggaggggcgtggcggcggcagcaggagggcagcaggagctgtcaggctggcggttccgcgccgcggctccttctgcgctgcgcccgcaactctgggctgagaacttctcccgccggcccactcgccctcgccccgcgcactcggcgccaggcgactcccgcaccttgtacccggcccgccccgcctcctccttcggccgcaccactccccctgccggccgcgcttctctccgttacaaaggagggaaaatgagccgggcggcggcggcgcggcgcggggccaccacggcggcggcgagcgcggccgcccccggcaccacgtaaaccgcccccgcccgcccagctgcggcccaggccggagcggagcctgccgtcctccgcctgcctgctgctcgcctccctagacctgcgcgtcgcttcccggcccgccgaggaggtggtggaggaggaggcgccgctttccccgcggcgcgcgccctcgccgttgtctgagctgtgcctggaccagtttggggaagttgtcggggctccgcgtcgcccagatgtgtgacctcattgagccgcagccggccgagaagatcggcaagatgaagaagttgcggagaactttg

SEQ ID NO: 38660 - DNA, 2300 bp, Homo sapien
ctttccatagacttcatgtccagtcactcagcaggtaacccatggtgaatgcctcttacctctgttgtttttccacccacattttcatggctttagttcagggccttgtctgaaacactagcttagcttcccaagtggcctccccacttcccttccttcacctctccaatccatttctacaccattaccctgtcgtaagatgaaaaatctcatccagccactcttctgcctctagtcctgtagggcttttctattggataaaatggcaacttcatataggataaaattcccaactttttagcatggcttacagggccctttctgccctggcattgagccacctttcttctgagccttcgcagtggtgaccactgtgagtatggcttggttatttcctcatacagcttccagtttcaggcttcatgctattccccaaatgtccttcttctcctgggtagtactggaagcttcagctttacgttacctcctctgtgaagtctttttttgagccacctaaggaatattatttatactgaatagagcactctcaaaatactcatttcagtgtattataatcacttgctttatttctaatcacttaaggcattcattgaatgcagagcacatggctcttcacattgctaggcacattagcacgtttgctgaatgaatagatgaaagattaaaggagaaatgttactgtgtttgttggtttttatacaagatatcttagtgaacacaaacattgtacgaatgttaggggaaaggggattgcctaagaagaacctttagccctaaaatttggagttgggaaattcattaattttttaaatgttaatttaatatttgctagatgcctagcattgtattatgtggtatttaagtaaattttgaaaaatgcaattggcgtgatttatcaagggccttaaaatggggaaaatgccaacagtacaagagagttttatgaggtggtgtatgattaaatcttgaatgactcaaataagaagtgctgttggttctggaaaaggtgtctttgtgggctggagggataaccaatcacaaaaaagtcaggttcttgaaagacctgttgaagtctattctgcaaaaatgatgctcatataattcaatagttttcagatattaaggagatagctttctcttttgactttgttgaagatgaaagtatgtaatatttgtatttgaacaataactttttaaaaagattttacatgagcttttgtgttgtaagaaaacaaagttgaattatcttcacagtgtcattcaaaatgatgaaggtgaagatagtttgcaagtgggagaaagaagagatgattcatttaaaccaattaggatgtgaagggaaaacactttgcctgaggtttctcatcatcattgtataccctagtttggggagctttgggaatatcgaccacttatcattgacacagtagttaccgcctcttgtaatttttaaaatacgtgaatatttacaaggttagatttcatgccttttttatttcttgcctaaggtatttctcagttgtattgttgtatcttaatctaatttatgtccttttgtgattctgtgtaccgaggacaggaactcctttaaaaaagagtggatcaaccactctcctgtaggggtcgctatgagagtagcagtctggcatccttcctttgccgcctagcaccttgtggcatgacttggcacaatttgcctaagggttgtgagatctggcttgttttggtattttatttttcagaatggtatgagctctaagtccaccaaaaattctgcaagctcataactatgcattcttttactttggttctgtgtatgctgcatatgctgcacctgtgctttttttttttaaccacatatttggtgcgtggttattttagacttctcatcatactccatttgcatatgacaaatatatacacgtagacaccattttagcagcttttgcagcatgcatgatggtggctgaaacttggccttctataggatcccagattattatttaatggggttgtcactcaggacacttactggctttctccagtgctcttaaaaaattgaattgagcatgatgaggtgcatccccttgattaaatgtttttcctcctatgcaatcaccattagctgtttggctcccattctgtattcttctgaagcagccctgcattgcaaatcaatatctttctgaaaagacagtgtgttgtgaattgccttgacagcatatgcacggttactttggctgcaatgctgctgcagagcccggttactctgccttcgt

SEQ ID NO: 38661 - DNA, 2300 bp, Homo sapien
gctagagaaaaagtgtccctgggagcctgggggccaggatgctagagtgaaaatgaacacttattgaacggttcaaaggacttcagagagctgtgcttcccaacctccttttcaatatcaaaatgtgtcataaattacagtcaacacacgtacacatgctcacataattgtgcatttagtacctgttgctttaaaaaaatgctagcaatcaaatactttaaagcaaaaatgcattttatgaaggtactgcttatataaacatttgaaaaacaataacatatgtatctgagacaaacagatgtcattttgctttagcaggtaaagatatgactgcaccttctttatagacaccaacatgctgggtagtgaaattctcagagacttgttagcatgtagtacaagtaacacccatctaagtagtaacctttatgtgtagatgaatgttaaagcttcctaatgacagcctgcctcaggtgccctctttcagtcaccctggaatcactccctgcttatgtggggaaagtgaccttcaatagttttctattttctgtataatttggcccaaacgttttagtctggattaaaaccttttctcctgcctcccctcaaagtgcctcagctacactcacctctctggcccccttcagcaattcaagtgaatttgagctttaatcttttgcaccttgcacctacctctccgtcagaaccccatttcatctgagctggttgctttctatgtgcctttttggctttgggatggacactgtaacaagtgatttgcatttctgtgcctcactgtactatgcccctctctaaggctggcacaggtctccttcattttatactctacgacctaagagtgcttatagcacaatgggtggttggtatctattaaacaaatgaatgtgtaaatgaatgatagaaagtaattggtgaaaagtacgctgagatagagtctgatcacaggcaaaaaaaaaaaaaaaatggaagaattaatagtccaatggcacttttcttataaaactgaattacatagtcaaaccatcatttaaaataatcttacaaggaaaacaacattaatgtgcgtctgttgagacggattatgctgttttggaattaggaagagaatgtgcagttcgctgtttgctttcagactgtttgtttgttttgtttattaaactggcgtctccagctctgcagcccagcctgtggaacctaaatggcccaggtcccaggagttcccatcggagccgtgggcgtccccagggtttagaaaggctccccaggggcccaagctgccggcgagtgcagctcccgccggcgccacctctgcggtctggagcggcgaggacgatcccagagaggcgcccccactgcctcggtcgtcgggttcttaagtttttctctccaaaaatttaatggatagttttcttttgcttctgtttctgacttgattaaagaggcggaaaaaaaggagtttgactccaagaagaatgatagtagcagaaggcgcatctggctttactttccaaattccatcaaagtttgtgttttgtttcatttgacagcgatcccgtgaacgtctcctctggggaaatggcgcgaccaaagcccgccaagcccagcctgcgaactggaggatttattaatgtaatatgttaaacaaaacctcgacagacacaaactcaaaggaaaccgtgcgctccttaagtcaaaggcatctgttctggaagcagaacccggtttgctgttggtaaccagcgttaagagcaggatttttaaacatgataatggataaaataaaagaaaagcgaagtcccgcggtcctctgactcctattcattatctccagcagcatatgggaccattctcctacgtatcctcgcctttttcttctgaaaaagcaaaagcaaccaagcctgtcccgcttcagagcaatcctactctttgtgcctgagtagtgccaccaccactacttcctcctcctcccgcctcctcctaccccgccctcctgccgctggctttcgctctggcgaggaggcggccggctccctttgcgccgggaagccggagccgcgattgggcgacggtccctgagcctccagttctgcgtcggtttcaaggctcctccctcctggtgaaagacagactacggggcgcctggaaaccggtccgagggcgcgcgaggcagaggagagggagcgagttgagggattgacacaaatggtcaggcggcggcggcggagaaggaggcggaggcgcaggggggagccgagcccgctgggctgcggagagttgcg

SEQ ID NO: 38662 - DNA, 2300 bp, Homo sapien
tttaaagttaatattgttatgtgtgaatttgatcttgtcattatgatgttatctggtgattttgctcattagttgatgcagtttcttcctagcctcaatggtctttacagtttggcatgattttgcagtggctagtaccggttgttcctttccatgtttagtgcttccttcaggagctcttttagggcaggcctggtggtgacaaaatctctcagcatttgcttgtctgtaaagtattttatttctccttcacttatgaagcttagtttggctggatatgaaattctgggttgaaaattcttttctttcagaatgttgaatattggcccccactctcttctggcttgtagagttcctgccaagagatctgctgttagtctgatgggcttcccgttgtaggtaaccggacctttctctctggctgcccttaacattttttccttcatttcaactttggtgaatctgacaattatgtgtcttggagttgctcttcttgaggagtatctttgtggtgttctctgtatttcctgaatctgaatgttggcctgccttgctagattggggaagttctcctggataatatcctgcagagtgttttccaagttgcttccattctccctgtcactttgaggtacaccaatcagacgtagatttggtcttttcacatagtcccatatttcttggaggctttgtttgtttctttttattcttttttctctaaacttcccttcttgcttcatttcattcatttcatcttccatcactgacaccctttcttccagttgatcacatcggctcctgaggcttctgcattcttcatgtagttctcgaggcttggctttcagctccatcagcttctttaagcacttctctctattggttattctagttatacattcgtctaaatttttttcaaagtttttaacttctttgcctttggtttgaatttcctcctgtagctcagagtagtttgatcatctgaagccttcttctctcaactcgtcaaagtcattctccatccagctttgttccattgctttgtaggaggagaggcactctgcttttcagagtttccagtttttctgctctgttttttccccatctttgtggttttatctactgttggtctttgatgatggcgacgtacagatgggtttttggtgtggatgtcgtttctgtttgttagttttccttctaacagacaggaccctcagctgcaggtctgttggagtttgctagtggtccactccagaccctgtttgcctgggtaccagcagctgtggctgcagaacagcggattttcgtgaaccgcgaatgctgctgtctgatcgttcctctcgaagttttgtctcagaggagtacccagccatgtgaggtgtcagtctgcccctactggggggtgcctcccagttaggctactcaggggtcagggaccaacttgaggaggcagtctgcccgttctcagatctccagctgcgtgctgggagaaccactgctctcttcaaagctgtcagacagggacatttaagtctgcagaggttactgctgtctttttgtttgtctgtgccctgcccccagaggtggagcctacggaggcaggcaggccttcttgagctgtggtgggctccacgcagtttgagcttcccagctgctttgtttacctaagcaatcctgggcagtggcgggcgcccctcccccagcctcactgctgccttgcagtttgatctcagactgctgtgctagcaatcggtgagactctgtgggcgtaggaccctccgagtcaggtgtgggatataatcccctggtgcgccgttttttaagcctgtaggaaaagcacagtattcaggtgggagtgacccgattttccaggtgccatctgtcacccctttctttgactaggtaagggaactccctgacaccttgcacttcccgagtgaggcaatgcctcaccttgcttcaacttgtgcacggtgcgctgcacccagtgtcctgcgcccactgtctggcactccctagtgagatgaacccggtacctcagatggaaatgcagaaatcacctgtcttctgcctcgctcatgctgggagctgtagaccagagctgttcctattcggccatcttggctccacctcctatttactacttttagatgggtctagtgtttcaaaaaggtatgttttctcatttgctccacattttctccctagttttgtttttacatttttcttctggagtgaatgtgggaaataatgtataaaatagaggtatgattgagtagacattatctcaatggcaagtaagc

SEQ ID NO: 38663 - DNA, 2300 bp, Homo sapien
aaaatacaaaaaaacaaaaaaacaaaaaacaaaacaaaaaaattgccgggcatggtggcacgcgcctgtactcccagctactcgggaggctgaggcaggggaatcgcttgaacccgggaggcagaggttgtagtgagccgagatcgcgccattgcactccagcctggcaacagagtgagactccgtctaaaggaaaaaaaaaaaaaaaaaagaaaaaggagaaagaaatgggataaagaaaattctttttctttcttgagacaaggttcactgtgtcacccaggctagagtgtagtggcacaatcacggctcactgcagcctcaacctcccaggctcaggtgattctcccaccttagcctcccaagtagctgggactacaggcacctgtgaccacgcctggctaatgtttgtactttttgtagagatggggtttcaccatgttggccaggctggtctcgaactcctggcctcaagccatcctcccgccttggcctcccaaagtgctgggattacaggcatgagccatcgcgcccggccagaaaattacatcattaggcttgtacatggaggagttagtaatgcctgaaatttttcctctttgtagaattcagggtcaatcctgttgatcctgtgtttttttaaggaccaaatcaccatcgtctcctgaggataactcgacagacacaattaattcattaatgtagatattatctttcttttgatggtcacaggagaagtgccttgaattgaagctttatctcttccattgtcaccatcactaggcaggtgaggctgacaggaccgcgtggcttaaggcaacgcctcgggagggagcaaaaatgcatccactgtggagatgaggtttcggttgcctccattctttaaatagcgcaaaccctcacaatgtcaaaagaatcatatttgaattcgaactgcaagtaaggaaatcgaagtatactagaattgatttccagcctgaaggcggatgctgaattcagaccagcagtgacactccaggatttccacggtagttcattaaaggaggagaatctgggactaaacagacagagtctacacccgcttatcctgcaccaaaaaacgccgagatgttcatcggcatcgcgttagtcacattagcagcagcaatcgcattatcaaaaactgcaacacgcatgtaaataatagctacttttccaccacgtgtcgtcggccggcagtggatgccccctgtaggatccctataagatgccttacagttccccacggacatctgcccaggcgactgggagtcccaggccccaccccaccctccaaaccccttctttggcgttcaataccccgcgctcaccgcggtctcttgctgccccctgccaggcccctagcgtcgggctgcgaagggctgaagtaccgccacgagggggcgcaggaccaacgacatcacctctgcgcgcgacccgaggccggaagttagtcttttccacttccgctcctcctagccgctccggaccccagaggcggaagtaaaagcgaactacagtggatgggtgcagttcagggtgagattgggaaggtggtgaggctgtgctttcctttctttttgttaagaagtgggtgtgggtgactgctgtacagtgcagccctttgcagatttgtctttggaggaggaagagggatggaaagagccttcggtgtggaattaccttggttttgagttaagaaagacccacctgggttcgaaccctaatgcttcagctagcgaaggcaggctagtatgggagctcggcgctgtttcagattttgtaattttaaggcttatgcctaccttttaaattgttgtggggagtaaagcgagacaatatatatgaagcacttagctttggtacaaaacgtattcgtgattccgctaccttttcccatcatatgtaggcatgtacttgccgttttcttttctgtatgtctgagaaatgttgtttgcaagaggtaatgcatctcacgagaacataatgcaacgagaacgttagctgggatcgatctcttattttgtattaggaaggcctgaaatattttgccttttttttgtgtgtgtgtgtcatttccagagatagctgttctccagcctttctggagggatgcagagcctttccttaggacaaacaaggtgagaaatgcatgtaaagatctccaaacttagcttgctgtatcaaaagaagaccagctggaatgtggtattttagggccagtgattagttatttccattaacagcctttttaacaggccagttgtggggcagaggcgaac

SEQ ID NO: 38664 - DNA, 2300 bp, Homo sapien
aagacatgcattctcttgctagttcctactgtatgggtttcagtgttctcatttgtaaaatgagagggctggggctcaataatctcaaaggttattttatttaatttaatctctaaattttattttacatgccgattgtaaagcagtttgtgtgtgtgtatatacataatatataataatattaattcagacataggagctccttccatgcagaaggaatatagattttagaaattcacattttaaaagccatctccaattttttgggactaatttttacctggaggaattgcagtaagtagtttacttaatagatagactgattattagtattttaaattcccaaagataaatctttatccttctaaaccaacaaaacagagagttaattaaaaacaaagtgacaacaacaacccaactaggagtagtcaaaggggaagagtgatggtaaaacgtaattggttcattggcatagaaatgggataaacacgccgggtgcggtagctcacgcctgtaatcccaacactttgggaggccgaggtgggtggatcatgaggtcaggagatcgagaccatcctggccaacatggtgaaaccccgtatctactaaaatacaaaaaaacaaaaaaacaaaaaacaaaacaaaaaaattgccgggcatggtggcacgcgcctgtactcccagctactcgggaggctgaggcaggggaatcgcttgaacccgggaggcagaggttgtagtgagccgagatcgcgccattgcactccagcctggcaacagagtgagactccgtctaaaggaaaaaaaaaaaaaaaaaagaaaaaggagaaagaaatgggataaagaaaattctttttctttcttgagacaaggttcactgtgtcacccaggctagagtgtagtggcacaatcacggctcactgcagcctcaacctcccaggctcaggtgattctcccaccttagcctcccaagtagctgggactacaggcacctgtgaccacgcctggctaatgtttgtactttttgtagagatggggtttcaccatgttggccaggctggtctcgaactcctggcctcaagccatcctcccgccttggcctcccaaagtgctgggattacaggcatgagccatcgcgcccggccagaaaattacatcattaggcttgtacatggaggagttagtaatgcctgaaatttttcctctttgtagaattcagggtcaatcctgttgatcctgtgtttttttaaggaccaaatcaccatcgtctcctgaggataactcgacagacacaattaattcattaatgtagatattatctttcttttgatggtcacaggagaagtgccttgaattgaagctttatctcttccattgtcaccatcactaggcaggtgaggctgacaggaccgcgtggcttaaggcaacgcctcgggagggagcaaaaatgcatccactgtggagatgaggtttcggttgcctccattctttaaatagcgcaaaccctcacaatgtcaaaagaatcatatttgaattcgaactgcaagtaaggaaatcgaagtatactagaattgatttccagcctgaaggcggatgctgaattcagaccagcagtgacactccaggatttccacggtagttcattaaaggaggagaatctgggactaaacagacagagtctacacccgcttatcctgcaccaaaaaacgccgagatgttcatcggcatcgcgttagtcacattagcagcagcaatcgcattatcaaaaactgcaacacgcatgtaaataatagctacttttccaccacgtgtcgtcggccggcagtggatgccccctgtaggatccctataagatgccttacagttccccacggacatctgcccaggcgactgggagtcccaggccccaccccaccctccaaaccccttctttggcgttcaataccccgcgctcaccgcggtctcttgctgccccctgccaggcccctagcgtcgggctgcgaagggctgaagtaccgccacgagggggcgcaggaccaacgacatcacctctgcgcgcgacccgaggccggaagttagtcttttccacttccgctcctcctagccgctccggaccccagaggcggaagtaaaagcgaactacagtggatgggtgcagttcagggtgagattgggaaggtggtgaggctgtgctttcctttctttttgttaagaagtgggtgtgggtgactgctgtacagtgcagccctttgcagatttgtctttggaggaggaagagggatggaaagagccttcggtgt

SEQ ID NO: 38665 - DNA, 2300 bp, Homo sapien
tcagcctcccaaagtgctgggattacaggcgtgcaccaccccgcccagcctcctcatctctttcaagtctttgctgaaatatcttctgaaagaatcacctgagtaagtgaatgacatgacatgaattaatgattggtatgacaagttatgacagaataggtgccataaggaagagtcagaacactagtgcccaatgcttgctcttctaatagaagttaacacaaatctaactttcaacattgattgagcacccattatgtaaactagacatgtatatgattggctgctatcagtgaaggaaacattgaaataatcttgttgctttggaaggtattcttgaacattctcagcacctacaaacagctgacttatttagtcaccgagaaagcagtatcctttaacaaacaggaatagctttggataccctggggcttccccctcctaggcaatcagcatctacactcataatccctcaatccaggcagtatttaaatcactgcactattagaacacttagttctagtccttactcttaatttgatgggtgactaagtaaatcacttattgcctcaattctttcatccctatgataaaatgtctaattttacctggttcctaattcaggttgagataacaggacaatatgcacttggctgttagaagttggcagaatgtatgcattacggagcttaagaaaaaaatcttttttaaagctaagatttctaaatgagggctatttaaaactcatcttcagtttgtggtagacttaaggtctttattatctccttttttgttttttaacctcaatttttcacttaacaccacttctacgcttgaactcattttagcctattttttgttcacaactgctagtttttcagtccaacctagctcaaagcaacggagaaacatgataaatctgagtaatcaaccagagacattaaaatgtgtagttcactccaggaatggatgtgagcattggagggcagggagacgaacacaaaggactgagggagcacatgtcggggaaacaaggaaagatagtaatgttaaatttataaacactgctcaattcaatccaaaaagcgtttattgagtgcagagctctgtgctggtcattttagtaaagccaagatgagcaagacttatgatgagtctctgtcatcaaggagctgggagtatgagctgaactaagacgcacacaaattattaaaatatggtgcagggtacttaaaggaagtccaaggagaaataaagctgacattattcaggacgttttaatatgtcagggcagtcacatatattaacaacccttccaaaaattccaggtaggctcagggaggataggtaacttgtcattaacgctagaaagttagtgtagtctggcattgtccctaaccgaggttctaaagctcaggctcctttcagaacactactgttaaagggaagccccaaagagtcgggggaggggactaagttttgactggatgtgtctcggttgccgtggagggaacaagaggtcagaaaagccatttggaggcagcgtgtgcgatgggactataaggatgaaccggagattgagtgggaaccagtggagggaagagggagggacttttcaggctaaggaagtaataagagcaattagctgctctcataattcttgagtcaagcagttaatgtaggtagaaaacctggcgtccgcccccccaccaccccccaccggaacttttccgttggagcttgtaggtgttcgccaatttcaccattaggtgtgttagttttgtaacctgaaggaaaaaaaaaactcatgttttaatagcagtggattcctcggacggagggtgggggtcaggccaggagcctctggcacactccgtctctcctacccctcagctcggccgccacctgtgagccgttgatgtgcgggaagggcgctctctacggcgggatcctcgctggtaggaggcaggtcccaggcctggcaagggttgaccccggagggctgggccggggcggcaccccaggagcacctgcccacgaggcggctgcgcggacagacgttccagcccctcccgcctcgccgtgtgtttacgtggagacgaagatggcggcggcggcggcggtgacggcgcttcccgtgcggctgaggacgatccgccagtgagcgcggagactgcttccacttcgggcgggggagcgccggaccgaatcggctctctaggccgtggagcttgccgtcccacctccgtccaaatcgacctttcctttctatccccaaccacccctcaacccctgttttc

SEQ ID NO: 38666 - DNA, 2300 bp, Homo sapien
ttctctcactgagtattactcctaggacaaatgtatctacttccaaggtttcaactctcacctttctacaaatgactcctaagtcattgcagacccaaaattccaacagttgactcatcttcacaaatcccattaacacttcagactaatcatttttcatccctactctgtatactttttcctgattttttagtatttttcttaatgatttctctgtcacctaagaatcatctaagctggaagcccagagtcatcttacgcatatcttctttccttgtcttcttctacattgtcttctccaacctgtgctttctcaattttttctcctttaacttacctctgcattgctacaatttgcttcctgatgcacatatttgatattatcttcttattcaaaatatgatttactctttccatttgtttatagcaaaacccctaaggttcctataaaatttaagaccatttacaacttgaatccagcttactttccagctaccttcttttagctctctcacctacctcaccactatttctccatgtccctttgccctaaaaagcctagagttcccatcgtatcacactgttccctttgcgtcacatttctgtacccatgagaaagaaaatgttactagaatgcatttaatttctcacataaagatgctgtaaattccaagattatcttgcacttctaaatgttttcaaggcattcaattttgagcacatggagtaatataaataagtaccagtgtagctgatgtgttttttactttggagaataaggatacaaagtgaaagttgtatttactgttaccttaagaattagataaacctgtatataatgggaaacatttaaaatcatgccttaaaatgcaattttgggctctacagccagtgacttacaaagaggacatgcttagtgaatattgaattgtgctgaattcaggtcttgcgtctgaagctgtatctgatgtcattactacatagattaagaaaatgtggcaccagctactttagcaagacaagttctaataagtagctcttattttgagtgaatgtgtcaaactgaatgcttattccaagcacttggtacatgaagatttcctctgctttaattggttaactttgtacagttactgataacaaatatgtactacatgtaataaaagaataggtaatgcctcttcaggaaacttcactgttgagttgtaacatctgccacaaaggagtatttaatggcagtggtgaatagcctatgcttttattatagcttagagaaaatacttggaaagcttatcttctacccatgcaaactcatttttttttaacataagaaataagaatagtgtgggtaatgtggataacaatgtccaaagttaaattagacctgctcatcagtctaatcttatcccagtattcctcttaaaacagtagcaagcaacaaaatgatctcagttccttttactgtgtagccaaagcagatgatattgcccagtgttggatcaaaagttagtcatcaccagataaattcaagcacttatttctatcctgtactcccaatgtaggctcaaaagtcagtctgctcccgaaaaatccaagcacttatttctatccctctgtacaatttgaaatggcctactccacaatgcctttcttttcttgtgattgtttatgtgtttcctcattacattgtaaagtcgtcaagggttggagccagatcttgtcacctatatgtccctattacttagcaaactccacatagtggacatgtagtaaatttctgttgaaaggtatcttagaagtttttatcaaagaaaaaaatactgaattacccacatgatcaatttctgcaaattcctattagcataacatttctcattcttttgcttggttattgaataatattatatcctatatttgcatattttatttgtttggttgcaatattgttttaaaagaccttacaatttccatgatttccagtttagtttgatgttgttttataactttaaaaaattatgattattataattaatttatgcctttaaaacactgttattctagttacagatgaatccattccctcttattctggaagtgatatgccaagaaatgacattaacatgtggtcaaaagtaactgaggaaggaacagagctgtcacaacgacttgtgaggagtggttttgctggaactgaaatagaccctgaaaatgaagaacttatgctgaacattagctctcgactacaagcagcagttgaaaaactcctagaagccataagtgaaactagcagtcaggtaacc

SEQ ID NO: 38667 - DNA, 2300 bp, Homo sapien
tatttgatttaagtaaagctattttgtttaggaaacaactctatgctgcaaattaatagccttcaaatatacattaaaatcttgattatctgaaacctggcgataataagctagtctggataattaaaagtgtgttcttctaagtcattttattataactatttttgattgcaagaagttttatgtgctttctaaaatagagggggaagcaagatagaatataatttgaattattctaattcagtcacctttctgaacatcaattaatatatcatcagttaatattactgttgttacaagggctgtatgccactatcctgaatcatctttatttaatactgctcttttgagtcttttttgccctaattttactttattttctttgtgtaagcttcttaccttgacctgtgttcctaatataactacttacctacagatttttgttttacatggatggaagcaagttttacatgcttccaaaaatgggtgaaacaatagacaataatttcagttattttaattcatggtcatctttctgaacatgaattaatatttaatataatactccatcagttaatatactgttatgagggctgtttgccctattctgaatcatctttatctgttacttttttgagtccatttttctcagtaatttttctctcttatctttgtagttagttcttatcctgaccgaaatgttaactgtttataaagggttgtttcttacttacagattttgtttttgcttcaaataagagaaactagatatcagattatcaaaacaaactgtagtttgcagagggagcagggaaagagtgttttaagaggtatttgataggctaagcatgggtccccacagttcataaagctgagcatctgggatattgacaacttctatctgccaaagccccactaaagtcacatttagctgcagcagtgataagattaggcctctatcttgtataggtgtttattagggtttcttatgcaaccctccagttaatctgtgaacgtgctttgttaagacaccttcacagactaactggagggttgcataagaaaccctaataaacaaaaaatttttattgcctagtccagacttgtaagaggcaactgcccctccacagctacaagccatctccctgtagattctggctttctatagaaaatgtcattttctctgccctaattattagtctacctactgtgaaatggtttgagtactggtttaaacaactttatagtgtgagtagctgtagaatggatttgtgttggtattacctaccttctttagcatgggtttttccatttaaataaaggctttgtggatttaggatatttagttactggaaagaataataccaaaatgagggttttttcctttctttaaaacaactttcattattgaaaatcttttaatattaaaaagtaagttgtttatcttctaaaattctgagtggcttatttattcactattgcccaggtttctggagctacccagaaggctattctatataacttgggcttttaaagtttagtcagggttcataagataccttaagtggtatagttttcaactgttacatacagtgtagctttaaaaagaattttttccttagcatgtactctgtaaacaatatgaaaataggttataactgaaatgtctatagttttagtggctgcttgaaagatgagtaatatttctaaggaaatagcaaaagtaagttttaattttccagaaataactttgattattttatatacttgaataacttattactaatgtggactcaagcataattaatttcacatttttaaattaaagcaattttttaatggaacggaaaaacaccagcttatcttacaaacattataaacttgtctaaatgccctttcaaagccctgacgtggaacttggatcctgtctggcaggcttttttgtgggcatattaattcacattccacctgtcagtgtacctataggtaaagacattaaaccacaccctctgttctgaccttttcctcaggggacactgactagaatcctttggctcagcatgagaggctatttgaatagctcagttcagaagagcttttccttttgaatagagtgaagcagcaagagcaagagaaataatgttacaactgcatttctcaagactgctgctatggagatttcaaacttgaccttccctgccaggttctgctttgaaggcttacttattactacagacatcgctgatattaaaagcagttttattgctcgtctaattagatgtttatatttttattcttct

SEQ ID NO: 38668 - DNA, 2300 bp, Homo sapien
caaaatggttataatgttgctccccattgaatttaaaaaacaaaccaattttattttattttattttattttatttattttttttgagacagaatctcgctctgtcgcccaggctggagtccaatggtgcaacctcggctcactgcaacctccacctcctaggttcaagtgattctcctgcctcagcctcccgagtagctgggattacaggcacccaccatcacacctggctaattttttgtatttttaatagagatggggtttcaccatgttgaccaggctggtctctatctcctgatgtcaggtgatccacccacctcagcctcccaaagtgctggtattactggcatgagccaccacgcctggcccaattctcttttattaattttaatttattaagacacattggtggccaggcacagaggctcacacctgtaatccttatactttaggaagcctaggtgggcggattgcttgggcccaggagttcaagaccagcctgggcaacatggtgaaactttgtctctacaaaaaatataaaaattaactggacatggtggcataccacctgtagtcccagctgcagtgagcctcatcatgccactgcactccagcttgggtgacagagtgagaccctgtctcaaaaagaaaaaaaaaaaaaagcaaagacacattggtttaataatttatatgtatttttctcccctcctaatattgtcataggattctaatgtttttcagaaaggctctgtgacttagattttatcatgttattctaaccaaatctattataaattataatatttaatatgagttaagtaaggtaattacctttggtgccatcggttgtagactttatttccgtacttcatccttttccattaagaagtattgatattgactattttcctaatagggaatcagcaactaaaagcttatattactttatacttaacagaactttctgagccttgtttgatatgatgggggagatattggtctataatgaaattaagtagtatgtctgagaagtagtgtattatttttgtgtgtgatcatctctttgaggtactgccctaaaataaagtaaaattttcaaaatgtaaatacatatatattatgtatgttacctttttcattaattattaggttattgaagaaaaaaatgaactgataagggatcttgaaacccaaatagaatgtttgatgagtgatcaagaatgtgtgaagagaaatagagaagaagaaatagagcagctcaatgaagtgattgaaaaacttcaacaggaattggcaaatattggacagaagacatcaatgaatgctcattccctctcagaagaagcagacagtttaaaacatcaattggatgtggttatagctgaaaagctggccttggaacagcaagtagaaaccgctaatgaagaaatgaccttcatgaaaaatgtacttaaagaaaccaattttaaaatgaatcagctaacacaggaattattcagcttaaagagagaacgtgaaagtgtggaaaagattcaaagcataccagagaatagtgttaacgtggctatagatcatctgagcaaagacaaacctgaactagaagtagtccttacagaggatgctcttaaatccctagaaaatcagacatacttcaaatcttttgaagaaaatggcaaaggttccataattaatttggaaacaaggttgctacaacttgagagcactgttagtgcaaaggacttagaacttacccagtgttataaacaaataaaagacatgcaagaacaaggccagtttgaaacagaaatgcttcaaaagaagattgtaaacctacagaaaatagttgaagaaaaagtggctgctgctcttgtcagtcaaatccaacttgaggcagttcaggaatatgcaaaattctgtcaagataatcaaacaatttcatcagaacctgaaagaacaaatattcagaatttaaatcaactaagagaagatgagttggggtcagatatatcagcattaaccttgagaatatcagaattagaaagccaggttgttgaaatgcatactagtttgattttagaaaaagaacaagtagaaattgcagaaaaaaatgttttagaaaaagaaaagaagctgctagaactacagaagctattggagggcaatgagaaaaaacagagagagaaagaaaagaaaagaagccctcaagatgttgaagttctcaaggttagttttgtattttattagtttcatttaaataccccaagaaactaagctgattgctaatttactaaatatggtgt

SEQ ID NO: 38669 - DNA, 2300 bp, Homo sapien
tatatatatatatatatatatatttttttttttttagtagagacgaggtttctccatgttagccaagctggtctcaaactcctgacctcaagtgatccgcctgccttggcctcccaaagtgctaggattacaggtgttagccactgcgcctggccagcttttacaaattttatacctgataatagatttcatctgttttaagtaaaaatgcgtagttgacctctgtaagtttacttatgagaagatctgaaatcgcagttatttcttagcatatgacagataggacaagagcttttttttcctccaaattctcaccttataaatttataactttgagtagctgaacttcagtcttctccaaacaccagaagattaactgataaatcacaattctataattatatattttgcaaagaataataattccctggctttttcctccttcattggaactaagttacttaagttatagataattaaaatagtaatataactttctttttttcctggacacagagtcttgctttgttgcccaggctgaagtttagtggcgcagtcttggctcattgcaacctctccctcctgagcagctgggactacaggtgtgcaccacaacacctggctaatttttgtattttttgtagagacagggtttcgccacgttgcccagactggcctcaaactcctggcctcaaatgatctacctgtctcagcctctcaaagtgctgggattacaggcgtgagccaccgtgcctggcctaaaatagtaatgtaactttccattttaggatgtatatgaataacattacttaccttttattcccagaaaatcattcttttctcaagaagaaaatcattgtctcaagaatataagatgatggttctgaaaaagcttctctgtttttggaaagagcattgatttgttccaactccttatatctgtaggcagtcattccttggatggttttattagaatgtataagagccttgaatttagctatattttttttaaattatgtgtttcttgtgtttccgctgtcattcagacaactactgagctatttcatagcaatgaagaaagtggattttttaatgaactcgaggctcttagagctgaatcagtggctaccaaagcagaacttgccagttataaagaaaaggctgaaaaacttcaagaagagcttttggtaagataagtaacatagctcctaattcactcatttctacctatcttaattacgtttcaaagtatatactcttttataacaaatgagctccataacttaaaagctagataaaaagtattttgtggatttgatgaaaactttcattgttataaatttctttaccaacatcttcttgcttggttttcctggaaatctttcttaggaggatactttttatttccattctgttaatgaaggagtagaaagttgttaaagagaactgtatatcccatgagaaccaaaaatagaagctaataaaattatttcatttctatagtaatctatgaccatacgtacatacaaatatatatatgtaaactgtgagcgtttctgaaatgtttttcctactactctgaggaaaatgaacgtataatcatgaattacattcctcccacaccctttaaattctacatttaatatgggaagattttaactgaatgccctactgttctattcattacgttttaggtaaaagaaacaaatatgacatctcttcagaaagacttaagccaagttagggatcacctcgcagaggcaaaagagaaattgtccattttagaaaaagaagatgagactgaggtacaagaaagcaaaaaggcctgcatgtttgagccacttcctataaaactgagtaagagcattgcatcccagacagatgggactctgaagatcagtagcagcaatcagactccacaaattcttgttaaaaatgcaggaatacaaattaatttacagagtgaatgttcctcagaagaagttactgaaataatcagtcagtttactgaaaaaattgagaagatgcaagaactacatgctgctgaaattttggacatggaatccagacatatttcagaaactgaaaccttaaagagggaacactatgttgccgttcagttactgaaagaggaatgtggtaccttgaaggcagtgatacagtgtctgagaagtaaagaggtatttggtttttataatatgtgtttttcaacattgtgtggttttttaaaaaaaaaaaatcagtttaattcattttgtagatgacaaaccaaaatgcaactcattaaggcacttgatctt

SEQ ID NO: 38670 - DNA, 2300 bp, Homo sapien
atccttttttaaaaaaattgtgagccataacatacagaaaattacaaattgcaaatatgcagtatgacgcatttttaaatgagtatctatggaaacatcacccatgtgaatatagccagtatcccaacagccccttctcccaagcacatgctcctctgagtaacttagaggtaatcattgttctgatttttctttagttttactatctatttatatattcctaaaacatttaagtttcaagtttttttctgtttttgaactttatcaatctgtatgtattttttatcttgtttctttcacctctctgtaacattcttccaacattcttccaagttactgcatttttcaagttactgcattcttccaaattagtagtagaacattcttccaagttactgcatttatctctagttcattcattcttgttactctataactctatgaccctgtgtagggccaggcacggtggcttacacctgtaatcccagcactttgggaggctgacgtgggtggatcacgaggtcagaagttcaagatgagcctagccaaaatggtgaaacccagtctctactaaaaatacaaaaattagccaggcgtggtggcgggtgcctgtaaggccagccactcaggagactgaagcagagaattacttgaacccagaaggtggaggttgcagtgagctgaaatcacaccactgcactctagcctgagcgacagagcaagactccatctcaaaaaaaaaaaaaaaaaaaagaatttcctgtatagatactccaaaattaatatatccattctattaatatgattgagcatttgggttgtttctactttttagctgtttagctatcaatgttattataaacattgttgtatagtgtttctgctacatatgtgcatgcatcttctgagtatatgactaagagcagaattgctgggtcatggaatgcctatcttagataaggtcaaatgattttcctacatagtcatattagtttatacacttagtagcagtatatgagagttacgttgcttcacatctttgccaacagttagtatagtcagacttctgttgccaatctgatgggtgtgcagtggattcttattgtggttttaattggctgttctctagttcctgaagggtttagtcctttttcatatggtaattggctagttggatttttatttttgtgatatgcttgtttaggtactttttgataacagtatctggtcttttaaattgagctacagatggaaatcattagaaagtaaagtgaaatctaattttcatcatgtccactgaggacacatacctgtgtgttcagtaattttgtgtcatgtactggtagaaacatgtatcctttggaaaattttgaaagtcacagcatggtctcacattggtcattataaagctgaagcaggctgggccctgtggttcacgcctgtaatcccagcactttgggaggccgaggtgggaggatcacgaggtcaggagtacgagaccagcctggccaacatggtgaaaccccatctctactaaaaatacaaaaattagcttggcgtgatgctcggtgcctgtaatcccagctactcgggaggctgaggcaggagaatcgtctgaacttaggaggcagaggttgcaatgagttgggatcgtgccattgtactccagcttggacgacagggcaagactctgtctcaaaaaaaaaaaacaaaaaaaaaaaacaaagcagaagcattcttaccactgagtttaagaaggaaaaaaaaaagcaggttaaaattacttcagaaaagagagtcataatgagataaacatatcactttaaacgtaggcgtaattgaagatgtcttttagagatagattaatattgttttacttaggttaaatagaacaccattgaaagcttaatgtcacagattcacatttatgtaaatccttaacctctaaagtttttagaagcctaaattaaacatgattgattatcatctaaagctaatgttatttctgtctcctaacgtcagtaatatgaattgtaatgtgaattgttgaactttgatagtattttttaagttaaaaatgtttttcttattagagtagtatagtattacatatttatggtagaatacagaaaagaatagagtgaaaatcatcccttgaatcacctaaatcctaaaataatgactacctaacacctgggtaaatatgtctccagaccttttcaatgtgcatgtgtacataagcttgtatttttcataaaaaaggaatcctgatacatattttataacatactttttttcat

SEQ ID NO: 38671 - DNA, 2300 bp, Homo sapien
actttttagctgtttagctatcaatgttattataaacattgttgtatagtgtttctgctacatatgtgcatgcatcttctgagtatatgactaagagcagaattgctgggtcatggaatgcctatcttagataaggtcaaatgattttcctacatagtcatattagtttatacacttagtagcagtatatgagagttacgttgcttcacatctttgccaacagttagtatagtcagacttctgttgccaatctgatgggtgtgcagtggattcttattgtggttttaattggctgttctctagttcctgaagggtttagtcctttttcatatggtaattggctagttggatttttatttttgtgatatgcttgtttaggtactttttgataacagtatctggtcttttaaattgagctacagatggaaatcattagaaagtaaagtgaaatctaattttcatcatgtccactgaggacacatacctgtgtgttcagtaattttgtgtcatgtactggtagaaacatgtatcctttggaaaattttgaaagtcacagcatggtctcacattggtcattataaagctgaagcaggctgggccctgtggttcacgcctgtaatcccagcactttgggaggccgaggtgggaggatcacgaggtcaggagtacgagaccagcctggccaacatggtgaaaccccatctctactaaaaatacaaaaattagcttggcgtgatgctcggtgcctgtaatcccagctactcgggaggctgaggcaggagaatcgtctgaacttaggaggcagaggttgcaatgagttgggatcgtgccattgtactccagcttggacgacagggcaagactctgtctcaaaaaaaaaaaacaaaaaaaaaaaacaaagcagaagcattcttaccactgagtttaagaaggaaaaaaaaaagcaggttaaaattacttcagaaaagagagtcataatgagataaacatatcactttaaacgtaggcgtaattgaagatgtcttttagagatagattaatattgttttacttaggttaaatagaacaccattgaaagcttaatgtcacagattcacatttatgtaaatccttaacctctaaagtttttagaagcctaaattaaacatgattgattatcatctaaagctaatgttatttctgtctcctaacgtcagtaatatgaattgtaatgtgaattgttgaactttgatagtattttttaagttaaaaatgtttttcttattagagtagtatagtattacatatttatggtagaatacagaaaagaatagagtgaaaatcatcccttgaatcacctaaatcctaaaataatgactacctaacacctgggtaaatatgtctccagaccttttcaatgtgcatgtgtacataagcttgtatttttcataaaaaaggaatcctgatacatattttataacatactttttttcatttaacatactgaggcatttaaaattttcagtttgtttttattgtagcaaacatgtagtaagggtttggttggctttcaatggataaaaggacggtatccaaaggggggtttgaatttcccacttctgggaacagactcctattaaagttccaggggactatctgcagtggggtgctgaacaaaagatatcagcagtgctcatcattgtagtaacttgggtaactcctccaaatactttgtgtgactatcagaaatctttggaattttttaatgtacattcttgaaattctgaatgtacaaatatgagttccatttaaagtttttttttttaattttaagtcttgcatccattaatgtattctcttaaacttttatccttatatatttatagctctgaaatcttggccactagcactatgaggaaaacatgcctgaaatttatttttatacgttaccaaccctttttgtttgtttttttgagacagggtctcactgtcactgaggctggagtacagtggcatggtctcaactcattgcaacctccacctcccgggctcaagcaatccccccacctcagcctcctgagtcgatgggactacaggcacatgccagcacgcccagctaatttttgtatttttagtagagacagagtttcaccatgttgcccaggctggtcttgaactcctggccttaagcagtcctccctcccacctcagcctcccaaagtgctgggattacaggtgtgagccaccatgcctggactgcattaccaactcttgggactataatttttcatgtttcctttgaagtaatctccttaactaca

SEQ ID NO: 38672 - DNA, 2300 bp, Homo sapien
acaaaaattagctgggcgtggttgcgggcacctgtagtcccagctacccgggaggctgaggcaggagaattgctttaacccgggaggtggaggttgcagtgagccgagatggcgctactgcactccagcctggcgacagagcgagactccgtctcgaaacaaaacaacaaaaaaaagaaagagttaatttgaaatgaaccccagtcaagaatctttaatagtttatattttcctcttagctagtttattatatgcctcaacttatcagtagaagctgtttttctctctctcattatatgcttcgtcaacatagctttatggaaattcatttgtctttctgacttaggttggaagttaaagataagacagatgaagtacatttgcttaatgacacattagcaagtgaacagaaaaaatcaagagagctccagtgggctttggagaaagagaaagccaagttgggacgcagtgaagaacgggataaagaagaacttgaggtactgttatctttgtctttaaatgtctggaaaatccagaatgatagaagagggtcttaaggctttcctccatctaaaatgtcaaccttagacttcttaataagatatggtaagttgttcactgtgcattgaatactacataaaccgtattatgaggaaatgctaatggagtggtgattggttttttttgtttgtttgtttgttttgctacatccaaagatgcatatagactgctctgctgcaacatgttttgggcatgtgaattggtacacacagataaatatggcaatcctgtcagtttaatacagaggtagttttggttcctgttttctcctagggaagaggaacagggatacttttctggagccctcactgcttaagaacatttaaagtgaacattggcccctttcagagagacacacccctgctttgcaaggctctcagctcaaggcaggctgctttgagtatctgcttttaatagaggtggagtatacatgaagtatctgcttttaatagaggtgttgttgtctcactggctcagagctcttctagccacgtaatcctaattctcactaactctgtgctgaaaaacaatgtgttgctggcatttttgcccgattttttatttttaatgtccactgtgttagcctccaggcaaagagaactctctgcccggcagggacatgatatctccctaggtaccaattatagttttttaaccattaaaagtttatgtatattttgagttatttgcccctaaccttgctttcgttataagccctattatttttagcatgtgatactgcaaaacacaaggtttttcaggaactcctatcacattatatcaggaacatttattttttaaacaaatttattaatgtgcacaggaatcttatcaaaacgtaagatctccaggaacagttatatttttaaaggttgttattcttataagaaatgtaccctgcttcatattacttagtgagattaagattttttgagaaaagtattatcttacccttcttttatttatatttcatgattatgcactaactactgaacatttaagttaataaactaaataatcagttctattttctaataaagatactaccaacatagtattaataaaggcatggttgtatacttctgaagttttttttgtttttttttttttttttgagtcaaaagtctcactctgttgctcacgctggagggcagtggtgcaatctaggctcactgcaacctccacctcccgggttcaagcaattcgcctgcctcagcctcccaagtagctgggactacaggcacgtgccattgcacccagctaatttttttgtatttttagtagagacagggtttcaccatgttggccaggctgggcttgaactcttgacctcaggtgatctgcccgcctcggcctcccaaagtgctgggattacaggcgtgagccaccacgcccggccaagtatttttaataatattaacaagttcttaaatttgattttctcgtaccaggatctgaagttttcacttgagagtcagaaacaaaggaatcttcagctaaatctacttttggaacaacagaaacaactactgaacgaatcccagcaaaaaatagaatcacagagaatgctatatgatgcccagttgtcagaagaacaaggtcgaaacttagagcttcaggtacttcttgaatctgagaaagttcgaattcgggaaatgagtagtaccctagatagggagcgggaattgcacgcacagctgcagagcagtgatggtactggacagtctcggccacccttg

SEQ ID NO: 38673 - DNA, 2300 bp, Homo sapien
tttggttcctgttttctcctagggaagaggaacagggatacttttctggagccctcactgcttaagaacatttaaagtgaacattggcccctttcagagagacacacccctgctttgcaaggctctcagctcaaggcaggctgctttgagtatctgcttttaatagaggtggagtatacatgaagtatctgcttttaatagaggtgttgttgtctcactggctcagagctcttctagccacgtaatcctaattctcactaactctgtgctgaaaaacaatgtgttgctggcatttttgcccgattttttatttttaatgtccactgtgttagcctccaggcaaagagaactctctgcccggcagggacatgatatctccctaggtaccaattatagttttttaaccattaaaagtttatgtatattttgagttatttgcccctaaccttgctttcgttataagccctattatttttagcatgtgatactgcaaaacacaaggtttttcaggaactcctatcacattatatcaggaacatttattttttaaacaaatttattaatgtgcacaggaatcttatcaaaacgtaagatctccaggaacagttatatttttaaaggttgttattcttataagaaatgtaccctgcttcatattacttagtgagattaagattttttgagaaaagtattatcttacccttcttttatttatatttcatgattatgcactaactactgaacatttaagttaataaactaaataatcagttctattttctaataaagatactaccaacatagtattaataaaggcatggttgtatacttctgaagttttttttgtttttttttttttttttgagtcaaaagtctcactctgttgctcacgctggagggcagtggtgcaatctaggctcactgcaacctccacctcccgggttcaagcaattcgcctgcctcagcctcccaagtagctgggactacaggcacgtgccattgcacccagctaatttttttgtatttttagtagagacagggtttcaccatgttggccaggctgggcttgaactcttgacctcaggtgatctgcccgcctcggcctcccaaagtgctgggattacaggcgtgagccaccacgcccggccaagtatttttaataatattaacaagttcttaaatttgattttctcgtaccaggatctgaagttttcacttgagagtcagaaacaaaggaatcttcagctaaatctacttttggaacaacagaaacaactactgaacgaatcccagcaaaaaatagaatcacagagaatgctatatgatgcccagttgtcagaagaacaaggtcgaaacttagagcttcaggtacttcttgaatctgagaaagttcgaattcgggaaatgagtagtaccctagatagggagcgggaattgcacgcacagctgcagagcagtgatggtactggacagtctcggccacccttgccctcagaggacctactgaaagagctgcagaaacagctagaggaaaaacacagtcgcatagtagaattgttaaatgagactgaaaaatataaactggattctttgcaaacacgacagcaaatggaaaaagataggcaggttcacaggaaaacactgcagacagaacaggaggccaacactgagggacagaaaaaaatgcatgagctccagtccaaagtggaagatcttcagcgccagctggaagagaaaagacaacaagtttataagttagaccttgaaggacagcgactacaaggaatcatgcaggaattccagaagcaagaactagaacgagaagaaaaacgagaaagtagaagaattctgtatcagaaccttaatgaggtaaactgacagtttctttttagatatttttaaggaaagcactgcagccctttgatcattaaattttgatattggattaaattacttaaatagctatatgtaaatcacttaaaaatgaaatctatagaagtttattggatataaacaataattgtgttcccttaagatagactgtgatatgctgttcacttataattattgttttcttattctgtccaaaattgccagccaaccacgtggagcttaaccagtgatagaactagaaattgggttcttcaacagaaaatagaaggagaaacaaaagaatcaaactacgctaaattgattgaaatgaatggaggaggaaccggctgtaatcatgaattagaaatgatcagacaaaagcttcaatgtgtagcttcaaaactacaggttctaccccagaaagcctc

SEQ ID NO: 38674 - DNA, 2300 bp, Homo sapien
tgggtattttagatctacacttggctgaattcccaaatgtggaattcgtgtccccagagggcccactatattgtttcttcactacttactactactactactcacaattttagtcccagatacttgcttaaagaaggtatagaaaaagacaagcagtaacttgtagtatagaaagaagggaaatgtttaagaagctatatttacttctcagtaaacaatcaatctcatgcttctctcactgcaagtgaactagagccactgattttagagtttttaagagagtagatcagctctagcaagaactctagcattcttcataaaagtttctttagatgccacaaaatgagacctgcagattacaacattaagtatcctgaaaatcaaacaaaataatgaaaaagggtaatactcctcaattctctggtggtctcaaatagaaaggagcaccacaacctcacagtacacctcagctaatagaactatctttaaacactaaaagtaactttgtcttcccagagacaaatatcatttccttaaagatcccatgtgtaggaaaaaaataaataaataaataactctttcttatgcctggtatggttcaaacaaaaattattttaaaagctacttggtcaaaagtttgtacattgcattgtcagtaaaagggtagttttcaaaagctacttattgctgactgtaaaaggcacaatcaaataacatttgggagattgaaagctaggttaataaggctgttaaattgaagaaaatgattttttttttttttgagacggagtctcattctgtcgcccagactggagtccagtggcgcaatctcggtttactgcaacctccgcctcctaggttcaagtgattctcgggcctcagcttcccaagcagctgggactacaggcgtgtgccaccacatccagctaatttttgttttgttttgttgtattttagtagagatggggtttctccatgttgttcaggctggtctggaactcctgacctcaggtgatccgcccgcttcggcctcccgaagtgctgggattacaggcgtgagccactgctcccggccgagaaactgttacattattagcatcagaggaaggcccttaccacactccagtcactaccattaccacactctacacatcctccttaatatgggtataaaccaccattaggggcactgctacagcccacagaacactgaaccacacagggcagcctccaggatgacgggccagctgccaacagcatctccgtcaggacccccaccaagggccccaacgaccaccgggtcgttcaaacccacagccgccaatccagccaccgccactaggggcaccactgctgcggtcagtacagaccgctacaaccacaaatgccgcaaccacgaccccgtctaggatcagatacacagccggggaggccagcaccgccccccaacacaaggcaatggcgggtgctacagccagcgccaccagcagcagtgccgccgccgcagccactactccagcccccagcgcgcctgccaccaaagccacgccaagcatggccgcagtcgcccccgcccttgccatccactgagccggtcggggccacggagccgcccacgccagcccttcggccgcctcagctgcggcgcgcgccccactcagaccctaaagaatgtacgtaccacccctgcgggcagctggaccaggtggccggcggccagacggatcaggtagaccaggctgagggtgaaggcgcaggcgatcagcagcatggacaagaggttgccgcctgtcaccttctccatcgcctggcccagcaccgacccacccgcctgcagcaagcccagcagcagcatcccagccgccgccgccattcactccgtcggaaacactgaaggccgaggtcgccaccgctcctcccaatcgacggaacgagagaagctggcagatggtcgtccacagggggccttgccccaggtctcctactaaacccagccccacccctcgggtcccacgcgcgccaccccgtgcgtcacagaatggggcgggatgttccgctggccacgccccttaaataacactctgtgaagccgtggtcttcttgcgcgggatagggcacctgaggaagcgggctgcgcctgtggcacagtggtacggggccggaagataacttacctgaagaggcgatcaatccctgagaatcgcgggcgacccgttttttgtgtgcccgggtgcggggtgccgggacacggcgttgaaggcgctgagcggagggatctcagggcgagctcgagcggcgac

SEQ ID NO: 38675 - DNA, 2300 bp, Homo sapien
ttgtaatcttttatccctcacccccttccaccctttccctgagtccccatagtccattgtgtcattcttatgcctttgcatcctcatagcttagctctcacttaggagtgagaacatatgatgttttgttttccattcctgagttacttcacttagaataatagtcttcaatcccatccaggttgctgaaaatgccattcattcattcctttttgtgaccacgtagcattccattccatatataaatatataaatatatatttatatatatcacagtttctttcttttttttttttttttttttgagacagagttttgctcttgttgcccaggctggagtacagtgacgcaatctcggctcactgcaacctttgcctcccaggttcaagtgattctcctgcctcagcctcccgagtagctgggattaaaggcgtctgccaccacgtccggctaatattttgtatttttagtagagacgaggtttcatcatgttggtgaggctggtctcgaactcttgacctcaggtgatcctcccgcctcggcctcccaaagtgcagggattacaggcgtgagccaccgcgactggacggaagaaacggtgaaacttttaaggtggtagaattataggatctgatgactgattagatgaagcatggagagggcaacagtgtgcacagtgatgccttttcttcacaggcattataggagggacaggttggtaggaggaggcaacgggtttagttttggatttactgaccggggatgagtgttagctctctaggtagaggtgttccgcaggcaactggtgttgcgggacaaatcatagacgggagagaccgagcagagttcaggagagcctttattattaaggtgatcaccggctcagtcggactagggtccagaaagtctgagccccgaacaaagggatcaatcaccttttaagcagtttgtgttgggagttacgtgttgcatgaagtgtacttgcagaagcaagaacaaaggcagtaaattactcttacatttgttacaccatatgtcttacgtccttgggaatacatgcttttgtaacacttgctaatcagttttgtgactttacagcagcgctagggagggaagcaagaactcgctgtgcctcaaggaatgtgaaacgatggaacacagataagcctctccacgcataggggagaaataagcagttaatatactcttaacccaggccttgggtaggggaggtgctatattacattctacctcaaaggaaaagaatatacttcttgattagtatacttataaaattcattaatttccctttcactggatattcctactaattcccccagggccttgcagttttgtctcattcgctgctctatcccctagcttagcacaaaacctagttcttaacattgattaaataaatgaatccggtcaggtgctcccgtgggtgatctggaaggagttaaatttggtagtcatgggagacgcttctgtgaagccataggagcgaagattgattgtggcggcaggactgaactcagcttctgaatctttctagccgctaaacctacagactaagtggcgtccttggggaatgctgcctcaaacggctcgcgacgtcctaaaacatgtacatttattttggaaaatctgttttcgtaaaacctagcatacttaatcaccaacatttgttaacttcatggtggcatattaatacctgtcaggttgattttagttggagtgggacggggctgacctcaccgtcctacccttcggtatgaggccggcgtcttcacgacctcgcttttcacaaccccagtccccgagggcttatttggggctgtcggagtccccaagacgtggccccggagaagggtgaggtgccacagttcgaggtgccccagtaccctgcgtccggacagggggcggtgctcacgcccaaggccccgctgacgcgatgtaggccgagatcacctcaggcgctcgcggtgcaatcacagagcgcgccgtcgccgctcgagctcgccctgagatccctccgctcagcgccttcaacgccgtgtcccggcaccccgcacccgggcacacaaaaaacgggtcgcccgcgattctcagggattgatcgcctcttcaggtaagttatcttccggccccgtaccactgtgccacaggcgcagcccgcttcctcaggtgccctatcccgcgcaagaagaccacggcttcacagagtgttatttaaggggcgtggccagcggaacatcccgccccattctgtgacgcacggggtggcgcgcgtgggaccc

SEQ ID NO: 38676 - DNA, 2300 bp, Homo sapien
ataccaaatgctttgccacagaattatgtaattatgccatgaactcaattttatgagcaaataagtataatttcaatccagtaaccagcaaatccgttgttgacttttggaatatgctatgttatgtttcatagcgtgccttcctagttatattttacagatgttggtatttttgtttgtatttactgattatataccagttggacagtggaagggaaagaacctaaaatgataaatcacctgcagatagaaaaatgagtaaataattttcacctaaatcaaatgtgtgccattttccctttctgggttttttgctttcaattaatactaaatttagttttgtacacataaccattaggaggaagaaaagccaacctgtatctttattttagccagttctctaacaattaattatatatatttaaaagttggattttatctgagctttggtttacctgttatttactttttaaaaatacatgggtgttcgtacaccatatatattcttttatataacagtttgaaagagttttcctgattgcagtgaagttaatgttcccccttttttagtcattaacagtcaaatgaatagttaaatatattaaagatacagaaatagaaaatttacaagatggattaaataaacacttataggagttactatgacaaaatattttgaaacttactttcgagttataaataaaattattaaagataaaattccaacctgttctctcatgtggagtttaaatcgcaagtcggaaacttaggatttaggctaaagaacgaatgtaaaggggaagaaaactgtattccaaaaacaaaaggttatataaattgccaaattaagaaggttttttcacctctaccttatgctgagtgaagaaggtaagtatactaagcagctgcttttaatgccttttatttaaacaaaacaacgaaatccatagacttctggaataccagcaaattgtatgtgttttcagttagtcatcatgttatattaacagttcattaaacaaatgacaatttgtaaattcagtccacagaatagcatactgaaaggctacacatgtagaattattagataaaaaggaacatcactgcccttcataaattctagaaagttcattgcattcattattcacctttaaattcaaaactggaatttgatgatgattgcaactgcagctgagggccataaactaaaacaatttactgggtgtggaaaagggggctgggaagagccgtgggctaaccatcctgttaacaaggagtgtctcctcatgaaggtggcagccaccagaacgaggtgctgcctcctaccctacaaatagcaagggcccatgcaaatgaaaagtgagcctttgagatgagtctagataataatgcattggagatttcctgttaaactagcactcttaagaacatagtggcattttatttcaatcatagtataaaactcactggtttattcaattttattatattttagatgttggtattaatataccaagcaagattctttttaagttttctatttcccctttctaaaagctctatatcgggttcttcaattacattctcaaattatacaaatactacatgttttctgacaaataccgtattttggtaatgttaggctggaagtaaactagagtctttctgtaactttgacttatcctgcaatgtttggatgatgggacacatcaccctgggaactgtctcaaagcacaaccacatcttagggccctacgctcactccccaaaggcagatccgcctccaaaactccaaatcctcatggtctcaggcatcccttttaaacacgggcacaatcgtcacctctttgaaatgagagcgtgcttgattattcctggcctccagttgctggccttcatccggtgttggggtgggggagcctgtcggttcctgaaaaatagctcggggataactaagacaaaagaccctgaggagctctgcctcaactgtggcaagctgggtcttccacgtcaccaagtgtcattttcaccgtgcctgtatggtccgctgttcatcctgttagcggaccccgaaatcaggcaggaaaataaagctcagtgggagggcctcggagcaagacaatcccaccaagatggactcgggttgattaacgtgagtgaacctctgaggaccagaatccagactagtaattctccatcccggctgctcgttagatgcccggaccgacccccccagaccaattcaatcagaacattcggaggggcttgtaaaatctcccggggagattccggtacgaaag

SEQ ID NO: 38677 - DNA, 2300 bp, Homo sapien
tggtagtattttgtgggtgatttttgcatctatgtttttcaggactgttggactcttgttttcttttttgttgtgtccttgtctggttttgttattggaatgatgctggcctcgttgaatgagttaggaagaatcctcttcagttttttggtccattttaagaaagttggtattcttcattataggtttggtagaatttagcagtgaagtcatctggtttttgtttattgagagactttttgttcctgattcaacctcattaccgagaatttatctgttgaggttttcttttccttcctggttcaatattggtaggttgtctgtgtccaggaatttatctttttcctctaggttttccaatttgttagcctatcattggtcctaatagtctctaaggagtctttgttatttctgtggtctcagttataatgtctcttttatcatttatgattttgtttatttggattttctttctctcttggttagtctacctaacagtttactcattttatctttttgaagaaccaacttttcgttttgttgatcctttgtaatttttttcttttttctttttttttaagtctttctttcttttagttctggtctgatctttcttatttctttccttctgctaatttcagggttggttttttcttgcttttctagttccttgaggtgcatcgttaagtgtttgagatcttcctacttttttgccatagatgttattgcagtaaactttcctcttacactgcttttgctacatcccttaggttttggtatatggtgttttcattttcattgcatttgagaaatttttttatttccttcttaattttttaattgacccagtggtcattcaggagcatgttgtttaatttccttttatttgtacagttcccaaaatttcttttgttactgatttatagttttatttcattgtgatctgagaagatacttttacaaaatttgttgggacttgttttttggcctaacagatggtgtatcctggagaatgtgtgttctgcagctgatggatgaaatgttttgtaaatgtctgttagatccatttatttatttatttgtttgtttatatttttttagagacagagtcctgctctgtcgcctaggctgaagtgcagtgagcaatttcagctcactgtaaaacctctgcctcctgggttcaagcgattatcctgccttagcctcctgagtagctgggattacaggcatgtgccaccacacctggctaatttttgtatttttagtagagacgaggtgtagccatgttgcccacgctggtctcaaactcctggcctcaggtgatccaaccacctcggcctcccaaagtgctgggattacaggcgtgagccactgcacctggctgttaaatccatttagtctaaagtgcagtttaaatccagtgtttttttgttaatttattttgatccattcagtgttgagagtggggtgttgaattccccaactattattgtattggagtctgtcattccctttagatctaataacaatggcaaaaatcgcagttatttttgcaccaacctaatataaagctttttttttttctttaacttttagcattttaaacacatcatcccaggctcttctggcctgtagtttcttctgagaaatctgttgtttgtttgatggcaatgtccttatatgtgacctgatgcatttatcttatggtttttagaatcctcttgttgtctttgagttttgacagtttgactataacatgccttgggaaagacctttttaggttagatctgcttgggtatctttgagcttcctgtatcttgatgtctgcatctcttacaagacttagggagttttcagctattatttcttcaagtaggttttctttgactttctccatttcttctccctctaaaatctcagaattcaaatgtttggtcactttatggtgtccccacatgtcacattggctttcttcattcttttttatttcttgatttctttctttttttttttttttttgtctgcctgggttaagataccttcgggtttacaaattctttattctgcttgatctagtctattgttgaagctctcagttgtgctttttatttcatttattgagttcttccattccaggattatgtacttttgttatcttatatgtcttaagtcacactgagtttctttaatgtcattttgatttttttgttaggcatttcaaaatttggggggagcatctgttactgaagaattattgttttcctttgaaggtgtcatgttttcttgcttttcaatgtttt

SEQ ID NO: 38678 - DNA, 2300 bp, Homo sapien
taatacaacagaaatgtgtaccaccagtaacttgtcctaagaggaatttgtgatggaacactttgcaggtaaaagttatcaatgaactttgagccagtttccttcccccagtttagaaaattccagaaagtagtagcattctcaatggatttttattgttataggaagtaactgatgtccccaaataacttccaggccagttcactttggataaaagaacttcacccctcctaccttattcattcacaatataaaaattatatcagggataaaaatgagttaacactacatagttagaaaataaattgcaatgaagtataacataagggtacctgtactgcttgtctatttccttgactctgtcttatgctcttggagtaagtgttttgacaaaatgcgtgcgtgtgtggtatgtgtgtaacattaaaggcagagaccatatattccttctaattttcagcactttgtcatgttaaatccaaagagatactcaacaaatacttattgcatagttgttggttaatgcctggagaggcttaggtaaatgggttatatctgttagtataaaccctttatcctttatttgttggtataaatctttttatttcaaacagtttttaaactaatgacagccaggagcggtggcacgtctgtagtcccagctactcaagaggctgaggtgggaggacggcctaagcctagaaggttgaggctgcagtgcatcacgattgtctgtgaatagccactgtactccagcctgggcaacatagtgagaccctgtctcataaaaataaaaataattaaattaataatttttataatcattataactcttaggcataattgagtttcttctcattgttaattcttctgtattttaatgtcactaatttgagctttatgcctctaaataaaattattattttaatagctatgtatgccagcattttcgatttatgagtttatttccagttgtaattagatggaaaggccaggttgagttagcagaataaaaaagcttggaaacacctattttacttttatgaggaggaaaatgagtctgttatatataaactaacttgctgagactgaatgatgtgcaatgctttcatttaaaaatataaaatgttgcttaagagacctaagtatagggatatgtgacaatgaatagattaaaattacgtgtaatcaggctgggcgtggtggttcacgcctgtaatcccagcactttgggaggctgaggtgggaggatcacgaggtcaggtgatcgagaccatcctagctaacagtgaaaccccatctctactaaaattacaaaaaattagccgggcgtggtggcaggcgcacgtaatcccagctactcgggaggctgaggataactgcttgaacctgggaggcagaggttgcggtgagctgagatcgcgccattgtattccagcctgggtgacagagcgagactccatctcaaaaaaaaaattatgtgtaatcaacacatcaagcatagaaattatatgaaaattttaagtgttttgaaagttttatttacttatttttgcaagttttattttgttatgcaagaataaatgtccaaatgttagggataatgcagtctacaatgaggttttttgtttgtttgtttgagatgaagtcttgctccgtcgccaaggctggagtacagtggcacaatcttggctcactgcaacctccacctcctgggttcaagcaattctcctgtctcagcctcctgagtagctgggactacaggtgcacgccaccatgcccagctgatttttgtatttttcatagagatggggtttcaccatgtctggatctcttgaccttgtgatctgcctgcctcagcctcccaaagttctgggattacaggtgtgagccaccatacctggcctacaatgaggttttatagcagtaaagaagccatctaatcgtctttccactcttgccacagatcctcaaatttaaatcttattaatttaaatactatgcctggctctaactatgaagataattcttactggtttgttaattgcttccttcaacaattttgcagcttcttcccagttgttttgtttgttttcttcacaaatatttaatggagatcttccttgttggtctgttatatgctagaaatgtgggtggggagggggaaaaaaggcattacatattatggtattctaagggaaaatgtcatccaattaatcacagtttcataaaaaagagactcttgtcaagtactaaagtaaatattaaccacacttggtatgtattatgtttagaataaa

SEQ ID NO: 38679 - DNA, 2300 bp, Homo sapien
gtccttaatagataaaatggtttctgtaattgtgcccatatatcatacagtgtattcacaatacaatgtctttctttttggggcttgcagtcttcaatgcgtctgtctcataatttgtaaacgtttattatcttgaagtcattgttaatctgtggtgaaaagtaattgctaaatagaaattctgagaagaaaaaggcctcatccttttcacatgatgtaggaaggtctgttgcatgaggtgggttttaagaatgattttatacaaaaaattgaactgaaaaaaatttcatgaagtatataatgataaagaatgataacgtcctcaaaacctttcacacaatgaaatgtctctatcctaatgtgtcactgtatttttttctagtgaaatatctgtagggtttttttggatctaaatcaatggaaagttttagaatttaaaataaatttgaaaagtatttaaattattttatttaaaatttttgtacaataattttaatggttgttttaatcttaggctaaagtttatgtaaaatgccaaaagctactgtattttaaaagaatttcttcttagggtaattttacaatcataaggcactttttaattattatttagggaagtgaattaaaagttacagagtgacattttcagttgcagtggaagaaacaggataaattactctatcgcctctcaaataacattcaaaaccctttcttgaaaatggtctatcttgagagttgcagcagtagggaactcattaaatatgaacaggtaattttaatgcctaatggtttttaaaaaactgaagaaagttcatctcaacatagctgggaaagaaactctttaatgttcttttagaaatttactgacaaataaatggggagaagctttttcaaaaaaagataaaaaataatcagtacagaaagatgcactttagtgtagccatgaaagaaatttattcaatgaagaaaactattatacaactaagattgtggttgaaattcagtcacttgttggaaattgcgcaatggagacttaagatttagtgggacaaagtatatgcataacacacacgcacacacacacacagtgaatatatttggaataaaaaatttggattattgacaggtgtggtggctcacgcctgtaatccgagcactttgggaggccgaggcaggtggatcacttgaggtcaggagtttgagaccagcctggccaacatggtaaaactccatctctactaaaagacacaaaaattagccgagcatggtggcacacgcctgttaattctggctactcaggaggctgaggcaggagggagaatcgcctgaacccgggaggcgagggttgcattgaggcgagattgtcactgcactctagcctaagtgacagagcgagactctgtctaaaacaaaacaaaacaaaaatttggattatcaaggaaattgataagggaaatggaaaagattcttaaatcaccttcagaaagcttttatcaactgaccaaatagttttggttctgtgataagcaactccaaagaaaattacatactacgctttagctcatccaaatgtctgatatcaaagttatccttgctgaaagttctggagtaaatgtcaatggatataaaacatctaccatttccagcttccaaactgttaacagtataactaacattcacttttgtaatttatggaaaaagtgtatattattctgaatcactatttcaagtcattatttacaagttattttataatcatcatcacttttttttggccccaaaggcagattcttactatgcagttaacacctatgaaaatgtataaccctattttaaaatgaaaaaagaaatacaaaggaaatcttaaattatcagctaaggttttgagtagttgaacagtaaagatgcagtcaaagtcattcctggcttgccttttaggcactgtatattctaggatagagaacattttatttttttttaattttttcgacatgattatgtggaaataaaagttttcaatttaagatgcattacttttttttatcttgccatcaaatgtgtcatttaatctttcaaaggatttttttatttgttttgtaaagcaatgggaaatccagaaaacatagaagatgcatatgttgctgttattcgtccaaagaatactgccagtctcaattctcgggaatacagagctaagtcatatgaagtaagaacatttaataataatttatttctaccattgaatgtcattctgtattatcattcacatataaagccttattatatcttgtaaagttgta

SEQ ID NO: 38680 - DNA, 2300 bp, Homo sapien
acagacgcattgaagactgcaagccccaaaaagaaagacattgtattgtgaatacactgtatgatatatgggcacaattacagaaaccattttatctattaaggacctaaaagaaaaatcaagtaactcttacttttctaaagacaatttaaagcaaatcaattcctgtcttggtcaactcatgttaagaaaacatttactagcaaagtactttgtcaatactcatcacttctctagaatatttaattaatactgcacagaagcctgaacttttaaaaggtaaacaaatgtgattttaaaaagacataactatgacagtaacagtattttgttttcttaaaccaaatacttttttaccatatccccaaaatattcttaaaattcattttcaagaactattcgtacttgactacttaaaatctacattcttccagtgacatgaaagaaggaaacaaaggcttaacaggaaaataacaaaagtaactaacataggaaggtaaaactgctaagggagaaacacagacaaactgatagaaaatgagtagcttgaactaaaatacaagaaaggtataactagagtttgcaatatgtttagactgagtctgagatgagggttcaagtgaataagtacaggaaacgtggcattttgttatatggctcactccattctggaaaatgttaggcacaaatgataatatgctccctaagtaataagatcttataaataaagcagtggaagtggtccttaattaggggggtggcacctacctgggatcactggaaaatatggagggcatttctggttgtcactatgactgatgaggggagatgtacaactgccatttagtgtccatggaacaggtttgctaacatcctcttagtatgctagacagcgtttgcaaacagaaactgtaaaggcacatatgcactccagaagggtaagaaaataatgaggctgagatcctgagttggaccaccgagatgaaagacttctggtgaggctaaaaacatgtagaaaaagcgatgaaagccaaaaaccttaaaaggtggagaaaagtgtagaggcgagaagtgagttacagggggagaagtgagttagaatgacaagctgtgaatccctttccctgcaatgacaaaaatacgtaatcactctgcctgggaggttttttcctgcgccaccacccgtcaacgtccactactggggaaaaacgtaagcctctttgctcaaagagtttccacccaaaaagtggctatggtttctctgtaactacatgtgaaaaataaactccttgcctggggcaactagatgtggagatggttcagtctcccacctccgttttccctcgctggagtcgaacttgctcctcctgtttcccgaaggacaccgagaggtcccacccgtacgggctgccgcgagtgcctctctggccgctacattcaactaaatgggtgggacagtcacctggcgagggggggcagggaccgtcaccgctttctcattcctccttccctcctcccaggcacagcagcccggcccagcttcctgtggcagaaaaaccctcagtcgccaaaagaaagccgtcttgagggttcccccgcgctcccacccgcgccccaaaagctcaggtctctggagtcggagaccctcctgcccacctgctctttactgtccttccctctcctcgcacctcagcaccattcacccctcaccctctcccgaaactacggggtcccaggtcttcaaaggccttagctttccaccccgccgttaccgtggctatgaaatcgcttccgggttcacaccctttgcagcctcgcggttggcggtgaaagagcttccgggtcggcggccgggctgctgccgttcctgctccttttcactggacctgcagtctctcaggggctggtggcaggcgactaggagactagggtggtggcggtgggggtgccagcggctgagccggagccggagccggaggcgggggaggggaagagggcggccggggctgcgagcgcgcaaggctggaacatgagccgggcttgaccgcgaggcggaggcaagagccaccgccccctcttcccctcccccgagtgaggcggcgcagcggccggagagggatggggggcgcccacccagtctgagcctcgccgcgggcgccttcggctcacgcagcgcttcccgcgggccgccagtgcgcaccctcggccacatcagcctccgcctggcgggtgcacccgggccggcgaggaaggggcaaccgtccgggtgggtggggcgggctgggtacctgaggtcacca

SEQ ID NO: 38681 - DNA, 2300 bp, Homo sapien
aagattgttcgatatgccattccgtgtgaatagagcttgggagactaattctcaaaatctcctcaggagatgctttattacagctctagtttcaatttcctgcgactcaaacagctacgtacagaaaaacagctcatacatacggagaagaataagaatacaggggagcgctccattcttttgttttggtggcagaagctgcaaaaataaaggttcactggagccatctgcacctatccccacccatcacagccctgcagagcacttttacccatccgcttctcaagactctctctagcccccgaggtcggcagaacccgtggctttccacgtctcaaaggatgggggtgggggggaggctgcgaggaaggacacagatcctttgaggacagagggacaaggagatgcatccagatggggaggatgggacgcgtcacggagacccggaggcttgcaaattcgctgggagaaaagccctgtagggcagagaatgctgcctgttcagggatggggacagacagaacaacaatgctccaaaacaggcgacagacacactcctagtagatccgggagggtgtgaagtaggtagctctgaactcggagccacaaatgggtagaggcagcctcaaacacatctgtaccgcgaagctgagacttacggttacttctctcgctgagggtaagggtcggtggacccagcaactccgcagttccgcctccgccgcccctgcctctacagccgagctggtgacctcaggtacccagcccgccccacccacccggacggttgccccttcctcgccggcccgggtgcacccgccaggcggaggctgatgtggccgagggtgcgcactggcggcccgcgggaagcgctgcgtgagccgaaggcgcccgcggcgaggctcagactgggtgggcgccccccatccctctccggccgctgcgccgcctcactcgggggaggggaagagggggcggtggctcttgcctccgcctcgcggtcaagcccggctcatgttccagccttgcgcgctcgcagccccggccgccctcttcccctcccccgcctccggctccggctccggctcagccgctggcacccccaccgccaccaccctagtctcctagtcgcctgccaccagcccctgagagactgcaggtccagtgaaaaggagcaggaacggcagcagcccggccgccgacccggaagctctttcaccgccaaccgcgaggctgcaaagggtgtgaacccggaagcgatttcatagccacggtaacggcggggtggaaagctaaggcctttgaagacctgggaccccgtagtttcgggagagggtgaggggtgaatggtgctgaggtgcgaggagagggaaggacagtaaagagcaggtgggcaggagggtctccgactccagagacctgagcttttggggcgcgggtgggagcgcgggggaaccctcaagacggctttcttttggcgactgagggtttttctgccacaggaagctgggccgggctgctgtgcctgggaggagggaaggaggaatgagaaagcggtgacggtccctgccccccctcgccaggtgactgtcccacccatttagttgaatgtagcggccagagaggcactcgcggcagcccgtacgggtgggacctctcggtgtccttcgggaaacaggaggagcaagttcgactccagcgagggaaaacggaggtgggagactgaaccatctccacatctagttgccccaggcaaggagtttatttttcacatgtagttacagagaaaccatagccactttttgggtggaaactctttgagcaaagaggcttacgtttttccccagtagtggacgttgacgggtggtggcgcaggaaaaaacctcccaggcagagtgattacgtatttttgtcattgcagggaaagggattcacagcttgtcattctaactcacttctccccctgtaactcacttctcgcctctacacttttctccaccttttaaggtttttggctttcatcgctttttctacatgtttttagcctcaccagaagtctttcatctcggtggtccaactcaggatctcagcctcattattttcttacccttctggagtgcatatgtgcctttacagtttctgtttgcaaacgctgtctagcatactaagaggatgttagcaaacctgttccatggacactaaatggcagttgtacatctcccctcatcagtcatagtgacaaccagaaatgccctccatattttccagtgatcccaggtaggtgccacccccctaattaa

SEQ ID NO: 38682 - DNA, 2300 bp, Homo sapien
tatcttccccatcctaccccaaggaaaagagaatcaacaacattttttctaagacttctccaagatagcgcccatcacctcactatagcaccctactcttattcagaaactgaacaattttacagaaagcaaaagccacacccttaataatacactcaactctgcacagtgcttggcttctgtgctaagtacatttccagagacagagttggagctacatctcctgagcctacttcaaattaaaatctgtgaacagtgagaagttacaaatcagataatagcccaaaatcaactgctgaaaggaggttggggggaaaagtcattaaacacatccatctttcttaatgaaatgacaatgtttttcagcaacacaaaacaccaaagctaccagtctacactacacagtagtttgcagaatgacaacctgcagtacacagtaaaattattcttaaattatcgtttgcttcctatggtgctctgaaaagtagcaaatgcataaagtcatataagagctattgtccaatcactgacagcattaaaattatttttaaatctaatttctggaaagttctgcaggagcagtttgaaaagcaaatcaaattctaatgagaaaaaacgcctagttcaaaaatctgaaaatatactttgaagacattcacagtttaagcagcaggagggtcataggcaccaaggtgtgtaacatctgtgagtggctgatacaaaaaaagatttctctggaattaatgattgaaaataattatcaaatacaatctaatatgatctttaaacgtctgtctcaaaagcaacaaagcaaaagcttgtaacaaagcaaaaccttccaatacacagatttttacaccttacacatacccacatacttcacaaattaagaactagatgaaaattagaacactaaaatttaaaggtatctaaaatacactatttgaaacagcagactcttatctttacatttatctgtcagatctaccagtaaagctcttctgaaatggtcattccaatacaagattgttcgatatgccattccgtgtgaatagagcttgggagactaattctcaaaatctcctcaggagatgctttattacagctctagtttcaatttcctgcgactcaaacagctacgtacagaaaaacagctcatacatacggagaagaataagaatacaggggagcgctccattcttttgttttggtggcagaagctgcaaaaataaaggttcactggagccatctgcacctatccccacccatcacagccctgcagagcacttttacccatccgcttctcaagactctctctagcccccgaggtcggcagaacccgtggctttccacgtctcaaaggatgggggtgggggggaggctgcgaggaaggacacagatcctttgaggacagagggacaaggagatgcatccagatggggaggatgggacgcgtcacggagacccggaggcttgcaaattcgctgggagaaaagccctgtagggcagagaatgctgcctgttcagggatggggacagacagaacaacaatgctccaaaacaggcgacagacacactcctagtagatccgggagggtgtgaagtaggtagctctgaactcggagccacaaatgggtagaggcagcctcaaacacatctgtaccgcgaagctgagacttacggttacttctctcgctgagggtaagggtcggtggacccagcaactccgcagttccgcctccgccgcccctgcctctacagccgagctggtgacctcaggtacccagcccgccccacccacccggacggttgccccttcctcgccggcccgggtgcacccgccaggcggaggctgatgtggccgagggtgcgcactggcggcccgcgggaagcgctgcgtgagccgaaggcgcccgcggcgaggctcagactgggtgggcgccccccatccctctccggccgctgcgccgcctcactcgggggaggggaagagggggcggtggctcttgcctccgcctcgcggtcaagcccggctcatgttccagccttgcgcgctcgcagccccggccgccctcttcccctcccccgcctccggctccggctccggctcagccgctggcacccccaccgccaccaccctagtctcctagtcgcctgccaccagcccctgagagactgcaggtccagtgaaaaggagcaggaacggcagcagcccggccgccgacccggaagctctttcaccgccaaccgcgaggctgcaaagggtgtgaacccggaagcgatttcatagccacggtaac

SEQ ID NO: 38683 - DNA, 2300 bp, Homo sapien
tcttggagatcagaatgacattttgattcagaggcctgggcttggaggggtttggggatgaggctgagattcttcatttctaacaaattcccaggagatactactggtccccagaccacacttgcagtaaaaaggttctaggtggtaaatagcagctgctaagaccttgccctcggaatctagaaggtggctgccagaatgacaacttagagccattcttagcaaacatttttctgtaaaggaccagatagtaaatattttaagcattgtggccataggtctatatttcatagtcttgtttgatttgcttatttttacaacttaaaaaccaccttagctctaaggcatacctctggctagagcaagaagctaaagtcaaatccagtgggcttgtcaagttagcccatggcttccagatctggcattgatataagcccgttgttttgtaagcattcttaggactgtaggagaaccgtgaggattcccgttccaaagaactttataggaagattgtgtgtttgttgaggagagaaagaagataaaattatttggaagaaaataaaaagaagctaccattttgatcaactcatgcgaaatgaaaatctctaaaaagtgttaacatttagatcataagtaagagtctgggcagaacttcaagatggacccagaatgcatttcacttcgatttatatgattagtctacctacttacgagtcagtatagtgtccagtcatggttaaaaacttggtcagacttgtatctgaatcccagttctactgcttactagctgggtaattttagttaatcaagctacttaactattctgagatacaataatacccctgttttatggggttgttaatattaaatgagagtgtgtgctttaaagtgtttagaaaacaataaatagtgactgttactatattattatgagtatgactgaatcctataaaagaatcctgtggctgggcgcggtggctcacacctttaatcctagtattttgggaggccaaggcgggtggatcacctgaagtcaggagttcaagactagcctaagcaacatagtgaaacctcatctctactaaaaatacaaaaattagctgggcgtggtggcgggtgcctgtaatcccagctactcgggaggctgaggcaggagaatcacttgaacccaggttgcagtgaaccagaatcatgccattgcactccagtctgggtgacagatcaaaactctgtctcaaaaacaaaaacaaaaataatcctgtgactgtcaggctgtccattagagttgtcctagacatggctttcctggcattcatgcccttcttaatatctttgcagacataatgggaaacttgaacctacagtccttaataacaacatacttaatttctgcaaagctagcagaaacctcattactaaacaagtcaagctactattccatgtgtttttaaaggtgggatttctttgggtcaaagagagatggatagacttagcttcccaatatggctatcagtagctagtcccattacttattttgaagaatattgaaaacagctttacctcagtgacttgctcatcctaatttcatttcagtgtttcactggataatgaatgaaacttttgtctgccatgccaggacatccagactttagtagttaaattaacagtatcagcagtgtccttgtttaagaaagatttatagaaattataagaaatttaaaaatttaaagtactgagtaactataagctttttcaaattttatttttggactacacaaaatgcttaatttctgaagtttaaaaaattggttttgggtttttttaaattattttttaacaagacgaagtcattcattactgaaaaacaagaattactaatcttaaaatcagaagccactggtatctaaataccttttttttttgtcatttcaaatacatactgtacatactgttgcatttttgttgtgttaattttattatatttttaatgttttaaaaatagcatgaaataacttatttgaacctgtagttgcaagtttttgaaaaaaaacttttttagcttttagtaaaacatggaggagacttgtttgctgagaatgaaaataaagatactccttgtgattgtgctgaaaagcaacaccacaaagatttggccctcaatctggaatctcaaatggtattctcacgggatcccgaggctgaagaaatagaagctgaatatgctgcattagacaaacgagaggtcagtttattttttcttctcagtaaaaaaattacatgtaattttagattttatgttg

SEQ ID NO: 38684 - DNA, 2300 bp, Homo sapien
tttctttagatgaccaaaatttgtaattctcatatttttgttattatatagcttttataacattaccatattttcttttttgagagctatccattccatttttctttaagactgggacagggagaaattacttgaagcttggatgtccaacccggagaactgctgccaacgatcaggtgttcaaatgccaactccaccaccaagtgggtataatgcctgggacacgctcccatctccaagaactccaaggactacacgctcttctgtcacctccccagatgaaatcagcttatctcctggggatttagacaccagtttggtatggtttggtattcactgtacttctcatagctttgtttatagtcttttaacattcaaatgatttaatattgttccatggagtgtctggttgtgttcttgtaattgaatcctatccctttcttgaaaggttcggttatttccatgcttcagtaaatatttattattacagaatgtttttgtgatctctgaattatagattgaaaaaaaaaggttttctttcctcatttccaaacagagaacttaaaacagtttagggaaaccatctattttattttcccttaaaacttcagttgcttaatgatttaaatacaggccaggcacagtaagtagctcatgcctataatcctagcactttgggaggccaaggtgggtggattgcctgagctcaggagttcaagactagcctgggcaacatagccagaccccatctcaaaatacatacacacatatatacatcatattgaaatataaaaagataagtttgtgatgggcactgtaaaccgaaaatacaaaaacattttttataatttcttgaaaggtaatttttaagcatttacaatatattgatagttatgtatttgtttcagtaaagcttctggagtttgttatctagatgcatttccaaaataagtgttttattattttatgaaacagtactgccattgtcagcatttttaactggcatatcattggtgtgctactataggagattttaatatttcttgaatgactcagccactcaaaatatgtgataaatatgaaagtgcttctcattttatctgtgcctttttggaaaacagaatcctgtaatttgcatatgtaacgtgataaattttgcttctagagagctattgtttagaagatactaggtaggcgcaaaagtgattgcagcttttgctattaaaatggcatagttttaatacataggtgggttttttgttgttgttttgtgtttttggttttttttttttttttttttttttttttgagacggagtttcactcttgttgccgaggctggagtgtaatggcatgacctcggctccctgcaacctccacctcccagattcaggtgattctcctgcctcagcctcctgagtagctgggattacagacatgcaccaccacacccagctaatttttgtatttttggtagagacagggtttcaccatgttggtcaggctggtcttgaactcctgacctcaagtgatctgcccacctcggcctcgcaaagtgctgggattacaggtgtgagccaccgcgcccggcctaatacttagttttatagcagggttctctccctggaaagtgtggatatcttgagttgctgcattaaaaatacaaagttactctgttttcatagattttgaagggtaggtgtaatgtgaagggcatgatactgaagtggttttttgcaacatgtaatttgatgttggcccaaatgatttgtttcttgtacttcgttttccaaacgcacagttgctgattaatacataaatttggaatttaagggtttgatttttgcattaaaacatttaaatcccacttttatttatagtgaggtagtcatggtatttgttactgaaaggcacactaactgtccttaaaactttgaaagaggtaactttcaaaaacttttaattactgtactagtatttttgccttttaaaaaagtaaacaaaatgtattgttctctttcagaagtacatttctgtttaaatcattgttcttcttcatctccagtgtgacatttgtatgtgcagtatctctgtatttgaagaccctgtggatatgccctgtggacatgacttttgtagaggatgttgggagtcgtgagtatatgagcaccttagcatctcttactgcatgatagcactctgatttgttaataaaattgtttgctttcagtatttaatgatgcaaattgtttatattgacttctgagttacacagaaatgaatttagactttactagtaag

SEQ ID NO: 38685 - DNA, 2300 bp, Homo sapien
tagagaaatcaaggaagataaaaactgaattctttaataagttgggctaatgggtagtcattgtggcccagtgaagaggtgatagcagccagatgctacagattgagaagtgaatgagatgggcttgaggaaggaataacagatcatcataaactattttgtcaagaaactttgatgtgaaagaaaaagaaaatggaagagagtcatgtggttagtaagggtttttaaaatgggaaaaacttgagcatgtttattgtgcccaaggtaagagccattagaaagtaaaagagagaaaggataggttattggatagtgcaagtcccagagctggccagaggatttgaggattagcctggggtttaaagagaaagctctccctttcacagaagtgagtgggaagaaaggaaagaatgctaaagatactgctaggtttgaggtgtggtagagagcacttggagtgagagaactgactgttggggattctcttttctatgaattgcccagacgaggatatgaaagagaagatggagcaaagggaacgggcctgccaaggtctcagtaaggttgtcgttgctgctgttgttgttgttaagtgcagtggaattaagagaatgagagaactaaagaaaaaagatactatagttagtgaaataatcaaaatgttgatggtgaggactaagcagttagatttaattgcctggttttccatttattttctctagatttaagtgttaaattcaatatacagtaatctgtacttcaaaagtttgtttcttgcttttctaagggcagtactaaataataataacaataataatccttgctaaaatttatgaattcttactctatgtcatgcaccatgtagatttttcacatatataatctgtttaacaaccctgggaagttcatattattatctccattttacatatggtgaaactgaggcttagagcagttaaataaattgcttaagatcatatggcttgttggtggcagatctggaattttctaactcagaaccctgcttttagctggacatggtagtacatgcgtgtaatcccagctactcactcaggaggctgaggtgggaggatcacttaatcccaggagtttgagaccaacctaggcaaagagagaccccatcttaaaaaaaaaaaaaagaaagaaaaggaaagaaaaaaaagaaccctgcttttaatctaaccttgggctagattcttgatacttttttacagggcattttttcctcactactcaagtatacctaagtaggaaataaaacttattttaatattcatctaagtgaaatataaaaagaaaacctataaacctattcttcaaaaaactatgctatattttaatgccatcccaaaatatcttgaattatctatggctcatttctataccattgcccccttttctttaaagctgtagcatattgagaattgaatatgacctttctgagccactcatttctgaatttttaattttaaataaaaatactttttcagattgtttcagatttttagagagggtaaagcaaaatagaaacataaaatatgaaacatacgagtgtatgtatatatgtgtatgcatatatattgatatataaaatgaatgccttaacagataatgtgcattacaattgctgtttcacacttttgttggtattattttaattacactctgacaaaaagttcagcataaaggaaaattggccagacacagtagttcacgcatataaccccagggctttgggaggccaaggcaggagaatcgcttgagaccaggggttcgagatcagtctggacaacatagcaagacccatcgctagcaaaaatttaaaaattagcccagcatagcagcatatagctgtaggcctagctactcagaagaccgaggtgagaggattgcttcagcccaagagtatgaggctacagtgatctgtgatcgtgccactgcactccaacctgagtgatggaatgagaccctgtctctaaaaaaaaaaggaaagaaaaaggaaaattcttagaatgtatgcacaacttaatatccttgctcgtttgatgtgcattgatccattttaataggtttttgaatctgaaaattcaagaaggtgaagctcacaacattttttgccctgcatatgattgcttccaacttgtacctgtggatatcatagaaagtgtagtttcaaaggagatggacaaacgatacctacagtttgatattaaggtaaggtatactgccaattatctgtccaatttccataattttgattttattaaacctttataaca

SEQ ID NO: 38686 - DNA, 2300 bp, Homo sapien
tctgcttctggtgctcagcccttccaatccatacacagagccacttcccaggggtcagtgagcccaaacctttgtcccccttacttccccaggggcttatatctaggggttgggtaacttttctttttgaatttcaaactgcaaggggtctgatttctctcctgctttgacagtagagccaaccatttaccccaccacccttctgaaagtgactgcatgtaaacaaagctttgattagatgggccactttcagtgattctaaaatgattttctggcatctctttgagtaaagaaaatgtaggccttctcagtgcacttagagttaaaaaagaaaataaaacaaaaccaacttgattgctgacattcttgcaggaaaaaaatttttaatcatgcatctggaactctctagcccctaactctgtccatggaagggagagggaagtttataaaatgtaaaatttagaatctttaaaaaccatggcattccttaagattgcagatctcaaattatagtaaaataagttgagtttaagaaaatgaagagtataagtttgattagggatggagggtgagaggagcttgccagatgggccatatcataataggctttatattctttgcaaaagcaattggattttatcttgtagtcaatggggagcaaattaaaagattttaagtggtgtgtattctaaaaagatcactgtgggatgggtggctggcaggggatgggaggatgaagaaaagttgggtaatgggggccgggcacggtggctcactcctgtaatcccagcactttgggaggccgaggcgggcggatcacgaggtcaggagatcgagaccatcctggctaacatggtgaaaccccatgtctactaaaaatacaaaaaattagccaggcgtggtggcaggcgcctatagtcccagctactcgggaggctgaggcaggagaatggcatgaacccgggaggtggagcttgcagtgagccgagatcgagccactgcactccagcctgggtgacagagcaagactcttgtctcaaaaaaaaaaaaaaaaaaaaaaaaaaaaaaaagttggttaatggggacaaacatagagttagatagaggacaatatttcttatatttcaaaacaactagaagggaggacttgaaatgataccaacacatagaaatgataattactcaaggtggtgggtacttcagatgtcctgacttattacacattctatgcacattacagtcacatctacccataaatatgtaaaatattttgtgtcaataaaagaaaaacatggagagatttttaaaaaatcactgtgccagcagtgtagttggaggtgggcccttgaaggaactggggagataagttggttttctatgctttaattgtctaggcaagaggtatgaaggaccctagcttaaagcaataagaactgggaatggagaggaaccagatatgatagagaaagagggtgtaataaatgagatgcttagttttagatatgtcacattgaattaattttaagcttatccagaataatcatggataaaaaagatgttgatattttttgctttttactatggtaaagagtttctgatcattatatttgcatctggcctgttaagtaaattattttctaaagtaattgttctttctgtaattttctgtgatacaatagttattttaaatggagtaatatgttgcttttttttttttaaatttttttgtgtatattgtttttgatcccagtttatttgggcacaagtttatggagaaatcgcccttaaaccaggtttcacgaataggtcttttggaatagagttccttatcttaggctattcaaaatgaagcagtttaaaagtgttgccacagaccctgatcagaaaataaatattttattaaaattgagagacagcctgcaaagaaaagtgtggagggtttttttttcccccagaagttgtacactaaatcatttatttttgtgattgtgtttaatatcccaaagttgtgggagttagtgaagcctacgaggatgccgccaattgtctctggttattaactaactccaagccttgtgccaactgtaagtctccaatacagaagaatgaaggctgcaatcacatgcagtgtgctaaggtaagaagttaaagaggattttgcatgctttgcatttggaatcttaatttagtttgattgtcaatccaaaggataaattatttgagggggcctggtgcagtggctcttgcctataatcccagcacttcaggaggttgaggcaggaggatcacttgaggccagg

SEQ ID NO: 38687 - DNA, 2300 bp, Homo sapien
aaagatcccacattgccaagacaatcctaagcaaaaagaacaaagcttgaggcatcacactacctgacttcaaactatagtacaaggctacagtaaccaaaacagcatggtactggtaccaaaacagagatatagaccaatggaacagaacagaggcctcagaaataacaccatgcatccacagccatctgatctttgacaaacctgacaaaaacaagaaatggggaaaggattccctgtttaataaatggtgctgggaaaactggctacccatatgtagaaagctgaaactggatcccttccttacaccttatacaaaaattaattcacgatgcattaaagacttaactattagacctaaaaccataaaaaccgtagaagaaaagctaggcaataccattcaggacataggcatggacaaggacttcatgactaaaacaccaaaagcaatggcaacaaaagccaaaatagaaacatgggatctgattaaactaaagagtttctgcatagcaaaagaaactaccatcagagtgaacaggcaaacctcagcatgggagaaaatttttgcaattacccatctgacaaggggctagtatctagaacctacaaagaacttaaaccaatttacaagaaaaaaacaaccccatcaaaaagtgggcaaaggatatgaacagacacttttcaaaaggagacatttatgcagccaacaggcatgaaaaaatgctcatcatcactggccatcagagaaatgcaaatcaaaaccacaatgagataccatctcacaccagttagaatggcgatcattaaaaagtcaggaaacaacaggttgctggagaggatgtggaaaaataggaacgcttttacactgttagtgggagtgtaaactagttcaaccattatggaagacagtgtggcgatttctcaagtatctagaactagaaataccatttgatccagcgatcccattactgggtatatacccaaaggattataaatcatgctactgtaaagacacatgcacatatatgtttattgcagcactattcacaatagcaaaaacttggaaccaacccaaatgtccatcaatgatagactggattaagaaaatgtggtacatatacaccatggaatactatgtagccataaaaaaagatgagttcatgtcctttgtagccacatggatgaagctggaaaccattattctgagcaaactatcacaaggacagaaaaacgaacaccacatgttttcactcataggtgggaattgaacaatgagaacacttggacacagggcagggaacatcacatactggggcctgtcgtggtgtgggaggatgggggaaggatagcattaggagaaatacctaatgtaaatgacaagttagtgggtgcagcaaaccaacacgggacatgtatacatatgtgacaagcctgcaccttgtgcacatgtaccctagaacttaatgtataataaaaataaaataaaaaataaataaaccattaagagtacctgaagacaacatagaatgggaagatctttttaactgactcaaaatcctaagcataagaaaggatgtattttcatactgaatgctcatatttttggcactgtctgataattatggtaattaagttggaatttacattaaaatgggaaaccgtttttatatcagctgttccacttagaggtcttttaagcgtagttctagtttcaaaaccaatttgtcaatattgccagaagtttttcagatagactggtggagctttatatacaaatgtcagattagaatgcacttaaaaatgaaacactttccaaagatattatttggaaagaatggttccttgtgattacttcataatattatgctttacattttaatatatccctataaacaataattttaaactacccccacatctttccataatgcagataaggtctccagaggacacatgagaaatagggcatgtctttgagaagatttattactggtcacacaagcacaattatttaatctttacagattggttggctataaagcagaaaataatttgcatattaatatggggagatgttttcatctgtgttttcttttgaagtgcaagtatgacttttgctggatttgccttgaagagtggaaaaaacatagttcgtccactggaggttattacagatgtactcgctatgaagtcattcaacacgtggaggagcaatccaaggaaatgactgtggaggtaaagagaaccaattaagccaagacatctctctaaaccgctcactgccactggaattattttgt

SEQ ID NO: 38688 - DNA, 2300 bp, Homo sapien
tgagctgacctatactgttgtgaataaataaagagaatggtttaaattctttatttctattcctttagctagaacaacgccttcttaaaacagccaaagaaaagatggagcaattgagcagagctctcaaagaaagtaagttataagttgtatgtgtgataattaatataaaatatctttccatgcttgtcatttcactagtaggttaggccctgaaaggaatacattatgttcattagcttgttctggtactgttttgagttctttgaagccctgagtgcagcttagcagatgaggcctctgtgattggattttctacccagcacctagcctcctcctcttgatgcagcctgtggtgttatgagataaaaacacttcatgattttgcttactctgtgtcactgctgatgctctacaatgttgggaaaagtggatgggtactaaaggacatcactgacttagtcagaggagcaagatacacgtgctacccaattgtcatgtaactgaatacccaaaaattattgagaaaatttaacagagtgcctaagggcgtggaagtcaataacagtttgggaagaaatcatttcactggtaaataatgaacattggggtcaaaaagcgaagccatgaggtggagctaacgtataggtcctaaattataagttagaatattccaaaatatggattgagtattgacaacatcattagaatataataacccacaacgaccacacagagtgcaggttctggtatgtttgttttaaaaagtcaccttttaaaaataatagctcacatatgaaaagtacattttaaggtgaaaaatgtgatgttatacttgggttgctccagtttatcaaaataatgaatattaaaatccttttcattaggataattccctagtcaagacaataccataagttaaatggagtgggggagaatatgtcaatagcagtatagcctgcttgttaattattagttcttagacttcattaatgatataactatattaggcaatatcaaactcttgaagtattgtccacagtataaattgagaggaaaaaagtcctcacaagtcgtacagctcttcagcagggatttttgtctggtcactaatacatccctagtgcttccagctgtgcctgacccttaacaacattcaatatttgtagatgtgaattattgcttctattcaacattctggaggttccaggcagcataataaattaggggaaaaaaacaaaaagatacagcaattgcaaaggaagaagcaaaacttcacacatttctcacataagtcagaaatctcagggtcgtctgtcagtttgtgtacacatactgaatttctttctacaggtatccaaaataatctgagtttctgcagtatttgcaaagttagattctcatgcttaatttctggtttttttctggttttgttttttttttggcagttaagtgaaaacctagactgttataatgatgttcttaaaacaaagagtctcagatattaaggcaatttagtcttccatcttcctcattcttcctccccttctttctttggattttttattaactaggattagttatctagttgtttgccagaatgttgtatctttttccttacggtattggttttgcataattaggctctttttataagcaacttagaaaaggcatttgttctcattcttaaccagggaaattctgctagggataatctgaaaaagtaaagcctagaaccttttggttgacctaaagctagatttgcttaccaatggagtgagaccagaatccaagatgagtatgtgcattcctttatgactaccatcagtgttcctgggctgctggggcatatgcttcttttataaacacatacatgtcacacatgagtattttatgtaggtttttagtttggttcaaataagtattttcatacagttacttaaaacagtttttgtcctaatgatccttctttttccttttttgagaaaaaaaatcattgtttaattaatattataaatggcatatttgcaaaaacaaattcactgtgcctcaattactttttagctgaaggaggctgtccagataccactttcattgaagatgcagttcatgtgctcttaaaaactcggcgcattctcaagtgttcttatccatatggatttttcttggaacctaaaagcacaaagaaagaaatttttgaactaatgcaagtaagatttttttaattacatttaaatggcagcagttattatgaaatacagaatttttcatttttgaaaccacttgttttatttaatgtg

SEQ ID NO: 38689 - DNA, 2300 bp, Homo sapien
ccaaagtgttgggattacaggcatgagccactacgcctggcctcttctcacctctttggttctgtagctgggcatgggaattacactaacataagacagatttactggaaaaggcataaaagttttaatatttttgtacatgcacaggaggctttgtaagaaaaataaagacccatagaagttactaggcccgaaagcttatatgtccttttaaacaaaaaataataaattgcagggatgtgacaagacaaaggggcttgggctaaggctggcaaattgtgggaaagtgacgaagaaccgtatgtagaaagttaatggaaaatatgggttacaaatttttgtaaggttttgtttgtagattcttctcagtggcaactctgcctctggcaataatattctcctcttcctggtacagaaagggcacctttcacaagggaacttttatgttccgcttcaaacagaaagagggtggtcagacagccttccctgcatctgtttttgctccattgcctctggctcagaagaatcagtatgccaaagtggcatattttaggatggcaggctctaaacaccttcagcattgttctaaagtgagacaacactctttacctagtctcctcagccacttttacagttggccctaatccccataacagtcctggaaacttatttttactgttaaggaaactgagatttagaggggaggtgactgagccacaacccacaccccagagggctgttccaaagccctcctcgaaattggtgccaagggcagcagctataatgacagccagtccacatagaagtgcctccgttgatcaccaattaacagtaaaatctgataatatctcattccaaggttgttataagcactaaatgtggttttgtgacataataggcgtttgtttctccccactgcttcccaccacaatatattcatcaagacctttccaaggatactaagtctaggaaacccaggatcatgaagagagggcatgttcttccaagtgaggctgaggagagacttgtctggcgaggcctgtactgactagtgacattaaaagaggcgatctgacttctcatactgctcttgtcccaggcctgctgtttgtcaactgctgggtcctcagagccaaaactgttttccaacagttttgaattgaataacagccagctattcgattttctccgcattctctaatcggtatactcttcagagtccacaggatttgcaacgatattatccaacggctgaagaatgtgcgcttgacatcttaggctgtaaaatgtctcaatttcaatttctaatacatagatgtcagtggatggcattttctgaaccctttgtcgatgtccataaacggcatgctctgaattcaactaaacaaaagtatagacatgggggaggtgtagggcgatgtccaaagtataatttttaagagtgtaaagggttcctaagtaagattgccagattttttttttttttttgagacggagtctcactctatcccccaggctggagtgcaatggcgcgatcttggctcactgcagcctccacctcccgcgctcaagagattcttctgccgcagcctccagggtagctgggattaccccagagcccgccactgagcccggctaatttttgtatatttattagagaaggggtttcaccacgttggccaggctgatctcgaactcctgagctcaagtaatccgccggccttggtctcccaaagtgctgggattgcaggcgtgagccaccacgccagacctggattgccagatttagcacataaaaatacaggacccccagttaaacgcctctcggataaaccattattgcatgggatacactcacgctaaaaaaattgttcgtcgtttacctgaaagtcacatttaattgggcgtcctgtattttacccggcaaattctaggcctgagaccaaaaagtttgagaaccctgcccctaggcgacagcaagcggaactgcagcaagctcccagtaattccgggtgctgcacttccggtcaggcggtcgggctgcggggccctggggccagctcaccgccggaagtctccgcgtcccccccaccccggccagatccctttcccagtcctgcttcccagtgcctcgggccagggaatcctggcctccgcctgcggagccggcggaacccgcttcccgcctccacggggcagcgccagcggcctggtcctttcaccggcagctccgtgccgacgctctcaccgctcttcctatcgccgggagtggcgggccgaccagggggcggccgggctac

SEQ ID NO: 38690 - DNA, 2300 bp, Homo sapien
ctctcaccgctcttcctatcgccgggagtggcgggccgaccagggggcggccgggctaccgtccgccattcccgtgtctctgcgcccgcgggggccgcccgagccggccaccatgccgctgggcctgaagcccacctgcagcgtatgcaagaccacgtcgtcctccatgtggaagaagggagcgcagggggagatcctctgccatcattgcactggccggggcggcgcgggcagcgggggcgcaggctcgggggcggctggagggactgggggcagcggcggcggcggcttcggcgcggcgaccttcgccagcacctccgccacccctccgcagagcaacgggggcgggggcggcaagcaggtgagctcctccggcccctcccgccggcggaggccgaccaggtgctaggcgggcggggacgggctggctgggagcgggcgggcgcgggcttccccgatcgccgtgctcctgctggctggaacgcccctccccacctcctactgagatctttcgtttggcccattccgaagcacctgttattgtaagaaattcaaagcaataagaaccaagatgtaaagcccttaagaaaatctcaatatacacatgtctacacagtcgtatacagtgtcatgccacaaatgcaggcgctggacctcattccttgttaaaggttttgtcatatcaggttatgaagtaagattattatgtcattattgtaaatggcagcttaagtattccgttgcagggggcgccataacctactacgttctctggccttagggagtaaagttgttaagtgtttttctctattgtagacacaacaaatgaatagtgtttgtcttggtcaagactgactcctactcccgcctcctgccctattacaagcagctcacaccttttggaggctctggagacgcctgtccagcgagctccgagattccgggtgctgaacttccggttttacttagcctagttgctgtaattacttctcttgaaaagcaaaagggcaatcttaattgttaaatgctcttataaagtacatactctgggatccttgtaagatgattgtactgcaacctttatgcactttttacttctttctctttttgttctttaatttgtttgtgtaacagagtaagcaggaaattcacaggaggtctgctcggctcagaaacactaaatacaaatctgctccggctgctgaaaagaaagtctccaccaaaggaaaagggagaagacatatatttaaattgaaaaatgtaagatatttgtggacagtgccttttactgtaatgacgttgtgtgtatcctgccactgccttcatttctcaccattgaacttggactctgcccttggtagcccttccttagtattctggggaatggtccagattccccaaaagggaatgagctctgttgcaggaggctcactgtttataaagttaataatactctttcctttttgttttttagcttttattttttcccctggaaaatataaaatatgggtttaaaagaaacatcaaccttgagcccattttttggggttctctatggaaaggaagaggagagattatggttcttgatatggccaggtacactaagaaaacttttttttttcattctttaaaaatctaagtaaatattaacactagaactcatcatttgcatatttatttgttattaaagccccagaaaatgtatcttactgacttatgatgatgatgtatttgatgaatatgagtcaaaaattttgctaagccttatctcctcttctgctctaagaaaagagattgttgaaagacctgtgctggaagtagttgaaagcatatttttattgcaattaaattctcagtttttataaacaagggataatgttcaaacacagtggacagtgcattatggactatttttttaagtctcagtatgatattcttttctttcagaacaggaatgtttcacttacccgtaaagacgtttctgaagttggccatatttatttctaaaacacaaagggaccctgcagtagacttatgcagatggcagactattttctttttttttttttaatttaatttaatgaattttttttaattttactttaagttctgggatacatgtgcagaatgtgcaggtttgttacataggtatacgtgccatggtggtttgctgcacctatcaacccatcatctaggttttaagccccgcatgcattagatatttgtcctaatgctctccctccccttggcccccatctccgacaggccccagtgtgtgatgttcccttccccaaagtatt

SEQ ID NO: 38691 - DNA, 2300 bp, Homo sapien
aggaaaggtagaatggactaatggtcttttaaaaacacaccccaccaaactcagcctccaacttaaaaaggaggatagagcccaaaaactcgcaaccaagctagtaattatgctgaacccccttgggcactctctaattggatgtcttaggtcctcccaaatcttagtcctttaatatctgtttttctccttctcttattcggaccttgtgtcttccgtttagtttttcaattcatacaaaaccgcatccaggccatcaccaatcgttctatacaataaatgctccttctaacaaccccacaatatcgccccttaccacaaaatcttccttcagcttaatctctcccactctaggttcccatgccgcccataatccctctcgaagcagccctgagaaacatagcccattatctctccataccacccccaaaatttttgctgccccaacacttcaacactattttacattatttttcttattaatataagaagacagcaatgtcaggcctctgagcccaagccatcatatcccctgtgacctgcacatatacatccagatggcctgaagtaactgaagaatcacaaaagaagtgaaaatggcctgttcctgccttaaccgatgacattccaccactgtgatttgttcctgccccaccttaactgagcaattaaccttgggaaattccttctcctggctcaaaacctcccccactgagcaccttgtgacccctgcccctccactacccacccaaatcctataaaatggccccaccccatctcccttagctgactccttttttggactcagcccgcctgcacccaggtgaaataaacagccttgttgctcacacaaagcctgtttggtggactctcttcacagggacgggggtgacaacaacacggacacacatggagtggttttaaggagcagagagtttaatacgcaaaaaagaaggaagaggctcccctgtacagacacagagggagggggctccaagccgagagaaggaaaccccatgtgcagtggaaaagtggttgattatactgggaggctggaggaggcggtgtctgatttgcacagggcccaggggattgggttgaccaggtgtatcattcatgtaccccgcaaaaaacctggccctcccacctcagccctttaatatgcaaatgtgggttgccatgatgttctgaaaacacatgaattatctggagggggccatgacacttggtacatgtgctgacaagaagagggtgggaatcgccatggtggccatgttgggtggacctagtttttaatagcctgcatttgcatatcaaagtttgctggcctggctctttaagctgtcttttctgttagaaaaggaatggtttggaatgggtgagggttgcttcttattacaagaaaatttccaaaaacctttactctttctagctgccaaaaaactatttcttaataacttatgtattaccataattaggcagcaccaaagatccctgcaggtcagaccactgcaattaacatgctggctttactgctgattatggtagctgcatccacctagcctctcatattgcaactgcctgacctctgccaccccacgagccacttatccccacttataatcagcccatttcgattgtaacatctgccacttattcccgacgttgtggtatatcctatagatgaattcattcaacatccattccaacaccacctctcttgccttcctatactctctggagagtgaattactgagtcacatgatcttcactgcagtcatttgtggctatgtgacatagttctggacagtgaacatagacagaagtccctggggcgggcttcctttctgggatgagggcaaaacgcctggagatacagcaattatcttgcaactgagagacaggactagctggatttcctaggccgactaagaatccctaagcctagctgggaaggtgaccacgtccacctttaaacacggggcttgcaacttagctcacacctgaccaatcagagagctcactaaaatgctaattaggcaaagacaggaggtaaagaaatagccaatcatctattgcctgagagcacagcaggagggacaacaatcgggatataaacccaggcattcgagctggcaacagcagcccccctttgggtcccttccctttgtatgggagctgttttcatgctatttcactctattaaatcttgcaactgcactcttctggtccatgtttcttacggctcgagctgagcttttgctcaccgtccaccactgctgtttgccaccaccgcagac

SEQ ID NO: 38692 - DNA, 2300 bp, Homo sapien
ttaacaacttaaaatgatgaccttttaacaaaataaaacactcataataacattaaataaaaacaccaggacacaaaactgtacgtgtgtatacaggacctcatttatgttaaaaataaagattagaaacaaaactggaagatttgatccaaactgtcaacattagtcacctctaagttctgggattatgggtaacttattttcttgttaataattttccatgctttccaaattttctataaaacataaattctataaatttatataattcatcgaggaataaatgtatagatttatggaatctataaagtaataaacttattacattgataattagaaagtaaagttgacctattctgctaatatgggctgaacagaaacagcaatttgttccagggctaaagacatttacatttcaaaaagatatgcatgaattaattcttataagtacttcccgaaggctcaaaatttaaaacaaagatcaagaccactaaattcttaaacagtgatgaatgtaaggtaacaactacatcttaggatcaaattagagttactgtaagaaagcattcctactattaagtgcagatttgaaaacatgttgaaaaatcccatcgaagctgacagagcactgaaccaacttctacctggaacttggtgacagtgactgatttgtctctagccataaagcccatcaaaaaccaaaagattgtctacttagtggtaaaaaataataacgacgatgataggaggattctgctgaactcatgttttcagtggaccaaaaatatcttcccctaggtatggggaagtaactcaagtggaaagaagggatgcttgaaattattgcaaactctattcattgcatagattagccactggtgggtaccatgcatccaggatttatgaggatttcaaatacgccgtccttttgcccccataagtacactcaaactcgtgagaccatgtgcctctatttttaattatgaaaatatggacgctgtatctccaccagtggttagaactgtgaaacatcctaaccacaacgtccagaagggcgactgatcgcagagcttcaagtgatcttaactacgttatgtgttcctaacacactacagctgtgttccgcgtcagcgacgcagggcagaaccatcattgtattaacctttcccgctcatgggacgcggtgcttagtccccgggaaccgacaggggctccgccaacaactctgcgtcccgctctcgcggcccggacggcagcagcgcaggttaactggaaatggctggcaaggaaaacaccttttaaaataataaaaacaaaccacttctcaggagcttttccagcctggaataaggaatatttataaaaacagtggtagaatattaggacgtttctaggttcagtttcaccaagtgaaaagacctgggataagacgagcccagggctgcactggacttgtgggatccagagactacccagaagggccctgccgtcgagggaccctgatctctgcgcgcttcggcggcgcccgggtggcagccggtgtcccgccgcgtccctgagaggcttcggcctcgtccgaccccaggctgaagatcaggtggctcggggccggcaggttacctgcagcagatgcagctgggccacgagacgccgcggcaggtggaggaagcagtcgcgagcgttggtgaaggccacagtcactgccgccccgcctcccccagcacccgccaggcgatcgctgccccacatcgtcccggagcgtcgctctgggttcgcccaccctagcgccgcaaaggacccgggacccggcaggccgaggacgtcggagccggaggagatcgatcggccccgccccctgcggccccgccccctctccccgctgcgcatcctgccgtaagcctgtagtgggtgggacaagaaagcttctgtcacccaccgcgcctctccgccgagccgctcgggggcggcacctcgttcatcaaatcttcgcacgcaggaaacgatggccgacgctgtcgattctccagccaatcctggcactccttaactcatcccgctctcttattggataaaagggagctcagtagggcggatgttgtcctccctgcgaggatcaaagtaggcaagatggcgtcgagcggcggggagctagggagtttatttgatcaccacgtccagagggcggtatgcgacacacgggccaaatatcgagagggacgacggcctcgtgctgtgaaggtaaagtgattttggtttcattcgctctcctcggtagctttatgtgagtgctagcgccatat

SEQ ID NO: 38693 - DNA, 2300 bp, Homo sapien
tcctgacctcaggtgatccacctacctcgacctcccaaagtgctgggattacaggtgtgagccacgtgcctggcgtcaaaccagaatttttttttttttttgagacagagccttgctctgtcatctaggctggagggcagtggcatgatctctgctcactgcaatctccacctcccaggttcaagcaattcccatgcctcagccacctgagtagctgggactacaggtccgcaccaccacacccggctaatttttgtatttttagtagaggaggggtttccatcatgttggccaggcttgtcttgaacccctgacctcaagtgatctgcctgcctcggtctcccaaagtgctgggattacaggcgtgagtcaccacgcccaggcttcaaacccaaattttttttttttttttttttttgaggcagagcttccctcttgttgccctgtctggagtgcaatggcgcaatctcggctcactgcaacctctgcctcccggtttcaagcgattctcctgcctcagcctcccgagtagctgggattacaggcctgcgccactagacccagctaattttgtatttttagtagagaggggggtttcaccatgttggccaggctggtctcaaactcctgacctcgtgatccgcccacctcggtctcccagagtgctgggattgcaggcgtgagccaccgtgcctggccaaacccaacttctactctaccaagctacaggacattaaattgttaagcatgggaatgatgtgatggatacagtgtttcagtaaagttaacttttaaaaaggctggaggaagatatgctagattacgttttggggtaattcagttatgaatgagggaaacttggggccaaaatgacagaaatatgaatggaagaaatgaggaaatgagtcatttcttaacttgcacattaccttgcactttgtaagttcataaatttaataagataaacttcagtaaagtcttctgctgggtattcatctagagcattgtactgttcaattgcaccatataaagcgaatcgctcaactaattccttcatgactcccacagcaggaactccttgtattaataagtactgagattccaaattgattgtatatacctgaaagaaatgcagagttattaaacgtatttcgcaaataagcctaggacgaatctgcctctatttttttttaaagagaactttgaaaacaagaaataatctgttcaacccagtcagcaaaagaacacaaaatgaaatttctgccattccttctgcataaagaataacagtccatgtgagaggctacctaaggcatataacagactaccttcagtcgacatttttttccagaaattgagtcggtagaagtcactgggaacaatcactcaacgaatattcactgagtgcttacctgtgccaagtagtactgtaaacacagaagatccaatgactaaaaccaaggcctattctcgtggagttgatgttctaatacttgaccaaaggcgtcgtgagaatctttggtaactgaccgagggttcttcacgccagctctaacgagagacagatctgacggaagccttgtcgtgcctttatttccgtaggctggtcatatggcgctagcactcacataaagctaccgaggagagcgaatgaaaccaaaatcactttaccttcacagcacgaggccgtcgtccctctcgatatttggcccgtgtgtcgcataccgccctctggacgtggtgatcaaataaactccctagctccccgccgctcgacgccatcttgcctactttgatcctcgcagggaggacaacatccgccctactgagctcccttttatccaataagagagcgggatgagttaaggagtgccaggattggctggagaatcgacagcgtcggccatcgtttcctgcgtgcgaagatttgatgaacgaggtgccgcccccgagcggctcggcggagaggcgcggtgggtgacagaagctttcttgtcccacccactacaggcttacggcaggatgcgcagcggggagagggggcggggccgcagggggcggggccgatcgatctcctccggctccgacgtcctcggcctgccgggtcccgggtcctttgcggcgctagggtgggcgaacccagagcgacgctccgggacgatgtggggcagcgatcgcctggcgggtgctgggggaggcggggcggcagtgactgtggccttcaccaacgctcgcgactgcttcctccacctgccgcggcgtctcgtggcccagctgcatctgctgcaggtaacctgccg

SEQ ID NO: 38694 - DNA, 2300 bp, Homo sapien
tgtatttccattcaggacagccaagagaaaaatggatgaacagagtttcttcggtggattgcttcatgtgtgctatgctccagaatttgaaacagttgaagaaactagaaaaaaactacaaatgcggaaggcatatgtagtaaaaactactgaaaataaaggtatggaaagcatattgctaaatgcctcctgtgtgtcaggcactctgccaggtgtgtcatcatgcaattcccagtctagtggtaggagaggcaagtaaaccatcacagtattcagtaactgtgaaccacagggttctctgcagcacactacataatctgggttgagaagggagaaatattggttcatagaagacttcctatagtatgtgagaagtggctgaattttaaaggataagtagacgttaactaaatgggagaggaaaagatggaaaggcaagccaggcaagatgtttaaatgtttagaggaataaatgagcatcatgcatttaaggaactttaattaatacagtataaccaaagcccaaaggtttcagtgagagataagtttagaaaagtgggtaagaagtgaatcatggagggccttgtgtcccatgctaaggaattaaggctttgaccagaatgcagtgagaagcagttatgatttgcagttgtcaaatcatatagttgtcactgctaatcatggagaagttctacttttgaccagcaattggctaaatgcccccacatgcctgttctaccacatagtgatggagagaaataaagtgggaaaactcttggaaaacttactcagaaatctggtaagagagctgttgagaatccccagtcatctgcagacattgaactctaacttgtaagataagtaaataaatagcaccaggaaaacttgtatgtttgtgtggcaaaggaaattataaaatattaatgtggagaaagacctttgacattatctgacctgggtcctaatttttctgggtgaggaaactaagtctcagaaagtttgtgacctgcctatattattagagatgaattaaagacaaaataagggttaaaacccaagctttggactctgtccagagtttactttttaactgctttaatcatctcagtgttggtgacagcctaggattatcttcattatttgctccccttcctcttaagacctttttgctgtgctgctgacctcagaattaaactatgacttgtttggccttggacactttagttaagctctctttcatctgcagcattctagcctctacaagatgcatttgtatacgtggtcttacttttcaaaaactcttattatggaaatttcaaaacacacaggcagagagactaagttaacataactcccatgtattaatattaacattaacaatcatcaacacatagccaatttcatctttaccacatcttccatactccattcctgttgtaatctgcttttgggagagtaaaccagggaagaggcccttgccagccctagaagtgcgacaagcatattgctttctttagtgactaacaaacacaagccaaggagcatgatacatccagatagtggaatactctgaaattgtaaaaaaaaaaaaaaaaaaaaaacctttctatataatgatgaaaaacctctgtaagatctacagtgaaatggaaaatgcagaggtgcagagaaatgcgtattacaggttatcttaaagtggggagaaaatgggaggaaggaggtggcaaagtgagacatattgaacagataaataaaaaacaatagtgattacttatggggatgaaaccagacccatggagagcaaggaaagggtgacacttgatgctatatatctttttatccgttttaggttttaaaccatgtgaatatatacccttctcaagaaatgatttttttggagtagaatttgttaacatttttaagtgatttttttaaattatatgattctgaatgatgaaaacaataaaccacttctgtttccctttccctcaacttttaaattgtaatataaagaccattacgtgacaaagaagaaattggttacagagcataaagacacagaggattttagacaagacttccactcagagatgtctggattttgtaaagctgctttgaacacttctgcagggaactcaaatccttatcttccgtattcctgtgaattgcctttatgttatttctcctcaaaatgtatgtgttcatccgggggacctgtagacagagcaccagactcctctaaggatggtagaaaccatcataaaacaatggggcattataaccacaatgactctttgcgg

SEQ ID NO: 38695 - DNA, 2300 bp, Homo sapien
gatttcttaccttctccaagcttcagtttctttatctataaaatggggatccataccttttctcagagggtcgttgtgaggattaaatgaaaatgtattttaaatagtgcctgttgtaagtgcttagatgtttggtgtattagctcttataatccatatttagaaaaggagtgattagtgttatttatttagctttattatggtaatttatttttataaacgtgaacaaagaaattgaaatgttaccaacattgaatagaagtctattagaatatttagaagagtttatgaaattttgttgtcttatttgtaagcatttatctaatttgaattgcttgaaattttgtttgtacattctattttttaagggaagaagtaaaagagcaactagaaaagaaaaagaaaggctccaaggctttggctgaatttgaagaaaaaatgaatgaggtttgtaaaaagtacctgttaaaaaaatagactaatttggccagttatggtggctcatacctataattccagcactttgggaggccgaaacgggaggccaggagttcatgaccagcctgggcaacaaagtaaggcccccccccgccgcccttgtctccattaaaaaaaagaaaataccttaagtatttgggcatagctctctcagttaaagaggttctgtattttagaagtgttattgttatggtgaatacaagtttgtatttacgtgcatgctttaaaaaatgaagaagaatcatcttgtaatgtaagtcatctaagacttagataacttggattccaagttagggttgagcagtcctcctacttcagcctcctgagcagctgggaccacagttgcaggccactatgcccagctaattttttttttatctttagtagagacaggttctcactatgttgcccaggctggtctccaacttctgagctcaagcgatcttcccaccttagcctcccaaagtactgtgattacaggtgtgagccattatacccagcctgtttgcttgttttgattacaaacatgtatataacatatcaatcacagtaatgattaattcaacttttacagcctagacggagaatctagccatctttgttgaaaagagacctcagcttcagtaataatgcctgctgctcaataatacagaacccctatcccttaatatgctctttgaaaagagctagtagagggtcctttggtgatagggtcaaggattggcacctgtgtttcttttgactgtaattagaagctgaaatgggtgagaggtattaagaggatggagggaaggaagcagtggctgtctctgtatattaggtgtattggaaaggttagatagtctctgatggtgttcataacctttttgcagaactggaagaaagaactggaaaaacacagggagaaattgttaagtggaagtgagagctcatccaaaaaaagacaggtaataccacttttagtttattgctattcttaatctcatagttggattttcataataatgctgtatactactgttaatagatgcatttgcaaactcacatcagcttatttagacttgtacttttgtttccatttagagaaagaaaaaagaaaagaagaaatctggtagggtgagcaaaaattttccatttttctaaacgttacaattaagagccaacaaaaaaagtaagaataatttgtttaacctgtatgctaaaggtagcttaaactccagatgagtcaaggaacttagaggttctttgattgtgaagagtgattttgttctatcactgacataaaaaacggtgccaaccaccttataacgtagtacattttctgttgctatttaaagagaaagattggtgaccatggccacatatgttaacttgttgagcttttgtacagggaacaagtgtgacattttatattttcatatttatgacttatgaatatggcatctgtttctcagacactagattgatttcactaagtatttgagagactttgtaaaagaaaaacattctcgcatctcacaagctttaattgttttgtgcttggtcaagtattcatcttcttcttcatcaagctctgattcttccagcagttcttctgattctgaagatgaggtaaggtttgcttataatggttcatgaaataatatctcttaatttctttaatgtcaagtggaaacccattgtgaaatatctgttagaaatgttgacttccaggttttgattaattatccataacttagaggactaacatgagtgagtggtaactaggaacttaaatattggtatataatatattttttaga

SEQ ID NO: 38696 - DNA, 2300 bp, Homo sapien
gaatccccagcttctctgctttcttgctgtggaagctggcacaaattactcggcttcccttcgcctcggtttttctcatccacaaaatggaatgtaatctcctggttatgcctagaacattcgggagggcatgtaggcccactgctaggacagaaatgtatttattagcagatcacacatgtgcagagaatgtgtaaagatttctactgtcactgaattatatcctgagaagtcttggactgatttgttctttatgtagtccactcagatgagctcccgatagctcttgccatcttccttatcttcacaggcccctggtcattttcttgtttctctgtccccccagggattcacgtttcatccaggaggggttgtgtacactcgcagagagagagagacttctaaaggaaacacaacctttctgttgacttataccatatttttaaaaatctctgtgttctgtacaatcagccaaccaaggaagtgaaaggtaagaaggagctgaagagggaaaaaaaaaactatattctctcacaggtattatcatgcttatcatgttggagtattaaaaataatatctgtcaaatgcctagaatatttaaaacatgaaaaataagccaggaaagaaagaataacttaatattaataggttctcctcttcctcttgtgtataaaaagaagcctgtcttcagtcagagtccccagcttaagtcgggggtaatggaggaggaggagaaatgagagactggaggcctcattttggaaagtgggttactgaggaagaatcaacacttagtagggagcagaaccaccaaggactgcatgtgagagtttggaaaagttttgagacagaagatggtagttgggagcatctgtcatatagtgtagcatgaaaaatgcagggagggagggaggcagagatcgggaaagatgattttaaagcatgttcttgtatgtaattagtgtaattcccattttgccatttccaagagtccggagaagatcctaattgattttcaactacttcctaatgatacttgctaagatgaacccagaggggtcgctttatctataaatacttactaaatatgattatcttctctggagcccagatcatcttccttaaagttgcagtgcagtagtgccaatattacgatatgctatgcagtaaagttggccctgtgtgtgtttattgcccttacgagtttataaacaggctccttgacgatagggatttttcttaatcatctttgtgccctacccagctccagcttccagccacccagttagtgaaaactgtacaaactacatgttcaaaaattagtgtgaaatgaatgcacaggtgatgaatgaatgggattgaaattaaagggtgatttcgttagcagcgtctatgacagcactgcctttccccccaccagctgatgggctccgtgagggaccaaggctctttggtcctcactttgtccccagcacttgcactctgtcaagcacaaaataagcatcgggagaatctttgtgtcccctcgaatgagtatttcagtgtatcaagaatggaagaaaggccaagcgcagtggctcatgcctgtaatcccagcactttgggtcgaggcgggcggatcacttgaggtcaggagttatagaccagcctggccaacgtggtaaaaccctgtctctactaaaaatacaaaaaatttagcccggcgtgttgacggccgcctgtaatctcagctactcgggatgctgaggcaggaaaatcgcttgaacccgggaggtggaggctgcagtgagcctagatcgtgccactgcactccagcctgggcgacggagcgagagtctgtctaaaaaaaaaaaaaaaaaaaaaaaaaaaaaaaagaatggaagaaagcaaaacaatccaaggccaaactgaagcgagctgccttggtggggctccggtgcagaagcgcagcgtcgcctgctcttgggtgcctaatgaacgaccggactcctgcaggcgctccgccaactgcagcgatctctggagccggcctgtcctccacagagatagggggcgctgtagcagagcgcggccgtcgagtccgcgtggtgccgctctctaggcggagtggggaggcggcaagaggacctgcggcaggccctcttcggcagtctctccggcccggtttccctcggcgtgctactgtgcgctcgatccagcaccatggggaagcgggacaatcgggtggtgagtactcagccgggaaaacagtggggcgacgcagggcccggcggcaggacagcgagaaccctcgctgttc

SEQ ID NO: 38697 - DNA, 2300 bp, Homo sapien
gggtgtgggctccaccttcccctccacgagataaatgttaacgcaggcttcctgcgggcgtgttatacacagaaaagtgcacgcagccggccagtgcccaggcttggagccccgcgaagacgcacgtttgctgtagtttccaagtttacttttataatttaaaatattggagttaaacacacgccccgcagtgagcagccctggtccccgcagcgcgcccgtccgtgtgcatatgggcgcatctgcgtgtgcgcacacgcgggagtcgcggtccccggtgtggcctcttgtcgctgtgctggtggcgacccttgtggtgcttggcaggcttcgggagaggcgcatgaaggatttcattgagtgtgaagacagagagcagagacagaaagcagaaggaggcggctgcagcctttgtagtcgcggaggaatgcggaaatgttgaagcactatgtcaaactttttttgaaatggggtcaagtcacattcagccagcgtgggaaagcaacaacaacaacaaaaaaaagtggaggagagggggggaaaaggcattgctgctcccgtttctctccgccgaagccgaccgtctggggggcgagtggggggagagccagggcagtgcggggcccggcgggggcagcaggcgcagttccctgcgggggtgggacgtccccgacgcttccttcgctgcggagcccggggctagactcgagcgggagggggttggggggatgcaggacaggcgggttgggcggccggcggcggctccccggctacctgtgtggccctcgacctggctcagacccccgggcagtccctgggggctctttcctcggcttttaaggaaagttctgaatgtagtgagtgccagaagctctgctctcgccgcggtccgctccacccgctcatcgtgggggtcgcgccgtttgtttaattcctggcaaaaggcgagcgggccagcggttgcgaggcaggtaattccgaggtgccccgggaattccggacatgcggccgtcgtggtgaaagtcctgccgaggccgcggcggccctggaggagggaggccccctaggtcccagatagctgctgaatggggagggaaagttagggtaccctactctggcgctttgttgtgcagagggctccgggggcgtccggctgcagactggaccgggcctttagccggagggggaatggggcagccacctctgctacctacagcggggaggtcctgggaatgggaaaaggttcgcgagtccgggccccgaggacagagaccttctctctcacccctggaggcgcaggatttaaccccccaccccccaccctttgaaagggaggttgagttttgctcaggtcgaaatcagtttaaaacttaaggacgaggcgcgattatgctatccccttcctgaagttattctttaaggagacgacaagcgaaattgtggcgaacacccctttctcccacccttgggatcccgtgggggacggtgtctcccctcccccaggaccgctcgctcgcccacccccgataagccccaaccctccccgaccagatggctggtcttcccaaggtttccaccagggaggtcctcccagccggagagagaattccgtttccaaccgagactcctttaccccaaaaagaccatttgtgtatgcgagtcgtttttaaatgtctcctcgtagaaaaactgaaagtagaaagaaaggaagcaatttctgagcagatgtctgaccaccccttctcgcacactcccagcatcgggttacagggtcctgggagcccccacccacattctgcggccccacacggatggacccacagtccttccgctccagcttgtgcgcgacccctgaacgccctccggcacccctggaccccgtctccctgcacgtccgggcctcaggaggcggggagggtagcggcgcaacacaatgatatagggataaatattaagccgtgacattgacgtgcccggcgcctcccctcccccgcgctcccggcacactctgggctgctcggcacgccccctcccgttccactgcgtcccgcgccgctcgctcatccccgaggggcccctgcaacctctccgcgcgaagacggcttcagccctgcagggaaagaaaagtaacttcgcttttctcggaggaaccaggaaggattaagcggcttgggagagggcaggagcgcgcggagggtagcgatggaggcttcgtaaaggaggaggaggggagtctggaggaaccccgaggaaggcttctgggctgtctgattgcactttcttcttatcctcccgtctcc

SEQ ID NO: 38698 - DNA, 2300 bp, Homo sapien
gccaaactgcagtgattgttttttctcttctgggcctagtcatctagcagagctactggactccagactggtactgggaagtgtcggcaaagagtcctgtgatgtaatacatcttcaggtctttcagctgtggataccagcacctgctccagtggaggtagcaggggagtgaagtggactctgtaagggtccttggttatatcttcgttaaatgctctggttttgtgttggttggcctccagccaggaggtggcattttcaagagtgcattagctgtggtactatagggaggaagcaaacttgacctagggtcatctagttatatattcatgtttctgaggcagtgggcagaatatgtcctttgtcttgcaaccagggcaggtaaagaaagaccaacaggttggggcaggcataggtgtggctgagctcagactcttattgggtggggtctgctgcacttgctgtagggggcgggggtgtggttcccaggccaatggagttatgttcccagggggattatggctgtctccactgagtgacataggacaccagggaagtggggaaaagccagcagtcacaggcctcaccccatttccacacaacccacactcctaaaggccagtctcactcccactgtgcccctgccaacaacatcgaatctatttccaggcagtcggtgaccagggctgagaacttgcccctggctatcagcctccctgctgagaaagcaagcagactcatgacttttctttttggcatctcagagaaactgcagtggcgatacagttccttcaaagggtctgtgaattctcttggctttcctggtatgttgctgcagtaattcttgaagcaaaagttcatgatgtgagtctccacatgctgtcctgtctgtcccagcaggagctgcaagctagtcctgcctcctcaccctcacagaaccaccagaataatgtttgaccaaatatctaggcactctgtggcccggtcaagttgacccataaaattaaccatcacactggtccccatgcaaagtgaaacccaggttttggagttcaggcccagggtccccttacgaggagggctcctgagggtgataagtgtaatggtcatatctaggctgtccttcatagccactttctttcttcctaaacctcaggatttaagagcactggcctgaaacctggattcgaatctctgccatgtattagttatgcaaactttagccatattatttaatctctatgcctcagtttcttcacctttaaaattgagataaaaataatctctacctcaggagattgttgtgaagagtaattaagttaatatgaaacatttagaacaatgcctggtacatggtaagcgcccaataaatattttaaaataaatgtttttaaatgttttcatctaaaaccagtgtgaatcagttgtgggatgtggaaaccaaaagctaattgagcacacacaataaatatcagtacttgctgttagtttttaaaatatcagctatttttgttgctctcactcaggcagttttctctctggccctgacactgaccttagaaaagataaatctctacaatgtgaccatcaggtctgctgcagccctggtctgctctgcaataaatgaatttagcacttattggggtgctcaaagaagtcctatccctgaaagacattctttacactttaggaaaacaggaatggacagtaactccacccttaaaggccagtgaaatattgacctagagtatctccaacctggtgctctacaaggctgggactgcaatgtaaactcatattcccaagggatcaattaagccagaatatcccacagtttgtctataacaagacaatggggctttctgcagccctcaaaactctcaagtgaggaaaaattgttaagccttcagattttaaccaagcagaccagaaggtggtatatagccatagcttattaaaaagcatttcagatagaaaaggcggtgctgtaatttcagatctgagaaatgaaactgaaaccaaacctatattcttccttccccaacctcccagttgttaaacacgccctgctgtttctgagccaattagagcttgctgtgagacagaagcagagaatacatagacttccgttaaaaccagaatgaggaaaatacttttctctagcatcgtaggaggaagaaaacaaacacatcagatattttcagcactaaaagagatggttttccccacatatatgtaaaagaaatttgcaagactactgggtaagtacaatatctattattaatattgttcttactatc

SEQ ID NO: 38699 - DNA, 2300 bp, Homo sapien
actgcctgctgaaccaaggttgcttgcattaaaggatcatctagtatgtctagctttttttcctcttttcctctcatcaaacatgattcacattatccaaataacataagtgagctgagtcatgaatcttagataaaccacaacatggactttgacaaaaatgttgaataaggcaagggaaatgaagaggatttagatgggaatgaccagagcaagcaggttctgggcaatagagacagtgtggattgaacaagcaaagccggtttgcctgaatgcaagaaaggaaagaagtgtttttagtgtgcaaagtgaaacaaaacatcagagtcccctgatttccatcctagtgcttctcgatcacacctagtcggcatagcagcaacaaaacataatctaattttattgctcatagctgttgaataccaaatctcaatcagcaattttaaagacggagccgtcaatgctttttgttcccaatgtttcaagagcagacacatggaaatcaggaggcacataggaaaagagtaagttaaaatccctaagaccatttagataaagtctcccgaaaatgacagtgaaacacagacagcaaccaagaaattgatttatgcagcaaggaggacaaggcagattaatacaaagtgcatagcctgcagtgccaaacccttttttagcagagagggactttactgagagggccctctaaccccctaaatcttagaaggaactctaaaccttttaagttggtcctctaatccgaggtcagtcaagcatctttgccttttattaacaggggtctctaattcaccctgtcttcggagagactctaattcccctaagttgggcctctaacccaatcccattctttacccgggtaccccaccacttacccaaagtcatccaatcagtgctatagtccatttcctttgggttggtggggaggttcttcagtatcggtccctcatggttgccagaaatgttacaggaccagggttccaatccagacccctagagagggttcttggagctcatgcaagaaagaattcagggcgagtccacagtgcaaagtaaaagcaagtttattaagaaagtacagtggtaaaaggacagctactccacagacagagtaggacgttcccgaaagtaagaggaggaacacatccaccctaggtacaatgcttgtatatatggagagatgtgttttgctacaagggtttctgataaagaattaattttcttaattagtgtattttgcaagaatcaatattattttctttaaagcaaaattaagaatgcctctgttctccagatattgggatatctggacactcccaagtcacggtctgcttagtaaatattattaatttgctcccttaatcataaacatctagaggctaggaatgcctacctttctgagaaggcagcccagcaagtctcagcctcattttcgtagccctcattcaaaatggagtcactctggttcgaatgtctctgacattatcagggttggtttcttctgatgtctctctccttggcttgtagatggccatcttttctttgtgtcttcacatggtcttccctctgtatgtgtctgtgtcccaatctcgtcttcttacaaggacacagtcagattcaattacagacactctaatgacctcattttaacttaattatctcctgaaagaccttatctccaaatacagttacatttggagggagtgaggattaggactttaacatatgaatgtttgggggacacaattcaaccagtaacaggaacttagattgcactgacatattaattttctccctggtatttccattctctttgtcctgtaggtagttttttgggtcactgggtttttttgtttgtttgtttgttgtttccttattccttaactcttataacttaaaaatctgcctggtaaacagtttctaagcagtgattcaaatttattgatatttttggtaatgttattgattaaaaaacatttcagatccttctaaactcaagaaaaaagaatgttctaaagcaaaactgaaactgtctatacttcaacttcctcctgcttctcaactggcactctgacacaccctcagaaagtcagagtactgggagaacagaagacttcacaatttaatgcctcagtttttaaaaaaggatccttacacttcatgtctcctagccatcagaagaggaatgagacagcaaaagttcaaatggcctgtttcaagtttctgatataaaacgatgacattttcaggaaaatcctggtaagtaaactgaatcattaaacctt

SEQ ID NO: 38700 - DNA, 2300 bp, Homo sapien
ctttggtgttttctcctcttggattctttcctctaacttctctgccaaccccagagtctcactctctactaatagctagccaaaggcccaaactgtgggaatctttgcttctacctccactctgggaaggaaggagataaatttactgttggtagaactggattcctcataggaacaggcctacatctttgagtttttccaaggaaataatcacaaaaggcaaacagatctttctacctttccctttttaaaattgatggcctttcatgacatgacttggatgaagcttgaggactccctttctagtagaatgaaatcaaaaaaatgtagaaaaaaatgaaaaagtggaagcgatcaaagaggatgaacattttgtacttgagaaatttaaaattgtaaaatgcttctatttatatctaatttccatctcttctcacctgcttaaggattttattccactttcacccatctctattctgcctcatcaacatttccctttccagtgaaacattcccaatagcaaaaaactctctttatttcacatttttgatccttctccagcttctgtcccatctctctggtcctcttcacagcaaaacttccctaaagtgttgtctatactcattgtctacagtttcttttcattgtctattttttctctcatcattcaaaatattccacatttaaatttctctcactctctcctctattacgtcaaatgttcctatgatgtaggtatcatattgccccttttaatatgaggattttgaagcaaagagcttccagcaacatggtaacctgagctaaggaagactctcttccccctgcaaatacatagaaatgctaaataaaataaaataatatatcatggcttaaggtaagacggggaaatctccagttgccagaaactgggaagaaacatgaagatacagcagtgaatgcatgggtccacaaatccccagcactgcccagggctatccactgggcagagctccatgccccaaggccctctcaggcccctcattctctcttaaattcacattaatcaggatttcacaacattgcctcttagatgtctaatgggcatctcaaaatgaacgctcccaaaactgaatcctcgtcttccccacaaaaactattctccccacagtcttccccatgattaatttatttactgcaattcctttcttccagttggtccgagtcaagaagcttggcatcctctttgtttctgacaccctcaaagtgtcaccaaatccttttgtcacaatcagcctttttccaaaacgtcttttactaacaccctagtttccagcacagttgtctctggcctattacattgcagtcacctcctaactaagtgttctccctgttcctgctctagccctattcctgtgtattctcacagcagctagactaggtctaataaaacatttaaaaaaatagcccttttctgttcatgaaactcctattgcatccccatcttagagtaaaattgccagagtttttcccgtgatcctaaggtcctgccagtctgtcacagccacctcactgacctcatatcttatcatgctcctcctcctccactgtgctccatctgtacctgcctcttgctgtttctcaaatacaccaaccagatgcctgttctgggtggaaataactggtcatgactgataatggtttaataccactctccttgggatatttgcatttggcaagcatttggctaaaaggaagaacttccaataatggaatattcagtcatttcagacagctttaagggaaactgttgggaggaaataacctctagtatttctcaaatcacatagttagattatgatatgatatgacagacattaatatagtcataattccaaatgttttaatggtttcattggactttagaagtagtaaactttcttagttctccttttcccattattccgtagcaatcgtagaaaataacttctgcttttcctttttatcttgtgcaaccagcacggtctttgggtggagttttttaagtgcagaaggtttcagggacaaatatttacctctatatgtaaccagtactagaatagtcagtacctagaagccactcttctttgaaaaggattatcacctgatcaggttctctctgcatttgcccctttagattgtgaaatgtggctcaaggtcttcacaactttcctttcctttgcaacaggtgcttgctcggggctgaaggtgacagtgccatcacacactgtccatggcgtcagaggtcaggccctctacctacccgtccactatggcttcca

SEQ ID NO: 38701 - DNA, 2300 bp, Homo sapien
caaactatttttaagaatcatgtaaaaattaacaattgttgaagttaagcttgagcactctttttctcacttcctgtgtaaacatgttgaaatcagaagttactccagcaggtaagagtttatatctacagtttaccactagagggcgctttgtcatgattatcccagtagccctttccctagatgtgccgtattatatttcaatatgtgccatgaaataaaaagattacaagtaagattcatatggcatttattttttaatgtagcatctactatcaccttatgtcatgaaacagggaatattttcaaatacaacaaagaaaatctcagaataaaaaactcctttatattgagtatatttaacactagggaaaaacacagtacattgtctttatttctctttttgccagggacccaacaaacttcattataatccagcactagattgaaaaacactgaaaacagctaatttgataacggcaattggagattaatatcaatctaaaagatgttgggggaacctatgtgatatctgtagaacttccatattactttccaaattgtattttgtgcaatccaatattaaaatttatttgtatttcttacgcatcaactgagaatcgtaagacgggccaaggagcacttagagttttgttttctggagaaacaacttaacaaaaataccagttaagcattatgctacgtgcccaacatccatgaatgaataagattattctctgtattcgagagctcagagggaaaataaacatccaataaaataaagattaaggagataagtgctgcaatagatgtgtgtaccagatttagagacagtgcagagaaagttgtggcattgttattattttgcagggaggtgggggaagcatgaggagctcttgccatttttctgaagcatggagggatctgaaagtgactgatctctgaagaggacttcgttttcccaatagtcacttactttctttgcttatagaagtccttctagaagagttcagagccctaatgcaaagagtgtttccaaacttggattccaaagttactatcattccttttttactttaattatgcttgaggtatagtcttccttcccctcttatcattgaacttcttcagtgggcctttactgttaaaactgatgcatgcaaggaattttccttgatttgatgatttgatgcagatttggatatatccttaacattttatataacaaggctagaaccagagccttcttgcaaataggggttaactaataacttagtaaattaagcggacatgcttagactatctgctgccatgacaatggagagaccaggttgaaaacctgtaacctggacactgcagtagaggtaagatcttttctagatcattggttcacttcctctatgcatcagctgtgaaaatgtggcctcagatactatctcctggcatgcacttttcattataattatgcatggtccatgcctcagtcccagttggaaacacacctgtgatttgcttttaaaaataagatgaattcaaagattaaatgaaatcagtcattgtaataggaaacactgcatagaaaaaatacgttttaaatatattctggatctctcttttgattcattggtagaatttttacatgttagtgacttcatgaagatttataactgtttagcagatacatgagctacttcaattttcatataattttttttaattttaaaataataatggcatagttctgcatgatagaaaaccagcttttgtttttaaggaaatctcacaatattctttcattatgaaaacatgccatttttcagtaaagtcacgcaaaaggatgttttccttcatgtgattttttaataactaagtataatttatgaaatatatagacaattactggtagttgctaagaaactcttctgaaagccataagcctgtattcttgctaagcacataacaggtgttcccactccctgtgtcctttgtatacacattcattctgtattcaaatcacagaagcaagaggcaagatagggtctgttacctcactgctaatttccctagcaaataaaccagcagctgctggtccaagttaccactgagaacagggcactgcatgcatgggacaggatgctttcatggagcccttcggtgacacacttggggtctttcagtgcaaaatatacctccttctcttcggtaaggccctgtgtgaattgtgttttagctgtttgttaggttttttttttttaattgtggacataaggtaaatatttgctttaggctgtagatgcatt

SEQ ID NO: 38702 - DNA, 2300 bp, Homo sapien
gagaaaattccggggttgaatctgggttctagtcctagatcaagctctcatgaaatatgtggtctcgaacccttatacagatacgttttctcatctttacagcatggatttgacatgctagagctggactgcctttaagaatcactgaagattttaaacaaacaaacatccccaaagaaaacaacaataataacagcacacacctcaggtgaatctgaacagtcaggtttgagatctactgaactcagatcacccctaagatatgcttttaaacccagttgtgaactccttgtgaccacaaccatagattattaatcaaagtgcttattttagtgttgccttgagcgcaacaatcaagaaatgtttattgacttgggttttattttataggctaatatggctggcagtttttgtttcttttgatgctttcagggacttctaaatattgcagattttcacacacaaagaacagtctgacaattaagattagagaaggtaaagaataaactaaactagacttgccctaaatgtgaccagaatttcttgaaggggttagaaataacagagtcagagaagcatataggtaaacatataatttcaaaggaattgctgaacgcagtgatgatacaagtatgcacaaggtggttctgttggagtagagaactgggcagaatcaaaaccaataatacctcataattgtatagtgctttacaatttatacatttcattcacctacatcatctcacttatccttacaaagccctatataaaatattaaaatattacaacctcatttgtaaaaattaataaaacgaggctctaaggggtgagaaaatagaatttcagaatcagaaataacctctgttagtgtcccccaaacttcagtcatttgcaaatcacctttattagttttgccatatctgactaccacccatactattgtttacctagtattttttattacgttgacacacttgaactttttttattctaagaaatatttttgaaattatgggtctgtgtcatacttttagaagttaacattataataaaataaacttaaaaaaattggtgccatgctttagaactttcttcagcacaatacatgaaaatcttaacacatctgatgaccgattaatccttcagtttctacttgcacatctgcagtaatcttaggcaagttccttaatttcgccatacctgcttcgtcatctttaaaatgggaacccacaggattcttgtgtggataaatgaaatcatatatttaaagctattagcagttcctgacaggtactcggctttcgataagtgttagctatcattgttagctttagggctgctttttcttcttcttctcatattctcataattgtaaagtccttttaaaattgtgtccccaaagacacttctgttcctttccccaatttaactaaactgccaaaagttgaaaagaggactttaaagtgacaggtatactcgttattgtcgtatttcccgtcatcactgctttagagtacggaggtaaaataataggcgggcgtcaaaatccttcgattttagagcttttgcaggggataccaagactgaggtagaacagccctaaacctggagggccgcctattgggcaacctagagcacacctttcctcaggccaaacccagcgcgcccggggtagtctcgagttctcaggttacccctcagtgacagccctttcttgagttccttctccttcgcgtcagtctctcgttctcccaccccgcccctctagaccaggtgaggtttcctccctcacactcctaggggacatcgcgtcaatctggcttatatattgtctcctctgagtttgatctttcgctcaacgcctagtcacctgtgacttaggtttccgtctcgccgaagagtagctactgcctagtgcaagcacctttgtaagaccggcgatcgcagtggtcgctctgagcagtaatatttaccggcttaactgaagcacccgctcttttgcttgctgggagatgtagtccctgggttggccactttagttcatcgttgctaccgccggcgtccagaagactacagttcccagcaggcccagggaaagacaggataccctgggtcggctcctccacgtgaccacccactatggcttcctagtgtcagggccagctgtgtagtggctcggtgtgatttgttagctctttgaggcagggtaccctcctcaggatttcgatatgcaaaaaatcaaatctctcatgacccgacaggtaagtcgcggcggctgaagcaaaggcttccttcatctc

SEQ ID NO: 38703 - DNA, 2300 bp, Homo sapien
gtttttgttagagtactatataaataagaaagaaaaataaaatacctccaacaataacctgtacctaatcttcccataggaacttgaaagagttacctcattgcagacaggtcttcaattagctgctgttatctgtacaaatgggagaaggtattgcttttgatgatattttgttctttaagctgaacaatatttcaagaataactatggaatctataatttataattgattttttaaattatggatgtggtttctagaatatcattccttaagtgaacatatatcatgatctaaagactacactaagagggtttgtgggaaatatctctaagtgtacttatgggttttaaaaaattactatttttatattatttagactagtgcttcacaaactgtttgtcgtaaagcacctacttttttctttctaaaatttccaatctgttacaggctgtgattttttaaaaatgcagtaaaaacaaattactaggcaaatgaaataaagaaggaaagacataatacagtcttaatttttttaattattagagtcacaaagaataattattctgtcagtttttgcactgtgtttttaagcgcttattctcagtttctgtaattttttgttatagaccactagcaggttgtgaattggcaccaatcttctcgtggtgttctgagtaatgctggtttagactggccattgagtacatttgtcaaatagtagtttaaatccttggttttaatagtaatccatttcactgcttcattagttacctaattgttctgtgtggatagtattcttattataataaaaaacttttaactatttattgttcacttttgcagacacttgaatattgcaaaggaaggttttactcaagctagtttaggccttcttgcaaatcaaaggaaacgtcagttgctgattggacttctgaaatctctgagaactataaaaacattggtatatatgggtcatttaaaaaaattaaaactgaattttgtggttgaaacagattttacctttgatttttgttttttcagcaaagaacagatgtacggttaagtgaaatgctggaggtaagttaacaagttttggaaatttagggtcctactgatatatagaaacagtaaagcagacaaaattcagaagtgcatttttctcaaatgggtttatgatataaagaatatttttagacatgtaagatttttagacgtcaaagattcttgctctggagcctttttctattgacatgatattacttcatttagaaaagcaaatgtatttgggaaaacatttatcttctgataacattggaatgttaacttgtttgtattgcgtccaaatagcaataaaaattaacatctttttcatctaacatatagtagtaatttaaggaatgtgtgatactttagttttgttcagtatcatgtattaattgcttttctgagtgagccatatgttttttctttgatgcattcttagcattttctgtctacttctgtcataaggttcaccaaagcataatgtaatatgtgtgtctcctcataatacttgagctccttggggtaggtactttgtcattatcagcatcaccagtggtttgaattgcatctgttgaatttagaattgagcatagggaaaagtttttgtggttttctgtataattgttttattacttctcaactattactgctaactagggtttcagaaacccatatgaaaaattcattgggcattaaattactgttaggtgataaaaatactctgagtttattaattagtgttttttttctaaatttatttctttagaactatttattgatttcttggtggtaaattgttgactatcaattacaaatagaatgcatactattttgaaacattttatgtaggcagtactgaaagaagatatgttaacagttaaagaaaacctttcctgtgaagcagctaatgatttaatgtaggatttatccataagtcatggaaatggtctcagggggctgttactttgaaggaatagaatattttaaatatttcttctatgtatatattttaggcctggaactagttgcctcttatattttgtcacttatctatcattgatattctaagaggaattaaagttttttgattctgtaacttttggttagaatatgaacagagatttttttttatcaggggctttaagaaaaaatgtttctattccaatgactcctgttgttgttaccttaaggaggaagattatccaggagctattcagttgtgccttgaatgtcaaaaagctgccagcacttttaa

SEQ ID NO: 38704 - DNA, 2300 bp, Homo sapien
aatatatctggttttagtccatttgggctcctataacaaaatattctagactgcatagtttataaacagagaagtttatttcttagaattctaaaggctggaagtcagagatcagggtgccagcattgttgggagggagggcctgcttcctggttcatagacattgtcttgctgtatcctcaaatagtggaagggatgaaggagctctctggggtcccttctataggggaactaatctaattaatgagggctctaccttcacgatttaatcatctcacaaaggccccaccttctaatatattatcaccttggaggttagaatttcagcttcggaattttgggtagacatgaacattcagaccatagcagtatcttattaagtttttctttacaatttagtaactcagttgttgtaatcagataatttgttacttcttagatcacagtgtaatttctttgaagataacttactctttttggacttctttgaaccttggaagactatagaccctttggccatgttatggtcttttaaaatgtatttttgatttttctaatgaggctgatctttattttgaccatctttttttttctttctttcttttgattgattgattgattgattgagacagggtctcactctgtcacccaggctggagtgtggtggcagagtcatggcccagtgcagcctcgacctcttgggctcaggtgatccttctgcctcagcctcctgagtagctgggaccacagatgtgcaccaccatgcctaattttcttaaattattattggtggatatggggtcttgctatgttgcccagactggtcttgaactcctgggcccaagtgatattcctgccttggcctcccaaagtgctgggattacaggcatcagccaccatgcccagcttgaccatcttttataggatatgttttgaaaaaaattgtttaggaaaatatattttgaaaacataaatttcttcatgaatcagttaatatttataatttagtgctcttctaatttttgataattttgtattcgatatgctatttgattttatgctttagtatttaaaatttatttttgtggttgtaagaggtttgacatatattttctcatttgtctatattaaactcataaccatattaaacatttattaaaattaaatatttaatttatcattaattgtggatttaggctgactgttttctgagtattatgcataaaaagaaaggaaaatcttatagttattgaatatacacccaggatcagatatgatttgtttctgacttagtctcccaataggccttaagtgtactttggtaaaattttacaatctatgatagaatttctggtaattcagtgtactttgaaatactgacttagcactttatgtagctactttccattcagtttggcaacctgatggcattcctggtataggaaatgggattgtctctattacatcccttaaggatgttggctattggcctaaatagatattcgttaacaaattaggaatatattcctgtctcattttaatctggaactatagagtaaatgcttctgataacttattttctatattttgggtttgcttgattttctttttctttgccttacaggatgttcagctaaaagtaaaaacctacttgcttggaactgatttgtctatattcaaatatgatgatttcatctttgttttggatataatcagcaggtagtatttaagatcttgtcttattctttagtttgagtcattcaaccatgataaatcatgagctagtgagttatcatctataacttctttatggaaatgaagataatttttgctgctaagtttgtgagtgtatttaaatatttctgccctttgggtgtttgtaaacctttatggatttgtgatctttagaattttttcacatgtccaaattttagtgattttttttatctttgaagaaagagaaaccacacttctttttctctataaggctgctgctgaaatttactgaaacctttttatccaactaggttgatgcaagttggagaagaattttgtggtagcaagtctgaagttttacaggaatctattagaaaacaaagtgtcaattatttcaagaattaccataggtaagaactctaataagatatgaatcgacttatttaggtaatgagaatacttttgtctaatacttaatcttatagcattaattgattttaaacaattacttttgaatttgaatgtgttgtagcttttttaagatggttaaggatttttttaaccaaaatatgatgaaatgttct

SEQ ID NO: 38705 - DNA, 2300 bp, Homo sapien
gactctgtgtaattccttgttccttaatacaaggccaagtatatagtaagccttcaaaacgcgtttgttgaatgaataaattaatatccttatgtttgaattttcttttcaaggtggtgaggaacagctatttttttcttctgaatacacatttaaaatcgcctttacctattaataatcgatttttatatcctttttcaagattaggtatataaacgatggttaatcttttcgggaatggagaggacctcgtgttctagatgcatgccagcctacttatttgcattctacctcattctacttattcatctttgtttttttgtttttaactgagtaatgtagtatattattttttcttcacagtgttgcattattttatatgttaacaagtagtagcttaagtaaccgtatgttttgtagctgaggaaatacctgcataatgatccagagtgttttaggagcagtatatttcaattatttttcaaatgtgatttttcaaaaaaagtctgtgtgaaataattgcaaaggatgattgtgaaacagaagaattttaaaataggaataagaataaatctgagttgagtagtttttactgtgttttgatgtatatttgtatttgtgtttctcttcttgaccatctattatttaaaatcatttctcacataaattaagaaagacgtactgagttcttaaatggttttgatagtagacatttcctttggagtacatttgtcatttcttgtactgcagtaaatgtgttttgagtcatgatgtctttaatagtaccaatttaggccgggcgcggtggctcacgcctgtaatcccagcactttgggaggccgaggcgggcggatcacgaggtcaggagatcgagaccatcctggctaacacggtgaaaccccgtctctactaaaaatacaaaaaaattagccgggcgtggtagcgggcgcctgtagtcccagctactcgggaggctgaggcaggagaatggcgtgaacctgggaggcggagcttgcagtgagccgagatcgcgccactgcactccagcctgggcgacagagcgagactccgtctcaaaaaaaaaaaaaaaaaaaaaaatagtaccaatttaaaattatagcagttaagatgaagtagagccagcacctgaattattggcttatttggaaattaagcaaatggcctgttttaagatcttctgtagaagaaagtatagagcattttttaatagatatgcttcttttcctcttatttcccacaaaaaagagacagaactggggacttgcagttatttgttatttgattcttcccatccctcttgaacccttccaatacattagcaagtttgtaaatgcagaagtttaattcattgtgttttttgtttttctgtgagtatatctgattatatatttagaggaaaaggaatgggatattggcatcttccaaaagaaggaatgagaaagatatgttctttgtaccctgtggatattgagctcttgaatgatacagtgataaagaaatgttcttggcctctgacccaagatttcacagggctaggattcagggcaatgggcagtatcttgcatgtatcatttttcttcttgcttttctacttttgctatatatgtataagcttatgaaaaataaatattttcttaaatatattttattttcctctattaaacttacacattttcaaagaaattattttaaatggaaactcctagaaaagagaaccaatgttgtttgtttgtacagtgtcagttgtagaagagtgtaggagttccataaaaatttgggaaacagtaaaatgtagtaagaggaaaatatcattgtattatttatattagtactctccaatataactttccaagatgatagaactgttcataatctgtgctgtcccatgcaatagccattagccacatgaaactactgagtacttgagacatggctactgtgagggagtgcaatgtttcattatatttaaatattttagtataataattttattttctttttataattatagactaacagattttaattttgttctgcttaattttttattcttttttcttttcaggaaaatatatgcagatgatgaacattcttaagccaattgcctttgatgttattcatttcatgtctcaactatttgattattacttgtatgcaatatataccttttttggtcggaatgattcagtaagtccacctttagagggaaaaaaatctttcttttaaaatttattttataaatgtcaaagtttttcattctctctatagaagatacacaa

SEQ ID NO: 38706 - DNA, 2300 bp, Homo sapien
atgtgttttttagtcctgagttctaatttgattgcattgtggtctgagagactgtttgttatgattttagttcttttgcttttgctgaggaatgttttacttccaattatgtggtcgattttagaataagttccatgtggtactgagaagaatgtatattctgttgatttgggttggagagttctgtagatgtctattaggtccacttgatacagagctgagttcaagccctgaatatccttgctaattttctgtctcattgatctctctaatattggtagtagaatgttaaagtctcccactattattgtgtgggagtctgagtatctttgtaagtctctaagaacttattttatgaatctgggtgctcctgtatagggtgcatatatatttagagtagttagctcttgttgaactgttccctttaccatcatgcaaggccttctttgtctttttttttatcttgttggtttaaagtctgttttgtcagagactaggattgcaacccatgctttttttttttttttttttctttccatttgcttggtaaattttcctccatccctttgttttgaacctatgtgtgtctttgcacatgaaatggatctcctgaatatagcacatcaatgggtcctgactttttattcaatttgccagtctgtgtcttttaattggggcatttagcccatttacatttaaggttagcattcttatgtgtgaatttgatccatcatcatgatgctatctggttattttgcacaacagttgatgcagtttctacatagtgccattggttttatattttggtgtgtttttgcagtggctggtactggtttttcctttccatatttagtgcttctttcaggagctcttgcaaggcagaccaaatggtaacaaaatctctcagcatttgcttgcccagaaatgattttatttcttcttcgcttatgaagcttagtttggctgaatattaaattctgggttgaaaattcttttctttaagaatgttgaatattggcctccaatctcttctagcttgtagagtttctgttgagaggtcttctgttagtctgaagggctttgctttgtaggttactttgcctttctctctggctgcccttaatattttttcattcatttcaaccttggagaatctgatgattatgtgtcttggggttgatcttctcatgaaatatcttagtggtgttctctgtatttcctgaatttgcatgttggccagtcttgctatgttggggaagttctcctggataaaggataggtaaattctatgggtaatacagtagatatagtgcaacaggaacttaccagttaagatacagtcataaccactcacccctagttggaatgtaggtttcacacaactcccactgatgaaaagaaatatatgtatttttcaactgtttaaccctttgttaagttttcttgtgtaaaattatctgcagagccatgaaaaaccatttgatatttgtgactaagcagcctgtttggatgattatgctcttcagtatgaatggtgagctgttaaatgacatgctcaatcattgctatggaagaaatttgttcttactagcaacttgaagcttaaagaaacatttataggaaagaaaattactcaaagctttaaataaggctacttttagagttggccttagactacctagagggcatgatgattaatctttcacaaattacagattttatttgttcatgtccagtgaggtgacttcttggtggacatcttcattgcaattttcagcagctctatcaatgacacatgttaactgaagctgacatgggttgctcttgctctcttggaatgtctttatttctgtcctaatatgcaaaggtagtgccagaatttcttaataggagggcctcaggtataacaatctagttgacaggaaaagcaatggaatcttcactgcatttgcatcacaagcatactgttttttcttacgtgtgttttttagggtgtcttgggatgttgatcctctttaagtcaaatagaaaaaatgaaaatgaaatgccatagccaatattagagatatattaattttagtctttgttgcttttatatttttctaggacaaagagatcttcaaaaatcaaaaatgaggttcacatttacaagccggtgcttggcactgtttcttcttctaaatgtaagtaaaacaaaagtattcaaagccatgctaatgaagaatgctgaataaggaggaatgttttgagtgtgatttaattagtatttgcaagggtaggcattggtctccagaagccga

SEQ ID NO: 38707 - DNA, 2300 bp, Homo sapien
cagagctcacggtctgaatcaccgtcctgtactcctactgaaggcagagcacacatttttacccagggcctgtttgctgaacagcctgtgatttttcagggtctcacacagcttttaatctaaaacagtgtttctcaaatctggtctaatgatccatgctgatccacgacagggtttcagggtttcactgtctggcagcaaaataaaaagatagaagataattttaagagtttttcttaccattaagtatgttcaatttaaagaatcacactttgttctgggattatatcctttcccttctggatcaaaaatatccctcctttttatctaatgatggtgatagttgatgatagtatttttttaaactcttttaattaacaattataaatttcttaaccctatgtcccctgcctcacactggaaaaggaattgtatttatttatctggaaaattttaaaatctgggctcttttgaaaaagcaaaaatgctattagggaatgaagggtggtacccaaagcaacttctgtaagagtgtccaagattaagccttatgctaggcagtagcattttatggtttttaaagaattttcaaggatgcaggctacacttgaaaaaaaatgatgttattagtgtgtgaatatatttttatagaatagcactgttcagatacaaaacacttaaactttgactgagtcatgtgcatgcaacctactaagtgcttacacattcagcatctcatttgatctgcacccaacactccgtgacacagtgctactgtaacagaaaggaaatacaacaggatatacttcttatttgtattattcagcctctcttagcctcagtttccttttaggaaggaattgtttctatcttaaaggattatttcgtggattgtaaataatgtaggaaaaaatttggtcatggcacaaggcatatagcagtcaataactgctatctattgttgtaatgattatgatcctcattttacaattgagaaaactacaactcagattaaagcatgagttaaagtagttcatcgggttaagtgatgaagttggagcttgagacaaattctatctgcatcccccaagcttcttttggttatccctcacccacaattctatatgcatcccaaactttatcttcactatcccacaccacaattttagtaatggttagaagctgagaaatgccactgatttaaatgtgcctccaccattctgtagatatgtgtctttgtccacatggtcacagcaaataaacttttcagtagaaaaatcaaataaaatttaaaatgattcattgtacatatcaagccaataaaagttgtattagaacaaatagtataaattaaaattgtaaagattttcagatgatctgaaaagtaggatcctacagtgcataaaggaggccgtggctgaaggtcaccagtttaaggggaaggtaaaatttgaaggtatctgtaaaagatacctcattgtataataggtgcataccagcagatatatttttcaaaattatagataccaatagtcagtgtgcttatttatgtttattttgtttttggtttaaattacctagagagtgacgtcatctctctagggtagagcattgttttaattgtcaatggaatattagaaaaagtgggtgtgtcactgattccttagtaaaaagctttattttcatcataattctaaagaataaagagtttctgtctttttaaagagaaagcagaagtatgacatagttcagtcctcaaagggagaaaatgaggaaggaaaaacagtttcttttcctttctttcagagggctttgtttttctcttactgtaacatactcattagggtcccatctcttgttttgagctcatcagagagttggattttaaatagctgtttctaatatattcagagacaagtaaatactgaatatacactgtgttgtgagaatgagtatcacaaacttaaaagatttaacagttattaagtttcatatcttcctgtgatttagggtggaaatttgcagcagagagattattacatgttatgtaagccaccagacagaaaggacaacaaagtcccaatctccaaagggaagttgagttataagagacaggaataccagtgagaagtatgagagagtgggtgggagataatgtttagaatctcttttgctgcccgcaatttatgaaaatggcttgaaaatatttatggtcaaagaccgaaatatttcttcaaagaagattagctttgctccattaaaagtaatgagtagaaatattaaaaaaaaaaaaagtttta

SEQ ID NO: 38708 - DNA, 2300 bp, Homo sapien
tcaatgtttggccccagcagttgaccataggagactctcaaacaactttaatatttctctgctgtttgcaccaaaagaaggtaattaatattccaaaagagaattcttaaaggaggtcatggtcaagtgttggctggtcaggagcagttggaaagcagggagctattgaactcaagacagattgagcccaacccagcacggagtgaagattcctatctaagttctgaattcggaagggtttcttatacaggctttgtttaagttactgtgtctgtgtgtgtgtgtgtgtgtgtgtgtgtgtgtgtgtgtgtgtgtgtgtgtgtgtgtgtgtgtatgttcctttcaaagcctccttgtctcccagttgcccagcctcctttcctagtcacatttcttactgctaacaacatcattctcacttatcctgggaatgaagggactgtacaatcttcctctgcagtgaggcagtgccttagggtttgaatgcacagtgagtcacacacagccctctgggtcaccagactggaggtgacagggaaggggggagtatatagaggagggagcctggaaaaacaaaatccctggaatgttgggtgggagagctgatctgatccttgagtctgtcctccactggatctcctgaaagcctcaaccacacaaattaggggtccctgttgtctctctggggtggggtatgaggattcaaaataaaacaggagcatgcaaaataaaacggggacattttttgcctacagtcactgatgtttccatggaagagctccaaggatggttgggtgagggctgcagttccattcacaggacacctccttctctgtcacccggtgttgtcccgtgtgcttatgagaacctaagatcaccagggaaagtgtgctgtcgccgtctggctttcttcccctcccattaaatgattgctattatttcttttgccaaggagacagtgtttagtaacctcgacggtgcacggccaccttgtggtcccgggacgcaccggatgctgttttcttagtccaacaccgcctaaacagagttagggaaaaaagtgttggctcctgccttgatccacccagttgtgggctaaaagaggttgagggtgactcgtccttggaatcaacttgcctgcctcccagggcgtgcctgccagcctccgctgcgccccgcctggtattggattgtcccggactcctgctgacatcgagggctttagggggaaagaagaggagtcgcagtgtccggcaccaagtcaggcaccccatatccccgtcttccctcgccatcctctctgttttcattcaccctaaaacactgtgcccaccagcagtcccctacacggagggcactctttctccaaatccaagttatgcctccagcctacagccgcccaactccggacgctttcccagggcttgcctgacccccaaggtgtctcttctcatctccttcctctcagcacttttttccttttagcaccccagctcttagccagccgtcttcccacgtcctcaccccactttcactacctagcccactaccgaccctccctccacaggctccctagtgctgtccccggagtggcggctgaagaagccagggtcacaatgtctctgggataaggttcttgtggaaactcacctccctccggaatttgcattctccggggaggggacagggctcccagaaagctgtctcccagtccagactgtcgcccccctctccctccctactcaaggtctaactcgggtccctcgcctgcttcctgtgtttacgcggcgctttagtctcccggactcgcagggtgagccccagccctgactggagcgagacagcagccgcgagcgcagccccactcgcgggccggggcgactggggctggcgcgaggcgcacggagctcaccagctcgcccctccctctcctgggacaggagggggctgactggggtggcggggtccgggaaggggggctggctctcatcaattctgctgccacctcctctgccgcctgtcgggaggcgggcgggggtggggcgggagcgcaggctaggattgagactcttaagtcaggagaagtttgcgcacagcttcacagctgggagagcgcaggaaggcgccgggaaggtgagcctcctggactctggggaggtagaaagcaagccaggggaaagaacagttgtcttttagctgataatacaacctagacttgggtctgaaccacctaagacagatttaaagtgtcagaaaaccaggagaggggcggagagggaggactgagactaacgcagttt

SEQ ID NO: 38709 - DNA, 2300 bp, Homo sapien
gtgttaaagtctcccattattaatgtgtgggagtctaagtctctttgtaggtcactcaggacttgctttatgaatcttggtgctcctgtattgggtgcatatatatttaggatagttagctcttcttgttgaattgatccctttaccattatgtaatggccttctttgtctcttttgatctttgttggtttaaagtctgttttatcagagactaggattgcaacccctgcctttttttgctttccatttgcttggtagatcttcctccatccttttattttgagcctatgtgtgtctctgcccgtgagatgggtttcccgaatacagcacactgatgggtcttgactctttatccaatttgccagtctgtgtcttttaattggagcatttagtccatttacatttaaagttaatattgttatatgtgaattcgatcctgtcattatgatgttggctggttattttgctcgttagttgatgcagtttcttcctagtctggatggtctttacattttggcatgattttgcaggggctggtaccggttgttcctttccatgtttagcacttccttcaggagctcttttagggcaggcctggtggtgtcaaaatctctcagcatttgcttatctgtaaagtattttatttctccttcgcttatgaagcttaatttggctggatatgaaattctgggttgaaaattcttttctttaagaatgttgaatattggcccccactctcttctggcttgtagggtttctgccgagagatccgttgttagtctgatgggcttctctttgagggtaagccgacctttctctctggctgcccttaacattttttccttcatttcaactttggtgaatctgacaattatgtgtcttggtgttgctcttctcgaggagtatctttgtggcgttctctgtatttcctgaatctgaacgttggccagccttgctagattggggaagttctcctggataatatcctgcagagtgttttccaacttggttccattctccccatcgctttcaggtaccccaatcagacgtagatttggtcttttcacatagtcccatatttcttggaggctttgctcatttctttttattcttttttctctaaacttcccttctcccttcatttcattcatttcatcttccatcggtgataccctttcttccagttgatcgcatcggctcctgaggcttctgcattcttcacgtagttctcgagccttggttttcagctccatcagctcctttaagcacttctctgtattggttattctagttatacattcttctaaatttttttcaaagttttcaacttctttgacttttgtttgaatgtcctcccatagctcagagtaatttgatcgtctgaagccttcttctctcagctcgtcaaagtcatgctccatccagctttgttccgttgctggtgaggaactgcgttcctttggaggaggagaggcgctctgctttttagagtttccagtttttctgttctgttttttccccatctttgtggttttatctacttttggtctttgatgatggtgatgtagagatgggtttttggtgtggatgtcctttctgtttgttagttttccttctaacagacaggaccctcagctgcaggtctgttggaataccctgccgtgtgaggtgtcagtgtgcccctgctggggggtgcctcccagttaggctgcttggggatcaggggtctgggacccacttgaggaggcagtctgcctgttctcagatgtccagctgcctgctgggagaaacactgctctcttcaaagctgtcagacagggacatttaagtctgcagaggttactgccgtctttttgtttgtctgtgccctgcccccagaggtggagcctacagaggcaggcaggcctccttgagctgtggtgggctccacccagttggagcttcccggctgctttgtttacctaagcaagcctgggcaatggcgggcgcccctcccccagccttgctgccgccttgcagtttgatctcagactgctgtgctagcaatcagccagactccgtgggcgtaggaccctccgagccaggtgtgggatataatctcgtggtgcgccgtttttcaagcctgtcggaaaagcgcagtatgcgggtgggagtgacccgattttccaggtgccgtccgtcacccctttctttgactcagaaagggaactccctgaccccttgcgcttcccgagtgaggcaatgcctcaccctgcttcggctcgcgcacggtgcgcgcacccactgacctgcgcccactg

SEQ ID NO: 38710 - DNA, 2300 bp, Homo sapien
gacattaggaaatgtgtgggaatacactgatctggtcaaatcttcagaactccccaaggctatctctctgggctgctatggttcttctccaaaaacatagatacatacaaaaacatagcttcatacatgcttggttggggtgtaaaatggtacaatcatcttgaaaaaatcctttggcagtgtctaacatttctaagtattttatccaagagtaataaaaattgcaggtccacacaaagcagcttttttcataagagcccccaaacaaactagaaacaacacaaattccagtaataagacatttgtgatatattagaatattactcaatgatttaaaggaacagactattgatacacacagcaacatatttatacattgtgggatattcatacgttttggtaaattcataccttggactacgcaggaattaaaagaaacagactattgatgcagtgacctgggcgtatctcaaaaacaggaagtgtgagaaagaaatactacacagtgaatactttataattccgtttatatgaaattcaagaataggcaaatctaatctatggtaatcgaaatgagaagagtgtttgcccctggcctaaggatggaaggattgatttaggaaaaagtctgcaggagctttctggagtgatggaaatgttctaactcttttttttttcttcttcttcttctttttcttcgtttcgagacggagttccactctgccgcccagactggagtgcagtggcgccatctgggctcactgcagcctccgcctcctgggttcaagccattctcctgcctcagcctcccgaggggctgggactacaggtgcccgccaccacgcccggctaattttttgtgtttttaatagagacggggtttcgccatgttggccaggctagtctcgaactcctgatttcaggtgatccacccgccttggcctcccaaagtgctgggattacaggcgcgagctaccgcgcccagccaaaatgttctaattctttattggtggctacacagttgtcaaaatttatcaaactgtccacctacgatatattataagcctgtattaaatgtaaattagaactcgattgaaatctgtgtgtataaatataaatatacacttatttacatttctaatctaatctgaaggtccattgcaacgaatcccgctccgctctgacccaagaactccgcactttctctccaccagcctttcaaatacctgaacttcatgccttcaagaggtggattccggcttctttacagcgcaatcactagcaggtcatttccgtctagcttgcagatttcccattactgacacaaacgctccctcagggcgtccccgtctggactacaggagaaagtttgggaggcaggttcaacttttcaacttggcggggaattcctctccctcttacacagtttgcagcgcgggggcggcggggtgacagtccccgtgcatgaatcagccacccctcaggctccgccccggcgggggtcggccggacgctcgccccgcataaagcgggcacccgggccgcctggagcagaaagccgcgcacctcctcccgccaggcgctttctcggacgccttgcccagcgggccgcccgaccccctgcaccatggaccccgctcgccccctggggctgtcgattctgctgcttttcctgacggaggctgcactgggcgatgctgctcaggagccaacaggtatctggccgctccaggagcttctctccccaaccggcggagagggcgcagcgggccatggggccccgtgtaggcgccctccaagcctcgctttctccaggtccctgccgcgcgctccgctggcaggggggactcgctcccaagtttgcactttctctgcagaggcccctccgctcggaaggggacagaactccccgggatgttctttcctcctaggagctacgcctgaccactttccctctcttttgctctccttctgccccttcttcaggaaataacgcggagatctgtctcctgcccctagactacggaccctgccgggccctacttctccgttactactacgacaggtacacgcagagctgccgccagttcctgtacgggggctgcgagggcaacgccaacaatttctacacctgggaggcttgcgacgatgcttgctggaggatagaaagtaagtgccctgcgcgcacccaggactctcgcgctccttgcgccggcggctggtagcagcttcgccagtttcccacgtctcgctttctacaggaagttttagcctgggttttctcaagtgttaagcaaacc

SEQ ID NO: 38711 - DNA, 2300 bp, Homo sapien
tgtcattccaaaactggctgtctgtctcagtggttggtgcattagagccagctcacacagattttggccatggggagctctggctcttggagatcttttcccacctcggcattcagtgattctgcagtggcagcttgaaattgaccttagtgagcacatttacatcacagaaatcagttaactatacaaagcatccccatcccatttatttttccctactggagaggtgataattaaacatttatccttatagtttcaactatcattcttaatcatagacatctgctaatcaaagctgacagcatttccagatcaggctggttttcctaggactgtgaccttgtaacatgacatcagaatgactgaaaactggcacaaggatataatgtgcaaaatacctcagattattaacccactttgagcaagtgtgtcctatacttttcagggcttcctgaaaacttgaaagagaacttctgtaaactacccccagtatcctcagaagtcaagaataattatttacttgagaatgttgaatacaacaagagaaaaggggaagggaagacaagtatattaaaatgtcttcaaaaatatctttaatattttatgtaaaatttcactgtaggtaattgtttgtattaaaaaaaaaagtggatcacaagctaatatgtcaaaggaacagggaactttaatggatgcactgacattaggaaatgtgtgggaatacactgatctggtcaaatcttcagaactccccaaggctatctctctgggctgctatggttcttctccaaaaacatagatacatacaaaaacatagcttcatacatgcttggttggggtgtaaaatggtacaatcatcttgaaaaaatcctttggcagtgtctaacatttctaagtattttatccaagagtaataaaaattgcaggtccacacaaagcagcttttttcataagagcccccaaacaaactagaaacaacacaaattccagtaataagacatttgtgatatattagaatattactcaatgatttaaaggaacagactattgatacacacagcaacatatttatacattgtgggatattcatacgttttggtaaattcataccttggactacgcaggaattaaaagaaacagactattgatgcagtgacctgggcgtatctcaaaaacaggaagtgtgagaaagaaatactacacagtgaatactttataattccgtttatatgaaattcaagaataggcaaatctaatctatggtaatcgaaatgagaagagtgtttgcccctggcctaaggatggaaggattgatttaggaaaaagtctgcaggagctttctggagtgatggaaatgttctaactcttttttttttcttcttcttcttctttttcttcgtttcgagacggagttccactctgccgcccagactggagtgcagtggcgccatctgggctcactgcagcctccgcctcctgggttcaagccattctcctgcctcagcctcccgaggggctgggactacaggtgcccgccaccacgcccggctaattttttgtgtttttaatagagacggggtttcgccatgttggccaggctagtctcgaactcctgatttcaggtgatccacccgccttggcctcccaaagtgctgggattacaggcgcgagctaccgcgcccagccaaaatgttctaattctttattggtggctacacagttgtcaaaatttatcaaactgtccacctacgatatattataagcctgtattaaatgtaaattagaactcgattgaaatctgtgtgtataaatataaatatacacttatttacatttctaatctaatctgaaggtccattgcaacgaatcccgctccgctctgacccaagaactccgcactttctctccaccagcctttcaaatacctgaacttcatgccttcaagaggtggattccggcttctttacagcgcaatcactagcaggtcatttccgtctagcttgcagatttcccattactgacacaaacgctccctcagggcgtccccgtctggactacaggagaaagtttgggaggcaggttcaacttttcaacttggcggggaattcctctccctcttacacagtttgcagcgcgggggcggcggggtgacagtccccgtgcatgaatcagccacccctcaggctccgccccggcgggggtcggccggacgctcgccccgcataaagcgggcacccgggccgcctggagcagaaagccgcgcacctcctcccgccaggcgctttctcggacgccttgcc

SEQ ID NO: 38712 - DNA, 2300 bp, Homo sapien
cctgagcaaaaggtttgcccttgacagtcaacacctgcagctgctgcggactaggtatcttaccctggaaaaaaaggagagctgggcagtaacatctggaatgcatgatattaaaggagtcaaattatgtacgcatgatctcctttaagtgtatcagtaatatcacctatcttctttagagcacctataagatcacatacattatatggcaagggccatataagaaagtacagtttgaaattctggaagcacaacaaagtgaataacaccagctaacacgtgcaagtgcttgctatgtactacacgccattacaaagtccttacctatgttacccccatttaatactctcaacaaatctacagggtaggtaatattattgcccctatttccctgtaaactaaggcacaggcaggtcaagtaatttggtcagtgtcacatggctagcaagtaccagtaaacgattattttgttggtaagtatatgagagggcttcctggaatagagaaaatgaaattctaaacccaacacaagatctactaaattagaatctctaaggttggactcataactttaacgagtttcctaaagtgatttctgcacacactggagtgtgaagagccattacctaaaggaattaaaagttttccaaaatgaagaaaaattgtgcaaagaacaatgtcaaaaggtaaaaatgatcatcaaaaatacttaatgaagttttatatttagtctaaaagactgggaaggaagatgagaataaaatttgggttcccaaatgcaaaacaggcttatacaggaagaaataacctttgtatagtcatagtgtttcttaaagaacagaatagcaaaaataaaaacataggacacattgggctcaagtacccacagtgtgttattttctacctctatgttggcctatgtagacatttgtcccttaaaattatcttaaacttgagaccatcctggccaacacggtgaaactccacctctactaaaaataaaaaaattagctgggcgtggtggcatgcacctgtggtcccagctactcaggaggctgaggcagaagaatcgctagaacccaggaggcggaggttgcagtgagctgagatcgcgccacttcagtccagcctggagacagagcgaaattcctactcaaaaaaaaaaaaaaaaaaaaaaaaattcttaaactactacttatccggagaaaaacaaggtattttaagactgggaagggaaagaatcttccttcaatggttttggaaatgaaaacaccatttaaattcaaggaaataagttaattgctgatagattattagcagagtattttcatgtagatgtaaaatgttattttgttctctgaaatagtatgtgatctatatacacttacttttataataatacttcattacaaaaattggactagggagaaggaggagacactataggtacaatgccatttggctacactgaaatctttcccaggcaatttcataggactatcaccagctattgagccttcttccccattactcactggtctaattggggagaagaggaattgcaaagagggcagaagaaagagtctgttctagtaggaggttattggtagatcagacttgctatgtcccctttagcctgctaaattttctcatcattgttaccagattcattgtgacagttacaggcaaatttcatgtgttgttggaaaaacgctcacaagtaatacgctagtttatttctgattaataagactgtttactatatttccattctacgggtacacatttaaacaatccattatttataatgaaattatagtgatactttttatatggttcccttttaataccaggttaaatactctagagatttagggaattaatggaccgtcatccaaatgacctcaaattaagttaaatgacataaaacataggtggagggttttggaattgaaagtaaggattggaaaccccaaattttacactatacaaaagaccaggggcaaggaggcgctttaagtattttagattatatactgacaaaactcacccctcccaacaaacctgctgaacaggtgtttggagtcaaatgcttgacttaatcatattagtgaagattaggaagaagctttaaaatcccaaggctagtgtgcattgctagaattgttaagagagagagctcatatgaaattggttatcgtgggatatttaaaataaaacaaagaacagtttactttgtaagttaagagctgagggaattgttggctaagactgacttgaaataactccagcaattcatg

SEQ ID NO: 38713 - DNA, 2300 bp, Homo sapien
caaacaggaaaccagcaacaataaaacctttttcagaatcctgtgtgatcatgcaatttcaacattttgcaattcacttcagtttaatcaatttacttaagatattagaatatgaattatttaataacaataaaaaagactaacaagtattttgtttctaatacgtctcataatacgatgggaaaagttaaagaaccaatatgggcttataagtatttatccctctaagcaactagatgatttcatgggaaagaaacttcaaagccaaaataattatatttttatgacttagaacaaacacacattaacaaaaaattagtcaggcgtggtagcgggcgcctgtagtcccagctcctccggaggctcaggcgggagaatggcgtgaacccgggaggcggagcttgcagtgagcggagatcgtgccagtcactccagcctgggcgacagagcgagactccgtctcaaaaaaaaaaaaacaaaaaaacaaaaaaacaaaaaaaagaacaaaaacacaataatttatttaaccaatttatttaacttaggtgctgaacctatttaatttaggccacattcacgttgattactttcactaatttaaggtatttttgaccaaccttttaaatttaagtaatagaaaattttaaaaatgaattagtgcacaagacagatatggacatttgtctagtctccctgcttatttacaagtaaacttcagtagatgctctaactactctgagcttggaaaaccctggtatttcaaatattgaaagtgaagctcttaaacattttctttgtgaaaatgatttatcatatatagacataccaacacaattagagacacaacatagcttagctgattcactacttccctgccttactatacattttacaaattagaaaaccaaaactaagaaaaattaaatgacttcttcagtgatggcctgtggcagagctgcaactacacgccaggagtattcattaagtggttcattgtttttttcattctaatttattcattgaggttgagcggagcgtggtaagaaactaggaacgaacaaaaactcctgcttcctaaacagggaatggtcatgggtgtcttgggtcagctactctgaaatattaagttaatatttcacttgcctttgactctgtgaggcaggaggttatctctggaaagaaagagaaatatccaactgctagggaaggtttcttacattcatgtttgatttttcttctactcttttgaccaccatcaacaagactttagttacagttaaagggaaagttttattgcatgtaaacttttttcacatcggacacttttcctggctttccagagcaacagctagataaatagtgcttgccagaaagtggagaaactaatactaaatgaatccactgcctacatccaggaaggttcaggagccaggaattcaaaatccttggtgtcaagtgtcacccaaaacttagggttggggagtggagaaaggctttcggttaagaactctaagattcctgcttctgtcttctcttatatcatcctttgatgcacccctctacataacattcccccggaaaaataaaaaaaatacaaactctgctgctgttgaggatgcagatgattatttaataatagaaaatgttcttgcaacttgtaaacgatattcacaccctgttgccccctcctcgcccaaaatgtataaacccatattaggcctcgaacaagccggatggacacaaatgagcagaacactggtgggtatttctgggattagggctaagcttcattttcttttcagccttttcttaagcgtccgcattctccactatgcatttattacgttggtgcaaaactaattgcaccaacctatatatgtaattagagaaaagtaattacttttgcaacaacctatgtatgtaattagggaaaagctatatctagcatatttttaaaactctttgagaggtgaagggtagttatttcctgctgggtagtgtactccttttcctagcttcacaaacaaaacccggatgtgacttggaaacggaaaaaaaaaaaggagcgggggtgcgcggagaacacaaagtaaaacttctgctgttcccagtcctgcagccccagcccagccgtcccccgcgggcgtggcaggtcctgagtcagggcctgtccgtggccagcatccctgctgggcgattgagcagcgggaagctgcttggacccagtctcaaacttaaccctcatctagcacccgggcaggcctcctgggttgcagggacttgagaaaaggcagagttct

SEQ ID NO: 38714 - DNA, 2300 bp, Homo sapien
ttgaattcaaccagtcagtaattacttattgggtaaatgttatatactcagaacctcagccacacaaaataagaagacattctttctttaagtatcttggcccttattaaactacagtttgcacagagtatcattggttaacagagtaagaatgcatttttaaatggtgattttaatatttgactgagcggaaaaatatgcccactccttgagttcttttataataaaacatgtggagagcttcatggatagtgtgtcatggatagtgtgtcagcagcaaaattcagatagtacaactctcttctgtttggaaaatacttcttcaatattttgttgtggtttttgtggtggtggagattgcataggtatctgctgcatataaagtactcattaggtacagggaggatatggaagcatgagatactgtctttgccttcagagaagcatatgattccattctggacaaaggtatgcacattcaaagttcaataacagtgaactcagattcttttcattaattagttcacatcatgtattcattgagtgtgccttacagtgtgtatgtgtttgtaggtttatggggggacatacagtgttgagtcaaacaaacttattctcttcccttatagtactgtacagagtgcaatattagtgttacatacaatcagagctgtaagaaatcagtgagagttttgcttcatagggaaaatgaaatttctattgtgccttgaaagaagttcctattcacaccttgactgtccttcagtgatcagtgctgttacctcctgtcactgctgctgcatctgctcattgagcatatggagacttctagttttgtttgtttttaatagatgaggtcttgctgtgttgcccaggctggtctcaaattcctggcctcaagtgatcctgcctccctcagcttcccaagtagctgggattataggtgcaagcaactgtgtgcagcaggctctgagacttctagttttgatatcattcctttccccacattctcaagtcactgttgaatctgctttaatatctgtccaatctaatccccataatccagatcttcaaccgctcttttggcaagcagtctcaacctcttggggctccgtttttctgcaacctcaatattataagcttccaactatagattagtccaaccatccaccttctcctggactaactcaggccgatgaactcttctgcagaaaaaaaccacacacctgggacgattgaagccaccgtagtatattgcctcaaacaagtttgttttatctttagtaatcctgtgcagtcccggtccctttcctccatcattctccttactgtatattctgaatgatcacccattcttcagcagatagcccgttttctccctttactgagaaaattgatggcaacaattatgttaaaaaaaagttcacgcctgtaatcccagcactttggggggccgaggcggatggatcatgaggtcaggagatcgagaccatcctggctaacagggtgaaaccctgtctctgctaaaaaatacaaaaaaaaaaaaaattagccaggtgtgatggcgggcacctgtagtcccagctgctcgggaggctgaggcaggagaatggcctgaacctgggaggcggagcttgcagtgagccgagatcgcgccactgcactccagcttgggcgacagagcgagactccacctcaaaaaaaaaaaaaaagtatagttaactaacaccctgaactatgccgtttcctgttaatcgcccaacatatttatatatgtattcactaaggcccactccatctgttgtttgatagcctgatgactatgaagtactatattaggcagggaggtgtacattcttatcccttagagttccataaaagtagcacctagaaagaacagtggatctgatacatggtaattcttcaaatatatgttgaagaataaatgaatctccctcttgactctcagctagcattctgcataagttattgtgtctctttcctagagcttcagtttgccccctccctgctttggctctttcctgtccaactgtctatttaagagaaagagatgccagtaaagaaccctcgccgctatgagctcccgtccttctgtattaaccacttttcccttcctcttcacagccacgctttttcaatgggtagatgatgttactgcttttagaactttcattaaaatatatgtttctcttgagcagggaatgtatcctgaatattcttgtgtattagtacctatttttgtatcttctggacaatcaataagcaatccagaaatgtgt

SEQ ID NO: 38715 - DNA, 2300 bp, Homo sapien
aaaatgtgttaatgtttattgaaccagttttgagagcttggtatgctcttttcccttggattggacttgaaatttggtcaggaagaggtaggacaaatgggcaggcaggaagcagacagataggagaaagaaaagttccaattttgcacctcgattcagacatttcctgcttttattcttgcttttgtaattactagaaggaatacttaatattattttaagtaatttttagtcctttatctcctagagacctacaaacattagatgttttctgtgagactatcctgtgagaatagagaagaggttctaaatgctattcatctctgtgaaatttatttgctttcaatcagtaagaaaagttaaggattttaatttaaaaaggaaaaagcacaacgagaaaagtgaaaatgattccctctgatcgctaatgtcaactatggtcacatttaataattctttttctgcacattgagttcatttttcctgcctcttcctttgagtgcaaatttttttcagatgacattatcctaatttgatactagcaacgttagctaaaaacaataattggattttttaggtaacaacttcaatatgaactagctttgccttacttcagttatattcttagtacattatatatgttttccttttaactacatttcattcttatgtcttcctaccatgtaaaggaagcagtatattttatgtaatctaaatgattagttctagtaaatattaccatattttcaaaaataacgatttctacatttccatcagcaagccttctgtaaggcaatttttaaacgttttaattatagaacatgcatttttttaaccaaaggactgtcacagattttaagttataaagggatacctagctatcatttcttttattgaatctccatcttttatttgtaataattgtccctgatattatgcttatttaatttcattgcttttagaaaatggcggttttattttaatgatttttttctatcaaaacactattggataaagcctccttcccaggttaataactcttattaaaaattgttttcatgtgttttttacaaaagcaacttaacgcagagacttatgccagtattatagtcaatgttaataatgtcctgggaaactatgaggaaacgctaaatgatcaaagatcacatattcggaaatctctagtgtggagacgattccactgccatatatacagcagcaacaacaaaaccgcagacacccagtgaattttgatcacctactgtgtatcaggtttttttgttttcccttcaaaaaccacgatttcatcgtattctcacgataaatcctctgagataaaatgaaattctaggattaacctcgataccagtaacacctccaactcgccaacaagttttaaacccctaattggcacactgccttgtgtaagcagtatttcaataagctttgtgtaagttaaaaaaaaaaaagtgggagagcgtttaggggtcctttggtccccataacaactaaaagtcttggttctttctagaagtacaacagatgcagtaacagggaactaactattcagtgcctctgaccagatcccgcagcctttcctagtctgctctcatctgagcaggagtcctactcaaaggaacctggttttctttcctttactggatactacaaggcacaaatcggttacttctgtgggtgtcggattacttgtttgtaaactgagaaacctggacaaagttttctctaactttccctgaatcgtctctggaggtgagagggagttcgaggctaaatcaggaaagataccccaaccatcctcttgtgggtggggaggagcagatctgctgggttaaacttggtggtcaacaaactgaaagcagcgacccgcgggctgcgagcggaacagcgggaacgttggatcagagacccagaatcagagccgcagtcgaagccgcccccttttccggacgccccgtccgctcctggaaccgggttcacatcacgccctcagcaacacgttatgcgttggtgaactacatttcccagaatgcctttcaaccttcttcccagggctccaatgagcgccgtggtgacgccatcatccggcgcggtgtttagactccactgatgtcgtggcgctttaggggaagaagttggtgtttcgctgggccctggtactgaagacgcggtccgggtcgcccctagctgtttcctactcacccaaagccccgcacccgccttttctctctctcctctggcaggatgaggcgtgcaggcctgggtaagaagagggctgaggt

SEQ ID NO: 38716 - DNA, 2300 bp, Homo sapien
tgacaacaacaacaaaacctacaatgaaatgtttaaaacttgggatatctattgcaaatccaatgattgagccaacttgaccccagaagcgttatcagataacctcactgaagggtatttggagggtttctttcataaatctgttgcattaccaccctgagtcattttgctcagaattagtctctgactctcagcaacacaggacaaatacacacatatgccctgcaaaggtaattcagcacagtggtaacaatgattcttagaaatcatttctcactcttctgatatgcagaaaaaaatttgttatgatgtagtattgaagtttttctttcctgataaaaatgatttccactttaaaagttttttgttagttctgtaacggtgatatttcagggaaatgttaaaaatgttcttggaatatacaattcaacctcaggtcttttgttgttgttgttcctagaacctagaaaacttcaaacattgttgcctagttagaaaaaaatttgaatgtggattgctccctgtaaacccccttctaggaatgaccagtaaccctttcaaattctttcactcccagttacttcaaaaaatcatccaaagtggtctcccaagtgagtgcctttaattagaataaaacaagagtttattatagtttttggttatccacttttacttgcattaacctttttttcttcttttacatttagaaagagtaacctgctttagaatagtcccttttatttacagaagctgctgatggagttaacttctgcagaaattcttccttaaggcaaagcaaaaaaagcggggagggggtggggggaaggaagggaaaaagattctcagggaactacagcccacttgcttctgtttcttagagacagaactgacctaaagatgccccctttgcgatgacttctgggatagagcagcactctaactaggcccccgctgcctcatggggaccttaggcaagtagaggagaggcctgacacacacacacacacacacacacacacgcacacgcgcgcgcgcgcacacacacacacacagcctttcaaacctagggcctggaatgccatcccaagaggctttagaaaaaggcacaggacctttggcctcccacctcagggtcaaagtaccagttcctcctctccctagtagggagtggagggttggatggaggcggccagagaagagggaagttgggtgctggggagagagttaacatccacgttggtgggcgcactgcttggggtgttaccagcgaagactacgaagaccccaagctcgaatcagaagggcctctggatgtgctaggggaggtgcttgggtgtggctgtaagagatgggacagagagtaagcagcaaggtcaagagggaccggggggctcacgggagggttgaagggtccaggctcagggtagaactggtaaatccagacaaggagcccatggagaaggggaggggagactggaaaccatgaaagatcccccaccgcagcctcagaaaggagagactgagaaataagttctcggtctccaggtcggttggagtcgtgtcggagtgccagaccatcccccaaaagaccctctttggaatgagcctcagcaaaggcaagctaggaggtcgaaggacttccccaggtgactcggtctagtctagagttcgcaaagcctatcctccctgtagccgggtgccaagcagcctcgagcctgctccccagcccacctgccaacaaaaggcgccctccgactgcaacccagccctccacagacaggacccgccctttcccgaagtcataagacaaagagagtgcatcactgctgaaacagtgggcgcacacgagccccaaagctagagaaaagctggacggggctgggggcggggtgcaggggtggaggggcggggaggcgggctccggctgcgccacgctatcgagtcttccctccctccttctctgccccctccgctcccgctggagccctccaccctacaagtggcctacagggcacaggtgaggcgggactggacagctcctgctttgatcgccggagatctgcaaattctgcccatgtcggggctgcagagcactccgacgtgtcccatagtgtttccaaacttggaaagggcgggggagggcgggaggatgcggagggcggaggtatgcagacaacgagtcagagtttccccttgaaagcctcaaaagtgtccacgtcctcaaaaagaatggaaccaatttaagaagccagccccgtggccacgtcccttcccccattcgctccctcctctgcgccccc

SEQ ID NO: 38717 - DNA, 2300 bp, Homo sapien
ggaaagagttgatgaggtaaacatgcaggaacagagtccatgggtgtttttcattaaaaaaaaattttttttggaggaaggcaaacagcaaggtgatagggagaattggaagacacagaaaaagaatgatttgcatggggataactgatggaggaatcaacaccctcaagaaaggaggataagaaaagattcagagcagaggtagagagattggccttaaacttgagagaagaaaaaggaggttcacaagctatttacagtatttaagaaagccttctggaaattgcaattaatagaatgtcaagtttctttactttttgcaggcattaactcaaccctttgggttaacactggttattgcatgctgatcagaaattctaatttgctggtaatgacatcatagaaatgtctaggatgtgattggcagaccatatattgttggcagagttatctggtttttacaatacccaattcttacaacatgtgatcaacctctgatcagaatgacagccaaaattaaaagactatttgcagggaacagtgcctaagtgtttgtacacttatttaactttattgcttattagcattacatccatgacagtgatgtatgtgatttcatttaagtgacaaaatctttcaagatataaagtccatggatgaaaacataataaagagtccttggatgaagagaatgggaatgagtagacaagatctctacagtcccttcatatctaatattctataattttaagaggggcctataagcacaagttcaggaatggctaaatgggaaagttgtaaagaatacttgacaacaccccaactaaacaatgactcactctaaacaaggcaaggcaagtagaatggcaagcaatgtaaataaccattcccatctggaaggcaacaagaaaaaccatttaaaaaaggtggggtgggagcgagaggagagtagggataacaatgctttattaaggaaatggagtgctggctttattgagaatcacaaaacattaaccaacgttagtagcggggatgattgtcataagcacattaagaaaaattttttttggctaggcttggtggctcatgcctgtaatcccagcactttgggaggccgagatgggcagatcatttgaggtcaggagttcgagaccagcctgaccaaaatggtgaaacccccgtctctattaaaatacaaaaattaaacgggtgtggtggcgggcgcctgcaatctctgctactcggcaggctcaggcaggacaaccatttgaacccaggagggggaggctgcagtgagcgaagatcacgccactgcactagagcttgggcgacagggtgagactccctctcaaaaaaaacgaatttttttggcacatcgacctagccaaacttgcgtaaatacaagtgagagtcagactcttttctcatcaacacctacactaagttaggctccttctgtaccttccattcggaactttggtgtactttcgcccaccagaactgggcaaactgaggacattaaaaaaacggtttaagagaaactggccagagcggtgagttaagtgttaagactggtttcactcctgggttggatgccagcaatccatcggccagcaccatcaactggatccatcaatccaatctggccagcacccaggggcagccagactgaccagccaggccacggatagccagacaataaacgaccttagggtgtccttcgcatcccgctgggcgggttctggcagtagaaggctgagaaaggggagtgttggggaaggaaggaatgggacgatgtgtacttttctcccggaactgtagttctattgccccaacctgggctcaggtagcggccagtaaactaggagacagccctaaggctcgcgtccgggccaggcgggtacccctagtactctctccccacacccccatggctctgccgcagccgccgccgcccgccggggcgcgtgacccggtgaccccggagcactgggcatccggacccccctcgcaggcgcagccgctattaaggcaggaggctaaagaggaggaggaaggggaggagacaggcgtccagggcgcctggggaaccggcacggcggagcagcggcggcggggctggggggaggccgccgagtcggccgcggccgaggaggggcaggcggaggtcgggggcgccgcggccgcggggtcaggttccccggcgggaggcgcaggtggcggcctggggagctggcggccgctcctcgcctggctgcagcggcggcagccccagtgctgcccctgtgcggcgccccttt

SEQ ID NO: 38718 - DNA, 2300 bp, Homo sapien
tgtattcttacttaatgattttgtttcacgtttaagaacatgctaagaaaaagttaatttgtgttcagaattcttgattgtacctaaatttttaattcctacttctattatgattagattgatgaattttaatacaaatactggaattaacttaggaaacttactgttaaatatgagtgttttttatatctaaaattgtattcttcttgaatgttatacattgaaagtatagttttataacagctttttctaattgctttcatatatttcatgaactaatttgactgaattttattctaatattaaataaaatgagaaatatctaaaataataacacttgttacagtaggtaaattatatactttaattgtttgtgataaatactaaattaatgcataatttgtacttctttttagtggtccatcaagattcacaatggtagcagtgaagcgctttctcaatataaaatgaacatcacctccatagcaccacttttagaaaaattggcaaagactagtgatgtttattgggtcttacaaggtaaggaatgagtaatgaaaaaatgtcactttgtgtatattttgaagcatgggtttttattatctcctgtttcaagaagcagaattactgctttatgagaattaattttgaaacaagatttgcaagattagagtacacttgagttatttgctctcctttttcaaatgtaaggaacaaattaataaatataggtgaaaaataaaaaatatcctccaagaaacctcatggctatagaatgtatgacaaaaagataagtcctaaacgcaaatgacatgtggtatccctgatttttttttcttacaaaacatatttattgtgattgggaaatatatacaaaaaatattatctgtttcataatttttttttttttttttttttttttgagacagggtcttgctctctttcccaggttggagtgcagtagcacgatcttggctcactgcaacctccgcctcccaggctcaagcgatccttccgcctcagcctcctgagtagctgggactacaggtgtgcaccaccacacccagctaattttttgtatgtttgatagagacagggtttcgctgtgtttcataacattaaagtcattagaagtaaatatacttcaccctgcttcataatattaataaagtcattagaagtaaatatacttttttagcaagcaatgggtttctgaaaaaataaaaataattaaataaaatacacttttgaattgacagaatatgtttaaattgacaccatctggtttatgcttggtaatgaaattcttagtagacattaggataactcattttaggaatttattgaatgtccattatttaatgcctagcacaatatgaaatgccatggatattttagcaattcatgttttgtgtcaggaattcttattatttccaagttgaatgtcaagatgaaaggaataagaaaaagggtagtgatgatctgttccataatctctgttttattcacagactcattgttaacctttctcataccaaaatgaggaaaaattagttatttatagtaagtgataagagaataggcagaccttgagcctcaataatattacctcctgatgatatgaagaaagtttacagaattaagcagtgacaagagaaaaaaagatgggcagctatttttaattaagcagtcttctataactcattttagatttgttgttacctgttataactcagcatccaaaaatgttaaactcttaagacatgctggagcataaaaatatttccgcaaatctgtgtacataaagatgggacaaaagttctttaaatttgaaagggatattgcttgactcaaaacttgaatataagatgggaaatttattgcaaactttgggaagctttgcgtaaaaatgaactattaggtacctggtaccatctatacttttaaaaataacatatgaaatgtggaacagctaacttgcatgatcacaatttttaccaatagggatttttaaaatgtgtttttaaaaatgtgtctcacgtgcagatcctgtttatgaagatctattaagtgaaaataggaagatgatcactaatgagaagatagatgcttacaatgaagctgcagtcagtattttgaatagtagcaccagaaattctaaatcaaatgttaagatgttcagtgtttccaaattaattgctcaagaaaccatcatggaatctttggatggcttacatcttcctgaatcgagcagagaaactgtgagaaatttttacatatgtcagtagatggagactata

SEQ ID NO: 38719 - DNA, 2300 bp, Homo sapien
ctacttgggaggctaaggcaggagaattatttgaatctgagaggtggaggttgcagtgagccgagatcacgccactgcattccagcctgggcgacagagtgagactgtctccaaaaaaaaaaaaaggcagtgtacaagttatgctgtggaaattgtgattgtacacataaaggatcagctggtgtagaaaggtggaatcacagtgttctaaggttatgagaattagtactagtaaatgaaataacattttttggtgcctcctatcatatgtggattcaaatgtgttgtatttcattcaacttagaagtaaagatgtgatgctctgaaataccataataaatgacattaagggacttggtcatgatgaagacagtgatgtaggagcataaaacaaaattgttttgtaaagtaagagtgggagggaaataatattcctaaattatgtttacactgggtaaaagtatgaatccatcttgcattcaggatgtatgacagttaattatagctatcatattgaattttaattgggtacaagttaatgtataaagtgcttcacatttattatctcattcatccttcacaagaacccttcaaggaaggaaggaatagtctcattttgcaaattagaaaactcaaagtcatgtagttagaaagtggcagaactagaatttgaagctaggtctctccaattccagttctacatttttgtaatccttgctataatgactaacttttgagaatcaactttgtgattgagctgatgccaaatgctaataatcatttattatctttgttaaatgtacttgttatgataatccaaggtgtagttgatgccaacatatgttttacctgtttatctttgtcaacagtttttgcctgtatacatgcacattcgagttctggttgctgcatatttatttcagacagggtatgggcatttctcatacttttggataaaaggagattttggaatctatagagtatgtcaggtaggaatgcactgttatttccttttcttccagttgaacatactttcttgagaaagcattaacttgagaaaaaaatataaatatagtcattataagactgaataatttgaatttatgaaatagcactgtgaagttgtattctgtgttctgtgtttagtatttcaagataaattattagtgaaagaaggaaaatataatttaatatataataaaagcactggtacacaggagacagcattgctgattcactttaattttgtagaaatagttacctggaattagtataatgtgctatgttttctttctttgagaagaggatgaatattaattaagtttctacctagtgctaagcagtttctaaacattatttcatttactcccacgttacagccttgagttgttatctttatatttacagatgaggaatctaaggctcagagagcttaaataatttgcccaaggtcacatagtaagtggtacagcactagtaaaaatctgctgaaattctgtgttttttgaatgacatcaagctgatatctgaaatgactcttattaaagtcccaaagacatttttaactttgagttttgagtaatactattttgtatctttgacaactcttaatttaatcccaaatggggtaagtcaacattaaacaaagatgaaatggacactgctttcttaagataatctaatctatgcttctacactatagccctcagaaggacgacttttttctcttttagcaagatggcagttatagccagaggacagctcaggttggtgctttgctgggatttagttaatatgatgatgtatacatattttatattcagctctttacagtgaatgtaaaacaaatgtaatttaagggattagtaatatatacttgtacagtcattattgagtcttagccatttatactctgtcagagaaaatctgcctttgctgttcgtgtgtacctagaatgaaaacaattacttagaatgaaaccattttcttctccttttcaataggttttatttcgtctcaatttcctggtagtggtgttatgtatagtaatggatcgaccttatcaattctattactttgtccccttggtcactgtatggttcatggtcatatatgttactttagcactatggccacaaataatccaaaaaaaagcaaacggtaaatatactttcttactaatgttagtaaatatattttttcaacgtgtgaaatttctttgtagttgctaaatgatattatttttattaagtgatgtagacagtttaaatttatatgtagttttaacattttgaaattct

SEQ ID NO: 38720 - DNA, 2300 bp, Homo sapien
atgtatgtatttactttgtgatattttgtcatttcaaattatactgttggaaaatgattggaaatttttgatctatctatacttagtttcagaataaataaagatgttgatttagtaaatcaaagcagtccagcagtccactaccccctgcactcttttctttacagcagtgaaagggtatgcatgtgtatatatatatctgctgggaaatattattttaaaatattatctataacatggcctttgtctgacttataattttgatttataggtgacttgttgtatatatgcttcagccattcaaaacaatatttattgagtttcaatatgtgccctagatgttgatgccatgaagtatacattagagaaagaaagaagacatctcagcaggcttcgaagctttcagagtctagtttaaaacccaagattactattataagaggctactaactatgcaatatagatttagtggtagaagtgtgcaaagaagaaagagcagtgtcttgtattagtctatgaacttgatcttgaagaaaggttaaggttcaattggccaggaaaatgtaaatctagcacagcatttggaaaactgataataactattaattatttcattctttccttttttcctttcctttttgactgatctcttttttccaataaatgttttcttagtgcctattctttgcctttcctagtttccaacccctatgcatttttccagtgtactacattgcatttcaaaaccacatctgaataaaatctttgctaaagtcttcacatcaaataatttttaaattctcaacattctcattagagcagtgtattatgatacgactgtcccagtctatttaggctgctgtaatagagtaccatagattgggtggtttataaacaacaaaaatttatttcttacagttttggaagctgggaagtgtaaaatcacaccagcagatttggtctggtgagggcccacttgctatttcatagacacttgacttctcactctgtcctcatgtgctgcaagggtcaagggtgctctctggggtctttttttttaaagggcatgaatcccattcatgaaggctctgacctaatgaccaaccaaaggctttacctccaaaactgtcacactggggattaacatgattcaacttacgattttgagtggaaggaaatgttcagtctattgcaatgatagttcacattaagtccttgtttaaaaagagaaagctcatgtactttccggtctaccatatttttttcacttttatgagcgtacacttcttttcagaattatgacttggtggtgttattctttgttttatttgactgaaaggactgatataaaatgtgtttcatctttgttgggtgcatttaaattttatcatatgtctgtaggagagttccttattatttttaaattgtctttattacttcacttgccactgagactgctcagaatcaaccagtgttatctcatattgttccaagagatgcttgcttgtctattgctgatggtttctaacaatcatcggctttatttcatttcttgaagtttcactcttgaagtccttcatagacacttcaaactttaagcttttaacctacctacttttattcatatattcctcactaaccaaatatttttcctgttttttgaaaagtaactgtttaaaacaaattttctctctttacttttcaggtagttttccacggaatgctgtttgcttttatttatctggctttgcagaagcgtcaaatactttctgaaggaaagggtgaacctcttttttcaaacaaaatttcaaattttctgttgtttatttcagtagtttctttcttggtaagttttgaaaactttccaaaattctaaatggtatggaatattaacattaagatatggaaatataatcaattatttttaataataaatctttttttctccttatttttctttttaatatttagaaattttaatacttctctcccagtaattgataggatagctagacaaatttagtaaagttgtagaatatcttaaggacacggtcagtttgacctgatgttagaatagttaggtaagcaataacagcagaatacacatttatttcaaatgcatgcaaaatgtttgccaagataaactatatttttatctataaaaatagtttcaataattttttaaaattgtttgtttttaattatgaatacatattagttcatatttatggggcacatgtgatattttgatacaagcatacaatgcataatgatcaaatcaaggtaatgttaaatgcttg

SEQ ID NO: 38721 - DNA, 2300 bp, Homo sapien
aagatggatttttgaactttaatttttcctgcttttcatctatactggttttaaatctcaatttttagaaaaataatgtctcagttaactaggtgaagtaactttcgaatttaaacaaacaaacaaaactggtaagaatttgacagcggtcaccagaacagtactctaccaagcataagaaatcctggaattattctatcttgcagaagagggtgaacatcctaaagattaaattaaaaggcacttctaaaaagtataattgtgtttacccaacttcctagggaaatgtctttgttaaaaagctgcatttcattcattcatattccggatagtgggcattttctaataaaaagtaaaatctcagtaaatgggctacagttttgtttattcctagaaaggctctcttttaaagtgcggtgtctgcaacgttgttatgacaataagtcaaattcttattgatattccaagtataaaataatccgtagcaatgttactaaaatgtgctcaattttgctcttcaaatatgaaagcgtttcatctgtgtttcagaaacctaactcagctgtagacaatttggttttcccttttaacttaaacttgttttactaagatcatcaacagattgtcagtttcccaagcacctgacactgaggcgcttagatgggaatccgcgttaaggttttatttagcatccttcctcatcagaattttagcgtcttatcagccactgcaattttccctgacataaaatatatatgttcatagtacaaatgcacgcaaatatttgtggccgaatctcggcaacccgctggaaaggattaaacgtgcggttgccgtgactaaacgcattcattcaccctacaagatttaggaaaatgtaacgttgcaagggaagcaaggtctctgtgtaaacctcgtaatcgccaccaaaagtcggtagctgggagccttcaaagcccgccaaacacactggaagcatccacagctgttttaaattggttttggtttctggaaatagcgcactcggtacggcagcatctctggcctccagccggggttaaccctgacctgaacgccctgtttagctcccagcatttcatgattccgcttccctgctccgtaaaaccgaagaaaaccgagatttccgtcaccgagaaatgcacttagcaagagggggaaattcggtgttttaaatgtcacatttttgtgttctctaccactatcaagaaaaggaaaaaagatgtgtttgtgtagcggggacgcagcttgacacccatttcctttggctcgcatcgcggtcgcagagcccaatcgcggggaaacgggccccccagaaaaacaggcaacgacccccagctctttgctacagggatcgggagaggactaccctggggctgggcggggagggggatgttgggaacaggaattggagatggaatttctgcgcccgcagagcagggaggggcccgcgggggcgcggagaggaaaaaaaggccaggggtcaagcctggggagagagaagctgggccggggaaatggggtacagggtgtactgaaggaggggtacggtggggtccgggacagaaagagaggctggtgcccaaagggcgcgctcaggcgcccggaacccgagcgggggagggggaggcggcggcctgttggccccgggacctccacgtcgcgcgcaggccactaacctgtcagcaagaatgtgccagtggtcgcggggctcatcctgcgtgtcccccgaccctgtcccgtccaagcacaggggtctcccagctcccaccaccggggcaattgcattcttggcctggctaggccgtccgtcctcgattctcccctcccctccctttcttcttccctcccagcttggccagttcagcatcagcatcccgcaccccctcggtaatcccgtactccctctagcggcgggccactgcagcgtggccaccgcccccacccccatcccccatccccgcacccccctccaccccctagcccgcggagcacgctgggatttggcgcccccctcctcggtgcaacctatataaggctcacagtctgcgctcctggtacacgcgcttcaacttcggttggtgtgtgtcgaagaaacctgactgcgccctgaggagaacagcggagaaggtccaccgagcctggcgaaaggtccgctgagcgggctgtcgtccggagccactccgggctgcggagcacccagtggagaccgcgcctggctcaggtgtgggaccccatccttcctgtcttcgcagaggagtcctcgcgtggtgagtatgcgg

SEQ ID NO: 38722 - DNA, 2300 bp, Homo sapien
cacctcagaggaggcgggcccaggagaggcggggcctgggcagttcacctcagaggaggcgggcccaggagaggtggggcctgggcagttcacctcagagggggcggccccgggagaggcggggcctggacagttcacctcagagtaggtgggcccgggagaggcagggcctgggcagctcaccacagaaaaggcgggcctggaagaggcggggcctgagcagctcacctcagaatgaggtggccagagagaggtggggcctgggcaggcaggcgctaaggagctgggaggaggggcctgaggaggccgcatctagaaggcgcgctctgggaaggcgcgctgcaggggaggcgcgctctgaggaggcgctgtaggaggaggcgctaagcaccgcagagaaggcacactaggatgggcggggcaggcctgagactggctgctacagggctgcagagtatctgcacaccccccccccccgccgccagaatcccccctcccaaacccctcccaccagtcaccaaagccagattcatttcatgcagcaagagcaatccacagatccaattcccccgccatactcagcaaacccacagtttccacaaactgttgctggacgctgattcgcgccaccacaactacaccgccacttcaatcaagcacaagtaggcaggcagcctgctctgccatcaccaaaagattcccatttccactccaatcagtgcccctccactccactgctatagcgggaatggtgtgggcagaatgttaaacactaatttttgcccggggctccattttgtctaccagcaccatcatgcgagaaccgtcctgcagaaaaatagagtgggagccattccaaaaggtgaaagggtggggtcctgctccaagaaaacagaggaattgtactccgcagctcatgtcccactacggctgctttatttgtagcgcaaacggtctgcagctcctgtacctctgcagctcttaccactttgtagtgcatcttaggtgtgaattgttccgcagctcatgtacctctgcagttcatgtgcctcgcagcgcaatgaagcgctgttgtcgggctggctaatcgcatcgtttttgtagcgttttttgtagtgctactcttctgcagctcagattttgcagcgcatgtaaagcgcaattcagttttctgtctgcagctcctatatcgctgctcctcgttctggattgtagcgccactgaagcgcccatccgtcagtttgtggcacataaagcgcccatcagtttatagcgcaatgaagcgccagttgtagctcccatcagtttgtcgcccgcgtgaagcgtgcttgtagcgcatctgaagcgccagtttgtagcgcatttgaagcgcttatctgtttgtaaagcatggcacttggtagcgcatttgaagagcaaattgcaaatcgatctatagctcctgaccgtctgcagctcatcactgtccgcagctcatctctgtctacagcccgtatctggacttggtcctggaaacccaagcctttaaggcttggtttccccatttgttttggggtacagccagtgaaggcgtgacaagttttgcgtggagacattctggggtgctactccatctcccgcagctcccgataagcacggggaatgaacgtgatctttaaaaaaaaaacgtcctcaccgcatactcaccacgcgaggactcctctgcgaagacaggaaggatggggtcccacacctgagccaggcgcggtctccactgggtgctccgcagcccggagtggctccggacgacagcccgctcagcggacctttcgccaggctcggtggaccttctccgctgttctcctcagggcgcagtcaggtttcttcgacacacaccaaccgaagttgaagcgcgtgtaccaggagcgcagactgtgagccttatataggttgcaccgaggaggggggcgccaaatcccagcgtgctccgcgggctagggggtggaggggggtgcggggatgggggatgggggtgggggcggtggccacgctgcagtggcccgccgctagagggagtacgggattaccgagggggtgcgggatgctgatgctgaactggccaagctgggagggaagaagaaagggaggggaggggagaatcgaggacggacggcctagccaggccaagaatgcaattgccccggtggtgggagctgggagacccctgtgcttggacgggacagggtcgggggacacgcaggatgagccccgcgaccactggcacattcttgctgacaggttagtggcctgcgcgcgacgtg

SEQ ID NO: 38723 - DNA, 2300 bp, Homo sapien
tgacctctaatgcctaatacattaatgatctattgaactaagttaacccttataaagttcatagaagtgaaaatgtggtctagaacaacactgtttgatagaactttctgtgatggaaatgttgcgtatctacactgtgcaacagagtggccactaggcacatgtagccatcaagcctttcaaatgcggcttgtgtgactaaggaactgaattttaaattgtatttaattttaattaaagttaaatagccgcatgtattggattagcagtctaatagacccttcaaacattcaagtaagtgttggaaatggaaggtccattataggaaatctaggaatcttaaattctcaccatcgggtttaaaactctatcattccttcagtatgaacttttccagaagtttcagattttcaaaagataaaactcaaaccaaccaaatcctttagggtgcttttctgtatgaatcatctttctgcaaagaggtgtaagactgtctttattgccaactctgccccctcttctacagacagaactcagtgattagattctgcatttatttaggttattcgcctaaaaaacctggtttccatactgcaaataaatgacaggaacttttccactagattatcccagacagcagaaatgttctttccaaaagtggagcctggaaccacagccccctcacattgcctgttacatctgtttatgcttatagaagtgacatccacttcgtagacagagaatgccaatttcttgggaaaggacccagaatttggtgatgcttaaaggaaaaaaaagcccttgctgcttaaaattaaaaaatacatagaactgagtattgagtagttacaaaatccttctgaaatgaaaagattttgctcccagagtatatagaatttgtgtacggacttgcctgggttcatattcagccataatcatttactattaatagccaataaagaagcgggtaagttacaaaacctaaaccttagtttttccatcagtgaaatggggctaaaaatagttatgttgggaaaacttgtgaaagactttgaaatgagcaaaagattactgtttgtcctttcaatggaatgctggatgttatctacaggactccggagtgttgtgaaatttacagtcgtctgcaccttacttagactgactttcactaggctattttactactcagtaagctgtagaaacgtttggtaatgtaaatgagttttatctacagaatgcaaatttgttactttacagatacaactggttaccgccctgtaaagcagataataataaacattacatttcagtgctctatagaatagtaagcagatttgcctcttcttgcctctatgtctactcttcacagtctcacgtgaatgggttgcagtatcttgctggggttcccttcctaattaaaagagttataaaaattttgaccaatgttcattttatatttctaccattgtcatgtttttaccttcttgaaaaattattttttaagagttcctgctccctaggctttttggaaggattggtttaaacatctgtattgacagtcatgatcagttttatatcttgcaggaaggtggtaacacttccggtacttgggggtgtaagaggttgtactgagcctttagaaaagggcggggttcgggggggagtgagctgaaaaactctccctagacaggaaaggtagaagacctcctcatccctttctctttggcagtgagatcttaaggtcaaggtgagtagtaggccaggcgcagtggcttaggtgaaggccacaccagacttgggcctacgtcttggccttccaggtcagcagagtggcctgggacttggatgccttggggtcacggagttaactgcagactcagactaagtggggccccagcagcggtcagccccagaaccaagttccggagccaacacccgaacaggaaggggccttgccccaggccggagaggcccctcgcccacggccgagggggtggggcggcctcgcctcgggccggtgcttttcgcccttccttggccgccagaggctccctctctctccctctcccgggattttgctgccgggctccctctctctgcggccctagagttaatcccatcagccgaggtgaggcacctgttaccccggccttcctcacccccgcggcctctcctccattacaccgcggccgccgaaacggcccggcgtggcgaccgcacgtgggccaaaccccttccccggccggcacccctggccccaggccggcccgagcgtgcgggcgcgtcgctgctcgggccgc

SEQ ID NO: 38724 - DNA, 2300 bp, Homo sapien
atcctaagccaaaagaagaaagctggaggcatcatgctacctgacttcaaactatactacaaggctacagtaaccaaaacagcatggtactggtgccaaaacagacatatagaccaatggaacagaacagagccctcagaaataataccacacatctacaaccatctgatctttgataaacctgacaaaaacaagcaatggggaaaggattccctatttaataaatggaaaactggctagccatatgtagaaagctgaaactggatcccttccttataccttatacaaaaattcattcaagatggattaaagacttaaatgttagacctaaaaccataaaaaccctagaggaaaacctaggcaataccattcagaacataggcatgggcaaggacttcatgtctaatacaccaaaagcaatggcaacaaaagccaaaattgacaaatgggatctaattaaattaaagggcttcttcacagcaaaagaaactaccatcagagtgaacaggcaacctacagaatgggagaaaatttttgcaatctactcatctgacaaagggctaatatccagaatctacaaagaactgaaacaaatttacaagaaaaaaacaaacaaccccatcaaaaagtgggcgaaggatatgaacatacacttctcaaaagtagacatttatgcagccaacagacatatgaaaaaatgctcatcatcactggccatcagagaaatgcaaatcaaaaccacaatgagataccatctcatgccagttagaatggcgatcattaaaaagtcaggaaacaaaaggtgctggagaggatgtggagaaataggaacacttttacactgttggtgggactgtaaactagttcaaccattgtggaagacagtgtggcgattcctcaaggatctagaactagaaataccatttgacccagcaatcccattactgggtatatacccaaaggattataaatcatgctgctataaagacacatgcacacgtatgtttattgtggcactattcacaatagcaaggacttggaaccaacccaaatgtccaacaatgatagagtggattaagaaaatgtggcacatatacaccatggaatactatgcagccataaaaaaggatgagctcatgtcctttgttgggacatggatgaagctggaaaccatcattctcagtaaactgttgcaagaacaaaaaaaacaaacaccgcatgttctcattcataggtgggaattgaacaatgagaacacttggacacaggaaggggaacatcacacaccggggcctgttgtgggtggggggaggggggagggaaagcattaggagatatacccaatataaatgacgagttaatgggtgcagcataccaacatggcacatgtatacatatgtaacaaacctgcacattgtgcacatgtaccctagaacttaaagtttatatatattaaaaaaaaagaatatttcctgatttttcactccattctcattgtctagtcacccactcaagaaacatctaaaatccttctctagattactcatatggcgtctgtgttccttaccttcaggctctcaccttgtcaggtcattggtaatattgctgaaaaattattcttcctaaaattttgaccaaaaaaatcattatttgccaataaaatattttccgacaactcaaatccattctttagtttttatccccttccttttagaaagtatactccagaagctgggactctatttcctactataggaggcagactccaaaatgaccccaatgaccttgctttctgggtgttcatgcccttgtataatcccttcccactgagtgagggctgaatgacagatttccaacaaccagaatacaacaaaagtaatggaatgccacttctcagattagttgaaaaaaaaagactgtgatttgtgcctcttttgtcctcttgctctctctctctcagccctcactattgggaagcaagttgccatcttatgagcagggagaggcccacatcccaaggagctgatgtttctggccaacagccagtgaggacctgaggcctgccaggtcacatgagggagcctggaagtgggtcttctcagtcctgccaacagctgtgagtgagcatggacgcagatcctctcccagtggagcatttggatgaccacggctctggctaacacctcacttacagccttgggagagattctgagtcagaggcatccagctaaattgacccacagacacggtaatgtacaaatatttcttcttttaagttgctaagttttggtggtagtttg

SEQ ID NO: 38725 - DNA, 2300 bp, Homo sapien
ggtagcgcattaattagttatgtaaatgagggcatgctactcaagttctctgagcttcaggagagaaaaaaaatacttgattggtacctcatggggctgttgtaaggaacaaatgagatagagtatgtggcatgatttgtattatagagcatacaatccaaatatgagctagataaggcataaaacgtgcaagtactacatacagtgtttctaattatattacagctttcatctacgtggtgttccacattttatatttaagcaagagcttataagattgactctctcccagttatcacaactaatgaactcttaatgggcagctacaaatatagattttatcggaaggaggaaattaaagtgatcaaggaattattttttctcccctgacatgtaaaaagtaaagagactgctaattagaaaatatttagctgttctttataagtacctgaatggtctgaattttctgagtattcattcttcattcagatataggaaatgaaaagtcaaaaccttctctaaatattgtcattcaatggatgtatctcctgggcaaaaatgtagttaattttgtttgttagagccatatactaagtgctaggtttcatagacaagaggcacaaactgaggtgcttccttgctttggttttgtagtatagcatatttagagcacatctagaataatgctgtaaaaaggaattgcctgagctaataatattataagaaattgtttattctgttaatacaagtacataattttctgcaactcagttatttgcactcaattattaactccttgaacatgacttcagctaatgactgccactctgaagagataaaataggattaatgatcaaactcctttatttctaaggagtgattacatatgcaaatgaaaggagtagtagcatttcaaataagttccaccagagagtacttttccttaaccaatatccaggtatgttaatgggtacctttcctttagaatgttaacttcggggtcctaacttaaaatctaggtagcaaaattaaaggtggtaagagccaggctaaagaggactaattgaattctctctgtggcctttgctgttaatagttcattttctttgtgtcccactttactctctttttcttttagcctttttatttaaagacttaagtatttacccttcgaaaatcagtgtcgtttctggtggggagagaaggtattcacagagatgagtcagaggcacatacaaataacttgtaatacaaagttagatgttaatgaaagaaaaggaaatgtttatcctacctcatccacaatactagtaaactaagtacttacgattttttaactgtttgtttcttcatttgtgtagccagaccttgtttcttttccccagctatcgtcaatttgctgattaggtaaattcctcactggtctttctacaggtttcaaaaaggaacaaggtagattttcagaaactgttttgggttgaaaattatatattaaaatgaaaatgatatagtacctgaagactgctagtaaattttgctacagtaaatttatgatagttaccttctgttgcctgtagttgaactggaaacctgactttgtaggttttttgtccttggtttctaagatctgtcaacttttgatataccctcctctatatctttggtcatctaacttcccaacatgcatacacataaatagtaaatacaaattagtgatttttataattatattgcaggaaggttgtatgcttttcggatgttggatttttatagcgccttcatcatctttagtgttggtttcttcctttgactttgtatatttctcctaagccccactgatttcttggttatttcttggttacaggctgtcatggtggtcacctgatccttacctgatgttactggttaccttgagattttatcagtgtctgtggtctcttcatcagttctctccaaaggtttctctcactgattatctttcaatattcttagacttgaatgaagcagtcccagagacagagcgcctggattcaaaagcactgaaaactcgagcccagctctctgtgaagaacagacgccagagaccctctaggacaagactgtatgatagtgttagttccacagatggggaggacagtctagagagaaaggtgagcacccttgaccgtttcctgatttgtactgttggagtatatcattgttcctacagcttattgaagattatgatttttctgcaaacagagtctatgtcctagttggtaagcagctagaatagttcacgtctttgtctcctgaattct

SEQ ID NO: 38726 - DNA, 2300 bp, Homo sapien
aatcttggaggctgatctcacctccttcacccactccagttgagccttcagataagatggcaattcacactgacagctcagctgctaactcatgagagaccttgagccagaggtatctagctgtgccatgcctgaattcctgacccacagaaatgatgagataataaatgtttgttgtttttaatggtgagactttagtataatttgttatgcagcatacgataactaatacaaaatagagcctataggactgactgatctgtttggtgcaagagggtgtgaggaaaagagatggatgaaagaagatatgtagattttggacttgagcaactggatggtagtgatgccatttattgaagtgtgagtttgggcaggggggattaagagttttcctttggacacattttgaaaagactgttaaacaccccagtgggcatgtcaaccaggtagcctgctgggccctgcccaaattccttatgcactgtttatgagcataagaaaatgattgtttggtttagcagctaaccttgtgaaatatctccaatcttccattctcaccttaacccattctaatatggtttgtgttcttttgactcgtgtagaatttgttcttattaaaccacctattgtatccatgttatctaattcagtagttacttctctgccataagcatactcaactcatagccacattggacacagatcatcattccccctcttttcgaatactcttctcttttggattcattggttctacttcttaggtagattcttctgctccacctggtgttaaccagggtggcttagccagtggtattcagttggtggccaggctgtggtggctgggcttgtctaatagcccacttcattcatttctgcttccttggtgccgatggttaagaggttggcttcagctgaccactttccctctccatatgttcatggcctttcatgtgaatgctccagtggagtggtcaggttttttacatagtagctcaaggcttaagagcaagtgttcagaaggagcagagagagagggcagtagttacaatgtgaggccaaagaagcttccccccagaaagctaaaggtgataagtaaagcatgttggtattggctggcaatattccacaagagatgaaaggacagatattgcagaagagagaaggtataactgggaccaaaagccttgagaaggaaagagacatggagcaaatcattcacagtaacagcagacagcagagaagagagacatggttgtacagaggcacctcctttgggtctttactcaaatgccccattatcagtgagaacttctctgactgctattcttcagcagagggtattccttatcccctttcttgctttatgtgttttctccataacatatgtgcatatccataacacacacatgcatcacctagagcattatatatgccacagtgacatgttttgctgatttctcaattgactccccccattggaatgaacgtaagcttgaggaagacgttttgtcctgttctgtagcatctagaacagcgcctggcacatagtaggtactcaataaatgccagctgcatgaggaaatgaatgagctgtgtgggggatgtacttgagtgaactctaaagtcagagtggtgttgagagaaaaatgcttgaaatccagatgttggaaggtgacacagagtagtagcctggtgagaacagttagatcttaggggttcctactacagccctcccttccgcacctttttggctgtcaccatgatcaagctactgaatctctctgagacgcaaggaccgggatggcacaaagtgagtgctcaccaaagcttgactgtcctttcccatggcaatttacttcagcttgtttgatttcccctccccgactggactaggcacctattctctgtcttctctctttacagttggaaggagcaaaatgggacttttggctgaaagtgctgagctcctgcggtgggggctgaccgcaagccacgccttctgtgcacctggtcggcccagctagctgccgacccggcggggaggggcggggcgggccaatcggcgctgccccagcagggctgcggctgcaggcaggcagagcctcctagcccgtcggtgtctgcgcccatcgatccctttgtctatccccgaccatggcgaagctgattgcgctcaccctcttggggatgggactggcactcttcaggaaccaccagtcttcttaccagtaagttgggttgtggtgagggctgcagccttcgtcctcctcactccctgccagctccacgagccccca

SEQ ID NO: 38727 - DNA, 2300 bp, Homo sapien
ctaaatattgttatgttggcttgtgtcagaaattcattgtctagctgggaaatgttgcttattttaaggtgtttacactgccctgacattcactgagcttctgttgcaatgtagataattattgtacacacacaacatctcagcaaagttttgtttgcttgcactcacttctcttgctgaagggccatctggggaaaccacatccctgtttatgcatcattatagttctgtaggctcctgttagacaggttatgcatataagggtgaagtgactatggcaaaacatcttggctctgccactttgtggtgatgaaattgctgatggatcattcgcctcctgagcttcaatttcctcaactaaatctggattctggcatttgtctgacttacctatcatgtagactgtgagggtaaaatgcaagatgtaagaagaaaacttttggaagtgaccaagttttaaaacaagtctaatattagttgtgataggggtaactttcttggaaattatcccttttttccatgtagacaatactgtgtatctttatgttgtgaatcatccccacatgaagtccactgtggagatatttaaatttgaggaacaacaacgttctctggtatacctgaaaactataaaacatgaacttctcaaaaggtatggaatgaaagtattgtgcggttctatttactttgcacctctgctgtgtgctttgtattttttggttcagcaggctttcttaaacttttgttttgaaattgttttgatttttttctaaagctttctaatgattcccatggtgactcttcccagcgcctcactagaaattgccatgttaggtattgaatatgcctatattttcgagcattttgaaagcattttaatcctataaaggtgctcaattaaattcccagctctaattccattctctttaccacggcaactcaatacctactatcggtctctgtttaaacacctacacccttttttggttgtcctagtaggttgtgttctgtgagcctcacccactgggtgttataaccaacctccagatgagccacttctttgtttaattacagctttaaagtagaattttttaaaagtccttgggcacttataaaaattacatttgttaagcattgactatgtgccaggcactatgccagaatacttaatttaacttaattctcacaaagcctttaataataggcatgggtaaactaagacttagagaaggtttgggttagataacttgcccaagttacacaatttgtaagtggcagaaacagggtataaacccagatccatctgaattcaaagctgagctctcaattgcaatgaacatctttcttactgcattcattaaaataacaggcttttcagtggagaggctgcctgtttaaaggctgtagcaaacaataaagaattcatcttttatcaaatgggcttaacattaaaaaactggctccaaaacagtaaattgtttcatgggatagaagaataggaaaagaaaagaaagttcatcttctttcctttgctctctttctcaacatcatgtattaatttctccccacagaatatgggggaaacgagtgcagagcatagaagtaagagaagttgaagttattgaactctgctcctaatgcaccgtatggggttctgaggccatagcggagaacaggacttccacagggttgctgggaaactgtggacaagtcacttaattggtgcctcaatttcttgagcataatggggattctcatttgcctgacttacctaactagtggattgcgaggatcaactgctttagcataggatctcacaggaagagtctcccagaaagtgcagcctgagggcacacctgatatttggccacttcattagggagtacaatcccaggaagcagacttgagaaaccagtgtgaggcaaggaagggagaaggttatgggttgaattttgtgtccccctgccctccccaccccactccccctgccaaaaaatatgttaaaatcccaaccaccacttcctcagaaggcgacactttggaaattgagtcattgcagatgtaattagtaaagataaaatcatgctgaaatagagtacccttaatgcagtagaactggtgtccttgcaagaagacaggcagatatacagggagaatgctatgtgaagatgaatactgacattggagtgatatatctacaagccaaggaatgcctgggactactggaatgccttgctggaagaggcaaggaaggatccttccctagaaccttcagagataacatggccctaccaataaca

SEQ ID NO: 38728 - DNA, 2300 bp, Homo sapien
atggcttaaatagttggaagcaggctgggagcagaagaaagaaatgccatgttacttctcatgtctattggcatatgtttggtgaactaaacaagttagaatgatgatgggtcatgtgtcagtaggacaatactgatatatatgttttgaaaaagctgctttatcaaaggcctggtgactatgagcagcctgttgagtcctttacaaacatctacatcatcctcataaccaatttgtaaagtggatgctgctatctatgctttgcagattaggaaattgacatacagaagaattaagttgcttgcccaatggtccggaactagggggtgatgggcttagcttatgagccaagatcgtttccttctatgcctttttactctctgttgtgtaacactaactttctgatctactgacaacacattttttattttggaagcttcaggaaagtattgcaacagtggaaaacagaaaatctgagatgcaaacagctgaaatattactagatacaggttaatcaaaacaaggcagtctagatatttaaattaagataatggataagataatactcacaaatcacaactggttgaggagtagaggctttacaaagccctgaaaagctgctgaaggattttaggtagggtatagtaggctgtaacagagctggagaaaaattcttatttgtgttttcaagacccagacttttgaggtttattttattggtagaagaaactcttattttgttttccttctccagcatttttttctgggaagaaaagttgaaaggtgaaatatatctttctctggaaatcatatctcatagatctttttgtattacgttcatctttttatccaaggcttttgagggtcaaggattgttttaaccaggacgttatctggctgcccttgacatctaatcaaagctgcacttgaaatatgaatacttcagtaggactttcactaggcaggattatcgagtaggtggcctctgtatttaatacctacgtatcttctcttccactcctttccattctatagcttcccatgtctccaatatatgcttctactccataataggttccatgtgttttcttagctggctatcagaaacttctctccaagatgtgaagtgacgataataaaattaactgatagtaatgctttgatgtgatcctttatcagagtgcctgtaggggatgactggagaaatgaagaaaagagtaaagaaatgaagttatgccaagtagcagtagggttgacaggctaagaagcagtaggcacctattcataagactgattttagacttagcagtgggattttaatgatagttgtgcataggctaataagtgtgtgggaaagtctcagaggaaggtatcctgggggcttttgctcccacaggtgccattgttgctgagatgcatggggcctgtcgtgcaggcgtagtgtaggtgacagctcctttttcaacttgttctcagtcaaaacttacttattatatgtctctttccatagaaaaaaatgctgaaaactagctcttactgagaaaaaagatctaactaaactttcatattaatattcagtaatctttcatattcatttatactcattagtttattactcaataatttcccaatatgattgtataatgtagcgttttaggctttacgttggaagagaaggaatgcttggcagagaggcctgtaataaaagaccttcacgattatgactttccagattttatcactgagtctatagagcagccttctatgggggataaagctgaatctctcaggatatgccctggaaattgttacttaaagagtaaatctaggatatgagtttattttctaggtatttgcctttttctcctgaaaatggggttctaaaaaaggatttagtatttgaggagtctgactcaagctttactatagagtagcatgcctgtgagattctccaaagttaatatggtttcccaagtaaatggttgaacaagtcaacaatttccaaaagaagtttccaaaagatatttgtagtttggactgtgagacgtattttttaagccttcatatatgcatttttctgattctacccttcttttgcagaaagtggctctgaagatattgatatacttcctagtgggctggcttttatctccagtgtgagtattttccatgctgctctcatgctcacatcaatagctgtatagacagtgcattaatgttgtcctctggagctgccagatggatccctatgctctcatcccacctccgggtaaaccagtcaactaaaaaagccaaaacag

SEQ ID NO: 38729 - DNA, 2300 bp, Homo sapien
tcaatcaattgcccaagaatacgcttctttctttacccccttcttcatgctatgctgcaaacacagtgataaggaacatgagctctagagtcacctgatctgagtccagatggaggcactgacacttagttatgtaaccttaagtgaattattactttacctctctaagcctcaaagcctcactttccttctttttagtcccatcaaacttgcagcaagcaattcactttacttctttgtaggtaaggttaataagaagtaatgtgacaaggcatgcaaacgctgagtgaaataataatatgactattattatttcattattcattccatttattttttattcttctaatttttctttctcccaagtccatattttacatccatccatctaatcatatttattgagtcattattaagcacaaagttctatggatggcacgggaaaacccagtgatcaatgcgatggagtccttcccacaggagcctacaatctcaagcaaagttcagaattaattagtggttaatctttactgacttcataaaacgtatcaagcacagtgcagagcacttgacactcattatcacatttaattttaagctacctatgaggtggacgttcttttacagaagaggaatctgtagctcaataaagctgagtactttatctaggctggatccaaacccaggcagcctgactcccaaaccctgcatgcatgtctacatcacaccccaggcccctcagctctgtgagccctcctgacttcgattcctcctctgcttgcactcttttaacattagtcatcttaacaagaactctaatctatacaattcaagacgttacactgtccttttaatacaacccttcttccatagattttctagaggcagcatggtagaggcagctcagttaagggcccagattttggagtctgctgcttgacagctgcctgacctacagcaagccacataagcaatctgtgctgcaggtctcacctgtaaaattggggtaaggctacccacactccagagattgtgttgataattaaatgcgttaacataggtgtcagcacaggcaaagcacacagtcagtactgcataagcggtgggcttcattattcatcctgtaattacgtattcatactagaatcatgtatcccataggtcagggaccaccttttctttccttaatacccccaggattggcaaatcttgctctctcaacaaatagtttactcggtggaacctaacagaactaatatttctttctgtccgtaaataaaaatagatcatgcttgaatgtgctactttgcccgaactccccaagtcttcccgcatcttcagttcctccccctccaacctggtgttcatcaggagaggggaaagagcatttcttgcctggcaggaactcaagacctagaagaaagagggcctaccctgccaaggaaatgaccttccccttcctcgcctctgctcctcttcccgtttcctgtcttttccttcttttctcctggtgtttccttctcccgttaactatggggacagacgcagctattcacaagtccgtctgggcagcacactccgaggtaaggcacgaaggtcaggagacaggttcccgtgccccaaatcctggagaagatgagttaaagctcttcgcttcgattgccttcgcccttcccgcgtctcgggagcaattcagtgtcgcctcacgtctggccttgcagaagtccggagttccggctctgaactggagctccccgccattcccgggccctccggtttctccctcaggccatctgaggaattgaggtaggatttcgcgggtgttaggagcaaactcccaccacaactcggtcccgggctccctctccgttgagccttgacctctgcccaaaaaacaaggaatcgtgggcgtgaaggcggccttgaacccgggcggcggggctcggcgggactcgtcagcgccctgctgcggcacccgggccgctcaggtaagtaggaggcgtgtgcgggcggggccgagcgggccccaatccgtacgcgaggcaggaaccgcccgccgcgcccccgagagctctcggcgccgcgcagtcgccgctgggcaccccgagaccatggggaagctcgtggcgctggtcctgctgggggtcggcctgtccttagtcggggagatgttcctggcgtttaggtgagtggcatcttgacagggcgtcttcgactctctttctctcctcttccaagtgaggtcaggggctgcctggcgcccccttcctagcgggtaggaaagagcagctttggaacct

SEQ ID NO: 38730 - DNA, 2300 bp, Homo sapien
atcttgatttcaaatggaatttagcattttcttcaattacaaaactagcagacaaacctcagaagcatttgcagtacttgtgactgttactaatggaaataacagttattttcattatttcattatagttgttttcagtatcatgaaagaacatttgcactcctctttatttaaaagaatgttgctagatcttgttatttaatatgttaaataatgttgcacacattacattaccacattactatagcaaaaaattatgttttagatattttaacaattacatttcaattgttgacctttaattttaaagctaaggcaaaattaatgtaagtagagagtttatttgggccaagtttgagtactgcaacccaggagtatagattcaagtttccctaaatatacactctgattagcagcagttacacatagatttttaaggggaaggaagaggcagttcctaaattccttgcgttaaaataacataagctgtggattggttatactttgttctttgtatcataaattccaggaatatgaagataatgggtgggacagctactcgggaacaaaatgtctttaaacaactgtccccaggcatgggtattggggcgtgactgaagtcccatactcatgtcgctctgggcctgataaattttgcatacctcacaaagctcagactgctctcagctattttttttccttacaatgtaattgattttctttgcaatctatacattttattcatttatttaaaatttttttttcttctttctttttttcatgaaccgcacagagaaaatttatgcattttattgtaagcatttataaacattattctaagaagttatccacaggctcaccactgccagaagggtccacgacacaaaaaaggtaatgcctcatgggctttcaaaggacaactttttacttctctttctaccatccagtataatccaatatccttaggactgaagcagagatacacacacacacagggagagaggtgtttgtgctttttttttttttttttttttttggtgagaggcaggtgggaaattggcatccacttttatttactggttctttataaaactgatatttgttgaaaattgtcaagtgtgaccatttctgcctacatattgtagggtggcaattaaataccgaaaaccattagaagcttatttcagatgtactcatttattgtaatggtatcaatcttgatgggtaaatttcattttacttttaaaattgtattttaaattattccttcatgttacggttgttagagtaaaaacggaaaagaaaaaaactacacttcttccctttgagtttggatgaaaaagacgtgtctaagtccttaagtctgtagtctggaagtattaatagaggctgggcatggtggctcattcctgtaattctagcactttgggaggctgaggcaggaggatggcttgagtccaggagtttgagaccaacctgggcaacacagcaagactcggtctccacacacacacacacagacacacacacaacttacacacacttagctaggtgtaacggtacgtgcctgcggtcccagctactcaggaggctgaggctggagggtcccttgagtccgggaggtccagactgcagtgagctatgattgtgccaatgtactccagcctaggcaacacagcgagaccctgttaaaaaaaaaaaaaaaaagtattacgaggcacaggatgtttatttattcgcaactacgtcctgttataaaaagtagtgattccaacgtgaaatatttacacgacgcatcccgttactttccctcccttggccaccgacccccatccccaaaagctgctttctatgtaagtttctcactggaatagcgagtgagaaatgtgtttgaagactagggaaacgagaaaggtatgcgggctgctagagggtttcgggtgggttgtttgaaaaaggaagtgaaggaattcaaagtttcacatcatgagcctaatgtaaggcgtgtccgggccgtcccgaaggtatctggggaaataggtttgtgaggacaaagaccagggccaggcccagggcggagcctccgcggccccgacgcagggactcggcctaggcggaggacggggcggagcgcggccggcaccatcgagccgggaagatggcaccgcccacggagctgctggccaggccggagcgaggcagcgcgcccggctcccgcgccatggggcggctggtggctgtgggcttgctggggatcgcgctggcgctcctgggcgagaggcttctggcactcaggtagg

SEQ ID NO: 38731 - DNA, 2300 bp, Homo sapien
ttcaacaaaagcagtgtgtcacagagagtcagttgggagccaatcccttggttgaggaagtatttccatatatggctctttttgttgttgctatttttcaaaaattatataatttaaaatcttcaaaaattgtaaaatgtttaacattaaaaagtaaaaaaaaaaaaaaaaaattgtcaggcatagtggctcatggctgtaatcccagcgctttggatggctgaggcaggaggttcgcttaaacttaggagtcggagatcagccgggggaacatggcaaaaccctgtctcttcaaaaaaacacacaaaatttagccagatgtgctggttgcatgcctatagtcctaactactccagaggctgaggtgggaggatggcttgagcctgagaggcaaaggttgcagtgagcccagatcacaccactgtgctccagtctggtgacagagtgagatcctgtctcaaaaaaaaataacaaacaaaactaatctatagtattagaagttaagatttattgttatctctttgaggcaggtgttttgattagaagaggacataaagggggcttcaggtaaacttgaactagtctatggtttaacctcaatgttgattacatgagtttgttcactaaaaatttgacaagctgtatacctgtaacttgccaatttcttgcatttatattacacatcaataaaataagtttaaaattatgttgtgatttgcatcatttacatgcttaagtaaattctaagaatcaaatagtatcattgtaagtttttaaaaattcatgtttttaattattctgcagaaagtttgcaccagttttgacttccacaaacgacatataaaaatgcaatttatttgcattctctttagaacttgctattataattttcctaatttttaatgattttatgtaagaaaaattaagtgtatacttttctctccaactttttatttgaaaaatttcaaacttacagaaaagctgaaagaataatgtaatggataccaatatatcccttactagattcaccaagtctttaagtttttgccacacttgctatctctctgtttctatttacacacacatatatatatgtgtgtatatatgtatatatgtgtatatatgtatatatgtgtgtgtatatatgtgtatatatgtatatatgtatatatatgtgtatatatgtatatatatgtatatacacatacacacacatctatttatctgtctgcatttctgagctatttttaaagaagttttagacatcatgacaatttatcccttaatgtatcacttaagagtaagaattttttttacataaccacatttatcattacacttctatattgtcaagtaatatctagtccacatttatagttccacaatactgtcttttctagctgattaaaaaacaggattcaataaagttcattcacatgttgcatttaaatgttttatctcttcagtttcttttttacctaaaagagtccctgccccggaccgtctccccacctcctcccttcccagcttttcatattaaaatttttcaagtctaggtcacttgaaaacctcctgtttgtcttcagatatgtatgacaatggttgattttacaagctcatattgcaaaattattacaggtttttagaagcaaatgtatccacaactgtaacagattttcatttttggatattggcttgtcagagcaagacgctggatctccagccaggcaccagatgtttttattgaggggaaaaaaagagcattaagagcttttaaatcttatattattactttgatcatataagaaataattgtgacatttcatgcctggaaatgtatcacgggggctttcgttcatattgacactatatattactgaatggatcagttaatatataaccagtttaaaggacctgaaaatgtagtgacagccaagaaggatattttgaagtttgaaatgatccctatataaatagaacggatcagcataactttgggataaaattagccgacagtttgtggactctccagcatgcgcctgtttgctcggtgctgttctctcgataaatcacaacaaagcttccagagggagaggaaggatggacggcaccactgcccctgtcactaaatctggagctgccaagttagttaagagaaatttccttgaggcgctaaagtccaatgacttcggaaaattgaaggctattttgatccaaaggcaaatagatgtggacactgtttttgaagtcgaagatgagaatatggttttggcatcttataaacaaggtaaaaacatata

SEQ ID NO: 38732 - DNA, 2300 bp, Homo sapien
gagaagttataaaactataaacagacatttttaccctgaaaaagtagattactttataataaaattttgagttctaggaaaaatttgaaaaaaattggcatgcaattttaattttcaattatagaagagcactttcaataataaaagagtttgatattgcaaaagaaatcctatgcctagaaaccaattcacatgactgctatttagggaaggcctaatctttgtaacttacaaagtgattgacagagtgggctctgggttcaaatcctgcctctgtcacttctagttgtggaatccttggcaagtgtcttaaactctttatgccattgagttattattcccatctgttattaaagagattaaagtatatgcctcagagggatgtttgagtgtaatgaaatgagataatccataaaaaagaaaaaaaaaaccacttaggacagcacttggcacacagccagcagtcagtaagtgtcagttgttgtcatctcattttataaatgaagatactgatgcttagagaaggtaggtaacccaaaacagcaaatttttgggtcacagaagcaggatatgcacaggtagcagacatgcatgagacccttatcttaatccactgactgcacagccttttgttcattgattcaagaaatacatgtattatatacctataagacaattacaatctaaaacatatattcaatctgtagtatttactattgcagtcaagacttacactcttctatgaatgaatgtagtagaaaaaaaataaaaagctttaaaaaaagttgtttctaagtattattgctagaagaaatgaaaatatttgccaaacaaaacagtcaggaaactgaatactgacctgaaatagttaaagaaacattttgcgttaaattttaagtttgaaagtcaaggattaaaagttatagcattttaaatttatattattttccaaatgttctggaggaaagttttaagtttgaacataatgcttactttctcttttcaaattatttgaaaaagctattctattttcagccatttgtatctgactattaattttaaaacttaaagcatacctgtttctttacaggtatatacagagcctgatggatttggtggaattccatgagaaaagcccagatgaccagaaagcattatcagagtaagctctatgcattagaataagtgtttaaaactttggttctttccagatagattcctaagatatttttagacctaaattaaaggaattcagctctgaataataaatcactaccctcttacacatgacaagttttggcttgttggtttttcagaagcgaagaaatatggcattgaaaatgatgctgagtgtgaagaaatgtagaggactcatttttgatcccccagggagacctatttttactataaatttactccaataatgagatgtgtaggaggatttaccattacatagttttaatacatttcagcgtcattggagactaaacattttctttcagagtaactgatagtttctagctacctaaataaggatcttttctaaatctgacaagaaattttgaaagttttttcacaatggcattctagagtcatctctagaatgatgatattagatattaatcattattttataaagagaagacttaatgaatacatctgatgaatgcattggttataaggctaatagttttacatataagctagaaacaaaatgagtctgtttgtgaaattatctcctctactctagtggaagaatctgtagtgagattactaataaaggactaatgttttatcatttgatttgttcagatgggtaatgcaaaaaaaactttagccttctgtgaagtaaccttaggagtataagtgaatgaaacgtatttgaacttttactaaccataaatattgtggcttagctttgtagatacactcatcaaagttcgaaatagacaccataatgtagtccctacaatggcacaaggaatcatagagtataaagatgcctgtacagttgacccagtcaccaatcaaaatcttcaatatttcttggatcgattttacatgaaccgtatttctactcggatgctgatgaaccagcacagtaagttagctcatcatgatcatggtatatagacatgggtgtagaatataagccatactataactagatgtctcactaatcagcgggtcacattctcagtgatagtactaatcattatcctgaattttataacaatttttttttgtttttatttttcaacagttcttatatttagtgactcacagacaggaaacccaag

SEQ ID NO: 38733 - DNA, 2300 bp, Homo sapien
ttgaatattctctaagaacccaggccccatcctcttcattggaagatcataaatattgcatgtcttcacatagctgtttctcaaaggtctgaaaaaaatatttggtcataacaggaagtctcaaattctcgaccatctataggtaatgtatagacaatgggagaaatagtaggagagctaatatggtgcctccaaacaggccacataactgacacagggtttgccaggactgtttcagatccctcataatggtgttgattttagagaagcaaaattgatacctattagacatccaaatggagaaaccaaataggcaattgaataggagaatctggctcttggaagaaagtttgtgctagagatagaattggaaatctgtcctgtgatttaatgcagtctcctagacgaagagggcaaaggatgacagcagagcctaggatcactcatgactttcagagttgcccgttctgcttataaatgcagggcaggctgggcgcaatggctcactcctgtaatcccagcactatgggagaccgaggtgggtggatcacttgaggtcaggagtttgagaccagcctggccaacatggagaaaccccatcttcaccaaaaatagaaaaaattagctgagtgtggtggcgtgtgcctgtgatcccagctactcagaagactgaggcagcagaatcgcttgaacctgggaggccgaggttgcagtgagccgagatggcaccactgcactccagcctgggagacagtgtgactctgtctcaataaataaagtaattaattaattaattaaaataaaataaacgcagggggaggaggccaaaaaggttttttataacaaactatcatttttaacacctcataaattcccattctattacatttgtaaccaactctcttactcccaactttcccaaacacggtggcttcattccctagtccttttagagtgtcgggagaggaaaaggaggttagtatgacagggtaatgtgtctcaaccactgtcattaatttaataaatattgagtagtgaaaaagtaggaatcacaaagctgcatcagacagggtccctaccctgatctctttcaggaaaggggggagtcagagagggataatataaaaacataaatagctatagaatagtaccatgaaagaccaaggccttatttggaagaagtgaggagaagtaatcaaggaagaccttttgcagcagacagcttgtgccagacatttgagggtagaatggaatgtcttaggtaaagatttggagtaaggacatttcgtacagggcagagtgaacaaattctctgatcaccgcaaaaggtaaggcaaactgacaaattgatccctttttaattttgtttttaattaacagaactaaacctaacggaaagaatgtgttgccggagaagaacgaattgatggccttttattaccacaggaaaaagtaaatgtatctgggcagcccctcaagtctcagcaaaaggaacgtacagttcctgccatgtgccggtctcttctgaagaaaagggggcggtgggggtgggggcgcaggtctttaggttgtttattcctttctctctgtccagtggcagagaagcccatacttttgaacgcagcttgttggctactgtaaaagccctgctctgagcaaggaccaatgagcacgcggagtccaaactcttggaaacagtttgtggccaggagtacttgacattgagacagcctccgagttgtaaacaagggcgagcctgggcgggaccccagcccacgcgactcggagccccgtcccaagaggctaatcttaagcccacgttgccccagatacctgtttctgcttcctcttccctgttcttcccaccctttttccgtcacagccgcgggcaccggtgccagggcactccgtggtcaccgtgccaggccattctgtgatgaccgcggctggaggggcggagcccatagttctttctctgatctgattggcgcgacctggagttcaggacgcgtttccaagttccagtgactcctcctgtttgggactcggggggagagtgcggggagacaaataaaacctcgggcggcggcggctggtgggaagacttgaacttgaatctcgaaccactgcatctccgactctgcccagactcttcactccgcggcaccctcaaaccccagcccaggccggggcgcacaagccagccagcgcacctgcagtcctcgcccggacgcgccgcgccccctcggaaccaggctctgctccgagcagccttcgcccctcaagccagccacagtccc

SEQ ID NO: 38734 - DNA, 2300 bp, Homo sapien
tttatgcagaatttttagggaaagggtagtaacttctgggtcatggggtcattgccatggaagggagtggtaactcctgggttttgccacggcagtggtaaattgacatggcacactggtgagcatctcttatggaaagctgcctccgccccatccctgttttagctagtcttcaatttggtccagtgtctaagtcccagctcctacttcgtgggcactcaacaatgccatgttgaggccaggcatggtggctcacacctgtaatcccagcactttgggaggctgaggcaggcagatcacttgaggtcaggagttcgagaccagcctggccaacatggagaaatgccatctctactaaaaatacaaaaattagccgggctaggtggtgtgcacctgtaatcttagctactcaggaagctgaggaaggagaatcgcttgaacccaggagatggaggtttcagtgagccgagattgtgccactgcattccagcctgggcatcagagggagactctgtctcaaaaaacaaacaaacaaacaaacaaaacaacaacaacaacaaaagcaatgccatgttggaaagaccaaaatacaaagtagttaaagtacaagctgcagatgaatgggaattcaaatctcagctagatcactcagtggttatggaacttgggcaagggagttaacttctttgactcaagttccttttctggaggcatggcattcgttatatgtactacataatgttatagaaaagttaaagaaaaatgtatgtagaattgacatgtattaaatattcagtcacggtagtggcaaatatttatttcctagatttttccttctggaataccttgaataccttctacctagacatttaacctcttcatttctagccatagttacaatcgcagtagattagccagggaggccaaagttttagaataaggatggccatttacagatgagtatgtattcatactgtattcatactagaatctgtatttattttgaaattactgtagtacttgtgaattaataagttcataaatatttactgagtacccattatatatcagaatgctgttctagatactaagaatacagcagtgaacaagatagcgtccctgccctccactaatttacattctaatgtgtaaaaatacaccacagatgtgcaagaaatatgatgaaaagctcatctataaaatgataccaaaccccctaacatcccaaactcaattttttggccttataacttagctgttgtggcaagcttgttttttgcagagtccaataatagttacccagatttttttttgtttccccgagacggagtttcgctcttgttgcccaggctttgagtgcagtggcgggatctcggttcaccacaacctccgcctcccgggttcaaccattctcctgccttagcctcccgagtagctgggattactggcatgcaccaccacgcccggctaattttgtatttttagtagagacggggttttttcatgttggtcaggctggtcccccaactctcgacctcaggtgatccgccctcctcggcctcccaaagtgcttggattacaggcgtgagccaccgcgtctggccagttacccagatttttaaaagctgggactttaagaagcaatgtgaagacaagctacacacacaccacaccacacacacacacacacacacacacacacacacagacacacacacttaattcttttttcttctagaaaaattgggatcaatcagacctataagtcattgtgtacaacaggtagatctgagctttatttctatttaaatgaccttaagaagtgtagttgcctgggagtgaaagttgttcaatggtggcatttcagcaggagctcccagaatattgaagctcttctctttgcagcaactgaggtctaagtcctaccgacgttagagggatagacgaattgacctttccaggtcctctgctcgccaccagcctacggagcggcgccaccccctcctggcgagaccgggcgcggaagacgcggagcggaggccctccctcaggaggggcgcgggcgtggagggcgtgggcagggggcggggcgagccccgcagactgagtgctccggggagctgtcagtgtcaggctctgggagagaggaagtgatcgctcccggaggagcgcgagccgagcggccggcgcagcgtgagacagcacatcctgcccgcgccggccccgccaccttcgggagccgcctgcaccaacgctgccgccgcccaggagccgccgccggctcggggagcccagttccg

SEQ ID NO: 38735 - DNA, 2300 bp, Homo sapien
atatcacattttcacttgtaagttggagctgaaccttgggtacacatgagcacaaagacaccaacaggaggaagggaaagaggaaaggaggaaagggctgaaaagcttcctttcaggtactctgctcagtacctagctgacaggattaatagaagcccaagcctcagcatcatgcaatatatccttgtaacaaacctgtatgtgtaccccctgaatctaaaattaaaatgaaaggagaatattttacttttcttaagtaaaattgtgttttaacacaaatagaatcttttcaaacacaatatatcttaaagctctttcctcattttatttaataactatggaaatttttttgtttaactgtttgctgttgatgaatatgtttctagtttgaagatatatcaagcaatgccatggtgatcatccctatgtatattttgacatacttttgtgattgcttagaaaagataaattcctagcattgaagttgttaggtcaaaggacatgtgcactttttagtgttaatagattttatccagtttttttcagtttatcccttttttcttggtaacatataagtactcataagattaattcttcagtttatcatcttttaaaaacttgtatttttacgtgctcacagccggacctgaaggaagcagttgtttagtctactttgagaacacattgccattctagttttctgatacccagggacatgctgtggttttacaaccagcctagtggtagttctcacccatccatttctacttttatccttcatctgagcatctgtgaaagcctcttcagggctttctttattttgtctcttgactctcctaaatccactgttgccacagcagccaaagtgatccatttaaaatgtaaatcatattaattcactcactcaacacactcattgagagcttactgtgtgccaggcactgttccagcctttaggagatggctgtttaaagccaagtccctgctcacagtatattgggtaggacagggcagctatcaagagaacaaagatatggccgagcatggtgccttacgtctgtaatctcagtatttcaggaggccagggcaatctcttaatgccaggaattcaagactagcctaggcagcatagcaagacaccatccctccaaaaataaataaatataagttagcggggcatggtggtacacatctgtagtcccagctacttgggaggctgaggcaggagaatcacttgaacccaggagttcgaggctgcggtgagctatatgattgcaccaccacactctagccctagcaacagagtgagatgctgtgtctaaaaaaaaaaaaaaaaaagaaagaaaaaagaaaggaatgcgcaaaattaatatgacatcagctggtgctaccgtgaagaaaaagaagctgattttaaaaatgagcaaaggactagaatagatatttctccaaagaggacataccaatggccaacacgtatgtatgtgaaaaaaggatgtaaaaaattttcaacatcactaatcatcagggaaatgcaaatcataactacaatgagatagcacttcatacctgttaggatagctattagcaaaaaaaaaaaaaaacaaaagataagcaatggtgaggttgtggagaaattgaaatctttggtggtaggccaggcgcggtgcctgacgcctgtaatcccagcactgtgggagaccgatgcgggcagatcacgaggtcaggagatcaagaccatcctggctaacatggtgaaaccccatctctactaaaagtacaaaaaattagccgggtatggtggacgtgcctatagttccagctacttgggagactgaggcaggagaatcacttgaacccgggaggtggaggttgcagtgagctgagattgtgccactgcactccagcctgggtgacagagggagactccgtctcaaaaaaaaaaaaaaaaaaaaaaaaaggagatccttggtggtagaaatgtaaagtggtacagtctctgtggaaaacagtatggagttttctcaaaaagttaaaatagaactactatatgatccagcaatcccccttctgggtgtacatccaaaagaatggaaatcaggccgggcgcggtggctcacgcctgtaatcccagcactttgggaggccgaggcgggcggatcacgaggtcaggagatcgagaccatcccggctaaaacggtgaaaccccgtctctactaaaactacaaaaaattagccgggcgtagtggcgggcgcctgtagtcccagctacttgggaggctgaggcaggagaatggcgt

SEQ ID NO: 38736 - DNA, 2300 bp, Homo sapien
tgagcccaacacacttcccttcagagctcgacagggtgagtggccttccgacctcatgccacctcatctttgccagcttctttgtgaggttgctgaatgccgtcttcagcacttgtgaacagttttgaacagcacttgactgcaatttggcaatgtgttttaatttattccatccactgctatttgctgaatatctcttttttacctgtgagctctgcatacaataatagttggttacatacaaattattttcatgtctctatttaacattgagttagtaagaaagtaaatggaaaatatgttgaaccttagattcctttacaagtctttattttctaatttattcaaatgtcaaacactgtcatcacttgtgtattcgtcttaatgaaacataaatcactagacatttattactatatatcttgtttgtagttacaattgtgtttgtgtccagataatcaaaataatgtatttgggtttaagtaaaagtctattctataactttatattaatctatttttgacacgtgtaagcacgcattttagaatgtcagtgtgcaattagatattcttagcacatgtcatttgtgaaaagcactttaaatctaagtacattcaattgagcataattaaaatatcaagatacatattcttcatatacattttgcctcttaattttttaagtagctataagtatctaccatgtgaattcaaattaaaggagggtgattaaattacagttatatttattgcttttagtttaaaatatagttgaaattgcgctatattaaaaaatatactgccatgttttctgtggacagcagactgatgatgggtttaatttgttttaatgcaagactattaatagtctctgaatattctcaagactgttgactagaatgattgggggttgggaggcgtaagaaggcttgtatttttatctaatgagttcttttgacttgactcctgaagtctcaagaaaatgttcaggaatactacctcatttaataaagaagcattggagaaagccttgttttgttgatacaaatgaaaggaaatggatcatggggaaatatgaactggagctcctgaacccttatcctttagataatgtatttaggctactgatatttcctatcattgtgaaaatgagcagacagccttggtgagtcagttttaaggcacatgtaactgttaaacctacttgtccacaactgttggacctaaagtatattatgattttagtgaaggccattgttcttggagtacttagagaaaatggggctgtacgttagaactctggattgtgttgcctttctaaaatatttgatttcttaaaattctgtttgtttgtttgtttgtttgtttgttttccaagatagaggcttgttctgtcgcccaggctggagtgcagtggtgtaatcttggctcactgtaacctccgcctcctgggttcaagcaattctgcctcagcctcccaagtggccaagactacaggcacgcaccaccatgcccagataatttttgtatttttagtagagagaggattttgccgtgtcagccaggctggtctccatttcctgacctcaagtgatccacttgcctcagcctcccaaagtgctgggattacaggtgtgagccacggcacccagcccttaaaaatctgtttttaaaaaataaatagctatatcacttccctgtgccaaaccagaagtgtcaacaatgaagtcattatgtaacatggcaagagggattcgggtggcaaaaccgtaaggaggagaagaagaaatcaagcttatagaagcatgtagacactgagtgaaagacgcagtgataggaaccacagtttggtttttttgcagactagcccatttcagagaaggcggtattagaagaaaaaacctataattttactgtgagccgtgaggaccatttcacatgaaaaaaaaacagagcatttggaaataatgatgcttcgtatcagtagaatgctgtgcgtttgagaagcttggcgcttggacttcatgctgacatggttgtagtcacagtcctattgccctttctggttgctctcagcactcctggatgcaaaggtgaatttatgaagatcatggacttccgatacaaattacagcagccaaaactgtcatatggagatgtgaacttaagattgtattggtagataggtgaagcacccattgctcctatcttgaaatgactatgctatatttagacaaaacctacatcagtataattattttgcaagcccatttgaagaaaattaaaactgtcactagttat

SEQ ID NO: 38737 - DNA, 2300 bp, Homo sapien
cttatttttgacaattatcctatgattattacgttaaaactttatttcactggaatgcttggcagaaaggaatttttaagttaactgaggataaaccagaaaaccattttttcttgcatattatttctctaaaattttattctagtataaaattttatttacagtgtgaattttttttcttttggtcacatctttatcatttgagcattattttcattagataatttattcatctagattagaaggttatgggagcctttattaaaactttattgggcctgcttcctacagagatacagacacttacacctggaaaggagtcacagattatctcggttaatatgttttgcactgaagaaagtcatgttttaagatattaagggacttacagccattagaacaatacttggcacatggtgagtgcccaagaaattttagctgctgttagtagaatttgaatccaagtcatttgaatttcagtttggtgatttcttctcagaaatcttctacttaattccttttattgacccctggtcagactcactgagaatcttttttgtttgtttgtttttcctttaaatcctaattctggattcacttcattttccttatatcttatctcttttttccctaaaagtaaagaagacagaataaattcagtacttgtactttaaaacttttattgtcctcatcagggccagtctgaggatttctgccatgttttataaaatttatgcccagcataatcctgattttttactgccttctctgtgcaaatacacacctaaccttatgctaatggtggcactactgtttcttcatgacaaggctttaaaaatttctggaaactttaaaaacgtggaataaaaactgtgggtataatgggggtgggagcaggaaatttgaggggaaaccatagacacattatgccaaaggttttggcacttttcagaggactaaataactttcttcttctttttttgttttaaatagaagcaaaagagaaaaaaaggtatcaagcacagtttgctcatagaaatgagcaggtttggtagatatatttaaagatgtgaaagccaggaaaaattattaatatgctaataatttgtatttcctccattctccaaacacatacttttatcaagaggaggaggctaaaaataaaaatagaagctttagaaaagtaaggtttttcatgtttttttcttgtttgtttgttttttctctgtcagtcctcttacagtttttctgtagaggctaaaaagagatcctaagccaggaccagcacattcagtggcccatcttaaatgggattatttgaacaatttgagaactcttgggtcaagccaaaagagtgcagtagaaaatcaaagacttgggctgctgctggcttttctcctcattttctttgtcttcacgtgcagctcgataaagtgttggactttttcaaacacagaaacagccttaggggtgttaaatatgtgtgtcaaattttttcctaatggatttctaaatcttccaaaaacttttaaataacttgttaaaggctatatgtaacgcttgtatcgtgtgtgtgtgtgtgtgtgtgtgtgtgtgtgtatgtgttttcctgccactaagattgaattctgtcctctgtacctagaaaataatcattatttcttgaaacaaaaacaaatgagatgataatagttttagctttctacttgggtttcctacagcctttaggttgtgtgtgtgtgagagacttcttgattttccccccctttattttatttggtgggattcttgaccttgatttcttaactgattccttgagggttcttttatttctgccatagtttgtaatctgtatgtctatttaaaattgaattactttttttaataagaaaaagcgatatccattcaataacagattttatcagaaagaacttcatttactttgttttaatcaacctgtcttttctcttttcagaggatgttaagcaagtttttggacagaccacaattcatcaacatattccatttaactgggattcagaatttgtgcaactacattttggaaaagaaagaaaaagacacctgacatatgcggaatttactcagtttttattggtgggtctagctcttaaaaagttaaaagggtatggccgggcacggtggctcacacctataatcctagcactttgggaggccgaggtgggcggatgacgaggtcaggagatcgagaccatcctggccaacatggtgaaaccccgtctctactaaaaatacaaaaaattagccaggcgtggtggccg

SEQ ID NO: 38738 - DNA, 2300 bp, Homo sapien
caggagaagaagtctattctgcccagactccagtcagctatgttggttccaaccagcctcagtctgtcagccaattttgtggcaaacagagagaactgtaacaaatggttttcttctctgctgtcctgcaagacaagcttaataaatttttgttagttaccaaattctttaatcctgtggggcatggtttcaccatcttcccacagcagttggaattctacccaggttaaatggaagccaggagacctggttttcaggccaaaatgtcagaagccagttgttttgcctaacccaggtcattaactttttccagtttccgtttcctcacaagtaaaatgaggaggttgaagtagataatccctaagatcttctcagctttaaaatttgttcttcaaataccatgccgccatgaagcagtccccaactcttccaggcagaataattcaccccttttatgccccttagtgctttactttttcttttacagttaactcttaatttctagtggttatgtgtgctcatgactatctccccttcctccaaacagctggtggtaagctcctggagttcagccaggaatgcttgactcatatttgccccccttcttgcctcctacgcagagtctcggtgagagagaccttagtagaggataaaatgtccttgggaagtactcccctgtaacacatgctcttcctgagtgttcccaggcattgagaagcatgtgttttggatggttaatgatacagagatgctatattgaacacactgcgtttttcctttctttgtagcattattgtaattgggtgacattctgggaaacagctaagttcactttgtaacagtttttataaaaatgtgttctctctataggatgtttagaagtaactaagttttctgtaaaatatatgaaaaccattcctattttcttcctccttccatatcctccggaaacttggagtatctcaatgtatcattaaagtatttggatacttaaaatagcagttgttaaaaaataaaatctaggaaagcttttatggacccatttcctctttggaagtcaaaacgtccttggcctctcatgttcttcctaaagcttagatttgacccacattttgaccttcggaaagttaaagtcactcctttttcctagagaagaatgaccaggcccttttctttcttcaaggccacctctggtcctatatttctaatcttattttacattgttcttttatgcactccactgtccagacaaaatctgtcactcatcagtttccctgtacactccttagctttcttgcattagccttctgcctgaagtgccctctagtctacacccattaccgcatatccaagttgtactcattttttaaggcctagctcaaatgccatttctgccacaaagacttttattaccatactagttcttgtgttatgatttgtccttcctctatacactagtctgtttctagaccagtgctgtctgcctcactagactagaagtcccttggggtcatgtttcatgtatcatttatctgtattccccttgtactagccctaggtcaattcacaggtggtcagtaaataccagtagtgaatcaatatctgtgaaccgttttttgcatggtgtataaggatactaatgcataacaaagttgctctattttgctgttaggcagtcacatcttagtctaaagtatctgcacttttattatagaacccaaaaacatgcctgaaggaagactgaaacatatatgatgctggataaaacagttatatttgaaattataatgtatttagtgtgtaacttcatggtcaatgctgtcatgtcttttagattctgtgcattattatttcagtccactatatgtaaaagtaaatgctaaatgtttataaatgttttcagtttgaattttatgttttggcagtgatatcttattttttccctcagtgtatgtttgtatatgcttctgttttccacaagctactgacttttgctttatgtttgttttatgttgcagattaatatcttttcaagaatttgttgcctttgaatctgtcctgtgtgcccctgatgctttgtttatggtagcctttcagctgtttgacaaagctggcaaaggagaagtaacttttggtaagaagcatgcttctgtgcacgtctgtgtaagtgtggacttgtgtgagcattttcttttttttttttctaggaacaaaataaagtgtatggaaattctttatagaagatagtatatcccttttagtaaagatacttcaatgttttggagctccagttcaaacat

SEQ ID NO: 38739 - DNA, 2300 bp, Homo sapien
tccctttttccgtcccaaccccactaattttaccttctatgtattcctctagtcctagcccatccccagcctgtctcgtctggacatcctggtagttcagttggaacccatcctccatactgcaagcagtgttttagtccattttgtgttgctgtaagggaattcctgagactagaagaacaggacggaaatgtatttctcacagttctagacgctaggaagtccaagatcaaagtgctggcaggttacggcctggtttctctgcttccaagatggctctttgaatgctgtgtccttcaaaggtgaggaatgctatgttcttatatggcaaaagagcagaagagcaagagagagtgaacccactccccaaacctctttttatggcagcattaatccatttatgagggcagagcccttgtgatgaaaatacctccccaaggacccaaccttccaacactgatgcattagagattgtatccaacacatcaattttggggggcacattcagaccatagagagatctttctatatcgaaaacctagtcatgctgcttcctgacttaaaacccttcagttaaggtgcatacccttcagcaaggcgcctaagacccaccatgacacagcccctacctgctgggccagactccttccactagtcgtgccactgccccaatcccatagctcaagatcaagttaccttttgatatggtttgaccgtgtcactacccaaatctcatcttaaattgtagttcccataatccccacatgtcatgggaaggacccggtgagagacaacggaatcatgggggcggttactcccatgctgttcttgtgatagtgagttcttatgagatctgatggttttacaaggggctttcccccctttgcttggcactcattctctctcctgcaaccctgtaaagaggtgccttccaccacaactgtaagtttcctgaggtctcccaaaccatgcgaaactgagtcaattaaatcttttggtttataaattacccagtctcaggtatttcttcatagtggcatgagaattctcagtattcttattgagccctgggaacagtctgctgccttaacaggttatactgaagtaaacatttatgtgtctctttcccaatagccctgaagctgtttaacggttggaaccagttcttaagtcatttcggggtttccagcaccaagcacagtgcctagcacatagtaggaaggcactcaatcaacgttaatgaattaaactgattagtaataagtgctttttgctgccatattacatccacaacctacaatacattaaaagtccttttccctgatcaccactgtcttataaattttgattacaaggacagaagaatgaaatcctgatgaagaggagtaaggcctggaggtcatataagcaaattttcattaaaatgcttgtttatttattttagtagggcctatttgggggaagtcttttgacccgggccttttgacttctaccgttttaacaggtagggctgaaatggagtagtttcatgaatatacgttctgcactacattcacttgttgggttcttaagagttcaccgattttgatctaaaagtaggcgtgccagcaatatttgcaatctcgccttctaagtcaatgcttttggatcaaagtctttttggatccagtgtaaagtggagctccttcaaagggaacgcacaggggaaaaaatatccagcaaagtatgtgtcctagtggagttctcaacttccccaggccgtgcaccatctgtcgttacttgcccctcccatcggtccgagggcccagtagcccctggtatcagcagaagccagcagcttccctggtggggccacctgccctcaggtgacgggcttgcacacggccaagttacctctgcccacgccgcagaggccgccgctgctggacagcgcagcggggtcacgtgtccctgtccagccactgccccaggatctgagccctccccggctgcagggcagaggccgctggatcacgcgcaccccggcggccaaggctgggcccagccaatgggcgggcagcatccacatgacccgcgccggcgggagggcgtggggaggcaggccaggaacgcacgctgcctggccgtatcgccgcccccaccgccgccgccgccgggactagaagtgagccgcccgggtcccaaacgccagccagccagtcagtgggtcccgcagtcgcccgcaaccggggcgaatcatggcggccgccaaggtaaccgcgggcccgaggccggggggagcgcgcctgccggatcagcct

SEQ ID NO: 38740 - DNA, 2300 bp, Homo sapien
tataatccacccagtatatggtattttgttatagcagccaaaacagactaaaatagcaacaaaataggaaatgcaagaaaatagctctttgagtaagtgttatagctaataaataaagaagagatgatagaattataatagtactattttgcaacctttcatgaactaatggattaacaatagctgctaacatctcacaattagagataactccttataaggccaggcacagtggctcacacctgtagtcccaaaactctgggaggctgaggtgggtggatcacctgaggtcaggaattcaagattagcctggccaacatggtgaaaccctgtctctaataaaaatacaaaaaaattagctgggcgtggtggtgtgcatctgtaatcccagctacttgggaggctgaggcagaagaatctcttcaacctgggaggcgaggttgcagtgagctgagatggcaccactgcactccagcctgggggacagagtgagactctgtctcaaaataaataaataaataaatagatagataactcctgatagaaatacaaaccaccactttgatgaaatagcctcaacaaacaaatcaaacttaaatccaagaaagctagatccagctaataatttatgggaaatacagtcagaagaaaagcatatgcaagaaatatactaagctacaccatggggatgcaaccagcaaaaccccaactcaaggagattctataggaaaaacaaccttgtgtcttcaacaagtaaattacaagcagaaagaaaggagagagaattcatagattaaaagtgacttcagaaacataccaagaaatcataacatggaaattttacttgaattctgatataatcaaatgaaccattaaaacactttaataacatttataagatcattggaaatatgaacactgtatgatgatatgaggaattgctcgatgtttttaggtttgaaaatggtactgtagcttttcttataatttgcatgatttcttatgtaaataaggtatttataaatgaattagtatataggttttgattcaagataataaggaaagaacgtatgtcatacttcagtaactaactgatgaaataatatgaggagaggtatagatgtaaatgaaatcaaattggccataagctggtaattgttgaatcagttcatgagctcatggggatttgttatactattttatatgtttgaaattttccatattaaaaagtttttgaaaaaacctaactggggaaaaataaagtggggaagaggaatttagacaccaagctttgcttaggagtctctgcttgtagtttttctaagacaagagttccagattctgtaagaaaaggggtcactttaggaaaggatatgatgtgaaaaccataaaaataaattccagaaactgtacttgttcaaacaacatacctgtgaggtttggaccccacggggtgctgagatggacttcagaaagtcttcaaattccctgaagttgtactcaagatattctccatatgcgcatatttctaaaaagaaagtgcaaagcttcatcagacccttaaagggaaccctttcctcctgaacttttaagaactactacctgcagcagggaaatgaaaacagaaaggatttatacccatgggttccatggccaacccaataggaagtgagcagctgtgagcactgcaggatctctgtgaactggatacttgggcagtaccacagtatctgggttgtatctgtggtcagtcatcccttactcttctagctgaagaaaaggtcatggtgaaccctgaccccatgcactttaccaacaactaatgtcagagctcatgcagctgtaacggcagcaatcctcagtttagggaattttcaagtcagcactttctgttcagaatatctattggccctggaattttctaatgcttcataaaggccctgtcattaagggtccttctgatgctgaaaataaatgaggctaaggtgtaggaaaccctgtgttatttcagcacaccagatatctaagagaagatgaaatataaacttccagggacattgattagcttctctcaatgatttattcgtctcagtgacttacgcaattcacgatatgcagtctccgagatgaaaacaaaagtggtgagttttcctagactaatcctttttctcctacaaaaggtaatcagggctttttgcctgctgagaaaaaagttgtagtggtgacttgggcaaccagcaagaagaggctttcagaatagcaagcaggtttttactttcaagtctgtgctattatattca

SEQ ID NO: 38741 - DNA, 2300 bp, Homo sapien
tagatgagaagtggtttttaaaatgttttgtttgttttgcttatgacagtgatatgtgtaagtttcctttaggcaatatgctgaaacattaacccagcagaattaatttgaaaagatagaaagactagagtcagggaggttaattagcagattgtcgaaataactcaggtgaggactaagggcgaaataaattattattagaaatgaagtgaagagaatgatgccacaacagtaagggaggtagaagtgatgaagcattagcaactagtttgatatggggtgttgagaataagaagaaatctggggttgtgattttgcccatgcgtgtcttaagaatatgcatggtgaagttgagattggatacccttgactcagtaatttgaagggtagatcagaatgagggtaccaagatgagatgaatctagggcataagggcttggaaaagatgagagtaatggtttttgtaaattttatggaattaaaattaaagccacaaatctaccaggttcaggaagcgaaagaaaaaacaaatacatttttaaaaatttatgctggagaggatgtggagaagtaggaacgcttttacactgttggtgggagtgtaaattagttcaaccattgtggaagacaatgtggtgattccgcaaggatctagaactagaaataaccatttgacccagcaatcccattactgggttatacccaaaggattataaatcattctactataaagacgcatgcacatgaatgtttattgaagcactattcacaatagcaaagacttggaaccgatcccaatggccatcagtgacggactggttaaagaaaaggtggcacgtatacgctgtgcaatactatacagccataaaaaaggatgggttcttgtcctttttagggacatggatgaagctggaaaccatcattgtcaacaaactaacacaagaacagaaaacctaacaccgcatgttctcactcataagtggaagttgaacaatgagaacacatagtagacacaggaaggggaacatcacacacctgggcctgtcggggtgggaagcaaggggagggatggcattaggagaaatacttaattcgtgtgggacttaaaacctaggtgatgggttgatgggtgcagcaaaccactgtggcacatgtattcctatgtaacggacctgtacattctgcacatctatcccagaacttaaagtaaaaaaaatcccaaatcaacaaagagaaccaacaaagtggaaccattctgccagacttatattttttttaattgttgatgaaaataattgggtttggatttcctttttaaaaaatgtaagaatagttatgaatgattatgaagttattttgatcctttgtttcagactctgccacaactgaaagctcaccaacagcctgccaataaaaacattgtttatgacttgctttttgtttgaagttctccactaacagttttggtccttgttagagaaaatatagtagcaaagtggtgccgtgctacgtattgatttcttagtcactgactagacattagatctgcagggtatacgggtgtttgcattatgataacctacagaagtgaaattttcaaaaaaaataatttgtttcatacaccctcagcaggaacacttgtaaatttatctcagaatcactggatatggtgtggcttcattatcatactcatgagtatagtgatgctgtttgtaagtattgctcttctcttttacacacacctaagatggtgaatgttcaatttagtatttttcttttcatgtaatgttctgtatatacttgcatgttttgtatttgaagaaacttggttggagattaggttgtttatgttcagaatacctttatttttatggaataagaattcgatactcttgaaaattggtgtagaatagaacatttgcaaccctatttagtatgagtgggatttcctttttacttttctcaaaaatgctatatttcatgcctttcagaaatttggaaatgtatgttgcagagtaggggaaagtaagtattaaaagaattttctaagttgaaagaagattctttttgtacttaaatgtcaaggtgatacttaggtgaagtatgtcttagatcttggatagctcagattttttaaatttaaagctagtcacagatgtaattctcaactagccaaagtgaagaaagcccaatttgggacaacgtctaaaataagaattgctagaaacttatgtattaggcatctgttactggttatttccaattctgactttttaaaatgtagggtttttttttttttt

SEQ ID NO: 38742 - DNA, 2300 bp, Homo sapien
gaggacagaagcaaaccatataaatagggctgttgagaggaggattaaataagaaaatacacaaaatgggtttagcccagtgcccgatacaaagtaaacactaaatatacattattagagggactgacttcctcaaaaagtattaaaaagatatcatcaaggaaacaaaacacacacttagagactttaagcgttgacaaggagaatatgaaatatttaaaaatataagttccttagttaataatagctaacatgtattgatcacttattatgtgccaggcattgaactatgcacattatatacataatctcctttaatcttaactgtgactgcgaataaccaaaatgtattacagagaaattaagtaatttgtctaaactcccctttagaaggaactgagcctagatttataatacaaactggtctgcaaatatgtattcttaatatcattttccaaaattattccccgtgccacgacccttgaaatgcaaagttgctcattgtgccatgtgccatgacatttatggccgtaccaccctgaacatgccccatctcatctgaaataagaagttatttaagtttcagcattctggatttcacaaaccagtacaatggaagaaagggcaggggtggtggaacttgacgtaagattgttgatttttaaatcaacaatctctctttaaattgaatatagttttagggggaaaaaatcaccatattgctgttgatttttttcttttgctaaggattgatacaaacttcatcatatatcaaatgaaataaataataggtccaggaactaaaatttgggttttctgattccttggcaaaatctttttttttttaccttctttaaaaaattattttaattgacaaataaaaattgcctatatttgggagcacatgttttaaaatacaaatacattgtataatgactaaatcacactaaataagatatgcattacctgacataatttttttggtagtgagataccattattttcagtaatctatataaatcaaatagtataagagatacattttttaaaaatttcatctaattgtagttcttggccaagtttgttctacatttagttattcaattttctgtattcccaaacactctgttcatttctcactaatattaagatgcagattcaagtggattactgtgtttcattgtgatttatctgtttacatgtctctgagcagcatataagctccttgaagaaagggaccttgtctatacatgtttgatgcacagctcctggtaagcggtatgaccttacattgttgaataaaggaatggcatttatagatataatctggaacatgtatcaacatttacaataatactcaatttgtgtacgtatattccataatattcatccatatacatccatatattatatatagagttccatgaagttcactactgtattcaaaatgatattcaaatgctattcaaacaattctaaatgatatattttgaacaccataaaatgttacacaaatccataaatagcattactgtataataacctgtaaaccagagttactacacacacatacacaccacacaaattctatttaaaaagctattttaccacaaagtaattctaagaccttataaacactgcctaatggaaaagtctggagattggagccaggcaaaaaaatctgcatttcggttgtctagaactacctgagtgacttcggctgcttcctaccgaacctgaattttctgtgatgtggagacatttaataccacctttagggaactggcttaaggactggaggtaataacgtatgtgaagggctgatgaatgtttgcagtcacactgtagtctctctagagttccttcctcggttgcaaactaagggtttttttgtttgtttgttttacacattatgagtctcttatagtcaggaaaactacacggatctcaactttggcaatacagagagtccgaataacaaggtagagaccaaaaaaaaaaaaaaaaaaaaatcacctctacaactcggaaaaagcgctaaccccgcaggaagcgctgggccgacctccagtatcccagcattcctcgcgctgctcccgtattctttccccaagtctctatggtagcgtcagcgtcggaggcggtagtgacggtggcgtttccttgaggaagagtgagggttccaacttttctgcttatctgggaggtgttgggcgcggacagtcgagatgtcagagaaaaagcagccggtagacttaggtctgttagaggaagacgacgagtttgaagagttccctgcc

SEQ ID NO: 38743 - DNA, 2300 bp, Homo sapien
gcctcctaactaactcactgcccttacccaatttactctccacactgggctgagtgatctttatgcaacacaaatatgatcatgtttctcagagacttaacagcttttaacctaaaggtgaagcccaaattccttagcatggcatttaaagcagattcctgcttctctctctgcatcagcactcttcccacacctctgtgctcttgtcctctgagcatgcacacagttccagtttaaggctctgcagagtaaccaggtcttccatgacaccctcctcatcctctcttcttcctcacttggctagtgacaaattaaccttttcctcacttcctccctgtttcactttcttcattccataaatatttattgaggatcttctatgtgtcaatcactgaagatacattaatgaacgggtgagagctctgcccttataaaccttatatttgtgtgtatgttgggggaacagaaagcaaatgtaatgtataatgctttcgtctgaatgtgtcctccaaacttaattgataatgtgatagcattatgaggtgaggtctttaagagttgattaagttatgaggacaaagccctcatggaatggggattagtattatcataaaagagatttgacaaagctgtttgcccttttttcaacattccatttcttccaccatgtgaggacacaacattcctccccactctggtaccatcttggaagcaaacactgggtccttactagacattgaataccagcatcttgatcttgactttccagcctccagaactgtgagaaataaatctctggtgtttataaattacccagtctcaggtattttgttacagcagcacaaatagactaagacacataagtaatagagcatgttagaagatgacaatcaccatgaagaaaaataaactgtaagtaggagtggggaatacagaaagagatgcagttttaaatagcggtcagagtaggttccacagaaaagatgaagttaaagcaaagagttcaatgaggtgggtgaggaaaccattgtcttatctgaaggaaggatgtccaggaagagggaacagccagtgcaaaggcctagcatgtccacaaagcagcaagccagtttagtgcagctggagcacagtaagtaaggaaaactcacagaagaagagaccagagaggttcctgggggacctcactactgtcaggccttggtgaaaacttcagttttaatgctgtaagaggaccactggaggcttttgaacaggagagtaacattattcggctcatgttttcaaaggatcactgttgagaatcgactgtgtagtagaaagagaggaagtagggagaccagttaaaaggctattgtaataacgtaggtgagaaatatggaggcctggatcagggtggcagtagagggtggtgaggattgatcagattctggaagagtatttttctggttttgcattttaaacaattttaaacaaattattgtatggtaaagttgactctttttggtgtataggtctacagatattaatgtgtatatagatgtatgtagccattcccacagtcaaaataaaaaacagtttcccaaattcccaaaactcgggctgccactttgtggccacatcccttcttccaatcctaactcttgtcaaacactttgtttgacaagttttgtattttcaagaatgtcttataaatgaagtcatatagtatgtaacattttgagcctggcttctttcccttgatacagtgcctctaagtttcatctaagttgatgtgtcaatagtttgttcctttttatcaatgagtagtattcaattatatggctgtaccatagtttgtttatccattcacctgttacaagaacaggtttttttttttttttccccctgggcgattttgaatactgtacaggcttttgagtgaacatacatttttgtttttctgagataaatactcaggaatacaaatgctgggctgtatgataactgcatgtttaacttcataagaaactgccaaactattttccagagtggctgtaccattttgcattccctccaacagtgtatgaaagttccagttgcgaggggaggagccaagatggccgaataggaacagctccggtctacagctcccagcgtgagcgacgcagaagacggtgatttctgcatttccatctgaggtaccgggttcatctcactagggagtgccagacagtgggcgcaggccagtgtgtgtgcgcaccgtgcgcgagccgaagcagggcgaggcattgcctcacctgggaagcgcaaggggtcaggga

SEQ ID NO: 38744 - DNA, 2300 bp, Homo sapien
acccgggaccctggacgccggtgcgggcgggcctgccctcctctgtgcctggcccccagtctggccctcctacctgttgaccaggcctgaaccacgcaccggggctccgctgtctctgcttggctgccttaacctgcgtgggtctggagaccggagggagaaaggctagatccgcagccttgggctgctccgaacttaatgtctttccccagtccatctttgaaagagaagtggttctaccacctggatgtgcggatataaatccccttgcaaataataaatggattaataataacaaggtatgaagttctttttatagaaaaaaaggagagaattgaaactaaatgcggcagttagacaaccattttgataagaggataattgaggcgacactggtgtataattagaggataatttatgctatatccacttttattccacctcccaaaataaacccagtccataatcattacaggcaaattgttctgaattttatagcagcaatttgaacaaagtactgcagttaatcatgggagatttttgtgtattcctgattagaactctaattgcctccttccagaaagtaaaaataactgtaaaacgactctatttttatcattaacaatgttgacaataaaataaaatcaattggaattgtaatcgagagacaaatttaggacgaaggcacttttacttgggtagtttatattgtaatcaagatttgccaaaccactaaccgcatgtatcatttgcatatatttgaaagcattacagtagcttctgttttcaataggaaaaaatgcattactgtcagtcctccaacgattcgttttcagaacacgctgctgcgttctgaaaagaaaaaaaagacgccccccccccccacaaccttttgtacaatatataagaaatacggcctgaaacggcagggaccgagccagaacagggtctgatttttctttttctgtaccaccccccagtggggtggagcccaggtgtgagggttcgtcttccttctgtggtttcaataaaatacgtctagaaaaatccacggtgacaaggagctcccacaagagtgtagtaggaccagagtggcagggacgtcaagaaaggggggcctggatttaatgcgggggtggggtcactgcttctaagcacaggcaacctacaagggtgcaaagggattgaaagagagcagcccccagttggctgtttcaaggctgagatattggcaactggggctccgggatttggggcacgagctgcggcgggaagcatcggcggccggccgggcagaggcgcctccctccccaacggccccgggcgccacacagcgcggcccccggctgcagctccggctgggattggaactgcggaaggtaggcgaagaactctgcaagtcgcgcacacgccagtagaagccgtgcgcctgtgacgtcagggggcgactgaccaatggggaggcactgccctttggagacaaaccattcgactcgtggcgtctgcatcaagtctgaaagcagacgcgcaactttcgcagaatccaccttaaaatctctgccttaaactgcaccagcccccaaaaaatccaaggggggaaagcaggcggggggagagcagattcccccctccccctctcctctcccatccctcctccttcctcctccctttgagttaacaaggccccgctcactatatctctttatattaaatatatatatatattagagaagagcgagggagagggagaaccacctccacccccctctttaaattcttttttttttttttttttttttttgcaaggatccaaagagctaaggtggctgcagaggggagagcggcgcgagccaagtgggggagggtggaggaaacccgggagaaggctttctccagcccccaaagtttttgatgatgaccatgactacgatggctgacggcttggaaggccaggactcgtccaaatccgccttcatggagttcgggcagcagcagcagcagcagcagcaacagcagcagcagcagcagcagcaacagcaacagccgccgccgccgccgccgccgccgccgcagccgcactcgcagcagagctccccggccatggcaggcgcgcactaccctctgcactgcctgcactcggcggcggcggcggcagcggccggctcgcaccaccaccaccaccaccagcaccaccaccacggctcgccctacgcgtcgggcggagggaactcctacaaccaccgctcgctcgccgcctacccctacatgagccactcgcagcacagcccttacctccagtc

SEQ ID NO: 38745 - DNA, 2300 bp, Homo sapien
gcgtctgggcggctgcgctgctgttgtggtaggactggaggtaagggctgtgctgcgagtggctcatgtaggggtaggcggcgagcgagcggtggttgtaggagttccctccgcccgacgcgtagggcgagccgtggtggtggtgctggtggtggtggtggtggtgcgagccggccgctgccgccgccgccgccgagtgcaggcagtgcagagggtagtgcgcgcctgccatggccggggagctctgctgcgagtgcggctgcggcggcggcggcggcggcggcggcggctgttgctgttgctgctgctgctgctgctgctgttgctgctgctgctgctgctgctgcccgaactccatgaaggcggatttggacgagtcctggccttccaagccgtcagccatcgtagtcatggtcatcatcaaaaactttgggggctggagaaagccttctcccgggtttcctccaccctcccccacttggctcgcgccgctctcccctctgcagccaccttagctctttggatccttgcaaaaaaaaaaaaaaaaaaaaaaaagaatttaaagaggggggtggaggtggttctccctctccctcgctcttctctaatatatatatatatttaatataaagagatatagtgagcggggccttgttaactcaaagggaggaggaaggaggagggatgggagaggagagggggaggggggaatctgctctccccccgcctgctttccccccttggattttttgggggctggtgcagtttaaggcagagattttaaggtggattctgcgaaagttgcgcgtctgctttcagacttgatgcagacgccacgagtcgaatggtttgtctccaaagggcagtgcctccccattggtcagtcgccccctgacgtcacaggcgcacggcttctactggcgtgtgcgcgacttgcagagttcttcgcctaccttccgcagttccaatcccagccggagctgcagccgggggccgcgctgtgtggcgcccggggccgttggggagggaggcgcctctgcccggccggccgccgatgcttcccgccgcagctcgtgccccaaatcccggagccccagttgccaatatctcagccttgaaacagccaactgggggctgctctctttcaatccctttgcacccttgtaggttgcctgtgcttagaagcagtgaccccacccccgcattaaatccaggcccccctttcttgacgtccctgccactctggtcctactacactcttgtgggagctccttgtcaccgtggatttttctagacgtattttattgaaaccacagaaggaagacgaaccctcacacctgggctccaccccactggggggtggtacagaaaaagaaaaatcagaccctgttctggctcggtccctgccgtttcaggccgtatttcttatatattgtacaaaaggttgtggggggggggggcgtcttttttttcttttcagaacgcagcagcgtgttctgaaaacgaatcgttggaggactgacagtaatgcattttttcctattgaaaacagaagctactgtaatgctttcaaatatatgcaaatgatacatgcggttagtggtttggcaaatcttgattacaatataaactacccaagtaaaagtgccttcgtcctaaatttgtctctcgattacaattccaattgattttattttattgtcaacattgttaatgataaaaatagagtcgttttacagttatttttactttctggaaggaggcaattagagttctaatcaggaatacacaaaaatctcccatgattaactgcagtactttgttcaaattgctgctataaaattcagaacaatttgcctgtaatgattatggactgggtttattttgggaggtggaataaaagtggatatagcataaattatcctctaattatacaccagtgtcgcctcaattatcctcttatcaaaatggttgtctaactgccgcatttagtttcaattctctcctttttttctataaaaagaacttcataccttgttattattaatccatttattatttgcaaggggatttatatccgcacatccaggtggtagaaccacttctctttcaaagatggactggggaaagacattaagttcggagcagcccaaggctgcggatctagcctttctccctccggtctccagacccacgcaggttaaggcagccaagcagagacagcggagccccggtgcgtggttcaggcctggtcaacaggtaggagggccagactgggggccaggcacagaggagggcag

SEQ ID NO: 38746 - DNA, 2300 bp, Homo sapien
gaaaaccttattagttcccagggcctacaaaaggatccttaaaaaagttgaaccttattctgcctcctggcttgtacacctttttctcctaaatgtttgttctctttcatgttgttctgctctggaataacactcaattgaattatgagtttggtcacaaaaggattctaggctggggtggggtcgccgagggttgggaggatgtgcaaatccaatccagtattcaataccaggtcattcattccaaactgtgttgtcccaggaaagtgcataactggagcaaaaggcatttgtcattaagctccttccatccttggttgactaggccaacaattcctcctgatgtgctccctgcccgatctgcaagcggtaccagcatttcagggatacttgggcttctcgggaattacctgtgtttgtgtcagtcctaaggaagctgccagttcggctctctctggaagggccagatactgtgtctgctgaaagcgatggtttaaagcctggagctgcaggctggaataaatggtccgaggcttccgaatctttttcccttttccattgaacctgatttccccgttttcaatcactgtagttttttgttgatctgtaagcaaataatacagaggagcggtcacccgggaggctactgctgccatctccctgctcctggcgtggcatgcaacgagtctccccaaagcccaataagggttacctcgaaaaatccctatgatgccccgacctctcttggtccactctgcccgtgtgctcccagcgtctgcgtaatctccttgacccagtccctggcccgaacaatgtgcagcgtctgggccaagggagcgccagaggccctcagacaaacagcccgctttgccgcagcggaggcggtgccggaggctctctggggtgcgcagcgcagcaaggcggcagctgtccgggcggagcggggcccctgtgcccggcttaacagtacctgaagctgtgcttgagccacccaggtgtttacgcggccagttgacttgatgtcaccagctccaagctcagtgcatcaagcatcctcggcatgttttgaaatgactctcctgaggaggaccaaatcctcaaacaaaacacaaccaacagctcagaccagcccacgagcaggctgcgcctctcacggcaactttgtccccctcgggtgctgagaaccatcagcccgaggttctttgcttcccctccacgaacaaaggagcagccaacactgtagcgaaaagctagatagggggcccggtcagggatgaaggtgagggacactttaaagcccactggaaagagcctgactgttactagtttaaccagagcgaaagccaggccagcttccctccgagtcactgaggagcacggggcgccccacgcaaagtaggccactgcctgcccagcgtgggctgggaagcaaaacacgctccccagttccggcccagaaatgtccccagccgggtcaaacgtgggttacagcctggagggaaggagcaaggaaaagggcgcacagacccaggaggctggagagcgcagtgtggactaactcgtcgaacgaagcctgcgccgggcccgggactcagcccgaactgcgcgtcggaagctgagggtccgcggcggcgggaaggggcccggctgggagaggccggcaggcaggcgccaggcgagcgggcgcgcacggggcccggccaagggcgcgcggggccgcctgggggagggggccggcggaggcccgggcgtcgaggaagtgagcgggcgggcggggtagggggcagtcgggaggcgggagaagcgagctgccccagcggcctctcacctgtgtcgtcccctcgcgtctgggcggctgcgctgctgttgtggtaggactggaggtaagggctgtgctgcgagtggctcatgtaggggtaggcggcgagcgagcggtggttgtaggagttccctccgcccgacgcgtagggcgagccgtggtggtggtgctggtggtggtggtggtggtgcgagccggccgctgccgccgccgccgccgagtgcaggcagtgcagagggtagtgcgcgcctgccatggccggggagctctgctgcgagtgcggctgcggcggcggcggcggcggcggcggcggctgttgctgttgctgctgctgctgctgctgctgttgctgctgctgctgctgctgctgcccgaactccatgaaggcggatttggacgagtcctggccttccaagccgtcagccatcgtagtcatggtcatcatcaaaaactttgggggctggagaaagccttctcccgg

SEQ ID NO: 38747 - DNA, 2300 bp, Homo sapien
tgttttataggtcgggctctaaccgtgaagataggaactgagggaatttacatgaacctctctttaaagcagatgagagtcctgctttgcatcaattaaatgttcctgctcttttgttcacttggacttcttatttacttctgatttatgggatccgaaggagtctctttgccaaaagcacatgtattattgagtctgttccacatcctaaaccaagatttatataaaaccgtgaaataccacacattacgacctttcaccacaggaagggaaaaaaatggctttataacatcattctacacacataccctccctctctcctagcttcggtaaggattctctgtgggatcttcaccatgcagtctagtgttttttttttttttaagaagtgggtgagggtgaagggtggtaaacagttcccaagctatgatttattttaaaggctttttttttctctcgctaaccaagaagacagaaacctgccaatggaagcttattgttatccaggactatttctgccacttgccatttgcaaggtcagggaagaggggcggaggaagagcaggatatggactcaactttcatctataaacaggggtcactaaacaggggacatttcattattgcccttaaattcacaagagctaggaaacctgcttgccatcctgcagggtggccctggttgggcagctcccgggtctgtgaagtggtgggaggagggagagtcgacacacattggcccagaggctagaaaagatgcctaggaaattctctgtattcatggtgggaaaattgagctcctggggataaatgggctttaggtatctttgactaggaggtccccaccaggaaccagaactagactccagaaccctccaccagggcagggttcatcctcctggaagaaacagcttgaacccctagagctctttgactctgggaccagcatagtcccccagcctgtctccagcctctcttgctctaactctccctctcttgctctaactccctccttctttggtcctcctatattttaataagattgaccttgctcattttagcacattggtgacaggtagcaaaagcagcagctggactggtttatatgggggggggggaatgttaattaataaaagttaatgataggattaaaaccaatagccagccaagccaactggagaagacagcttcccagccggctatatttaattagcagcaattaatacgttttctgctaatatcctttaggattctatgacttagttcctgctgaaagagaatgaagacagagggcagaaacacaagtgcccaagggcattttgcttggataacaagagagacagcaaattcatttaagaaaatgttcataaacaagtgacaggcacactctcaggcgattttgtggaaacaatggtgaaactgacaaatgttctttgctttgggggagggacacatttttaaaacaggaaaatgtttctggagagagaagggggaaaaaaagacagggggttggaaaaaagaaagaaaaagaaaaattattttagactccagacaagcagcagatgcagcagcccttgcaaacacatcagccctgcactattgaagatttggacatgaaatgcttcagaccactgatttgctattttcttaattctcgctcttctttttccatatgaatcaaacagtcttttgtccttcagggtttgatttgatcgctactgttcacatttcacttttgtattttcctcttcctataccattactcattgagtgccctgtgaaattacaatcgtacattttcagctcagcaacccatttgcagtgcaaaaatagggtctaaataatggctgaattagccctactggacagtttcagatgtaacactctgtaataattatattgcaggctggattaggatgctattatcataatctggacgtttacaattatctgtaatttgcaaagatgcgccaggtcttgattacagcagttttttttttttttttttttttttttgtaccacgctaaccatcactaaacagtgacagtaataacagctaattttgctggcaatataagaggtgctggggtgtgcaaacaatttcacacctggatgtgctcactcaaccaagaatatagagaaagagcttctgccctgagactcagaaaaatattctcctgtgctttggttcagtatagatttctaaaccctgatcattgcttaagagatattcactgagggtaagtttttatttcttgcatacttcaaggaacagttcttatttctcttctcacacttt

SEQ ID NO: 38748 - DNA, 2300 bp, Homo sapien
ggtaactcaaatctctatttaaccaaaagtgtcgaagataggggaccagaggaagggaggcctggctccctgcccacttgtctttgccgggaggtgctttgaactgtccttggcattgatctgaggaagcgatttctgtaattaaatggcagtgtgtatcaggtgactcgatgggcgccgataacttctccagagcagagcccaggaccgcagacccatgtttccctcctgttctttagctcctcacagcctacatctagacggttaacagcctgtcggtaatcgacagcgtcaagtcagggctggctggcagctgcagctctgtttaccccgaagtctatctcagagaagcccgcggcagcccaggcccaaagctcgtgactcgggccagtgggagaaggagaatgctgctgggcgccagtctcccggtgctgaagtttcccccgaaaggaagtgcgacaatagctgtgtttttctggtgcagtccagaccgcaaaggcagggagttggtgcacgcacggcagctctgctttggagttcctgagcggggctgtatcttgctctgagttccagacaccctacctctacccgtcggcctgttttaggccgagtggctccacactccaagtaaggctaaactaatactagacacaactaacacagacgctttcttcttcggtaggagggaaaacggaggggaggccagataaccctagatagcctgtggaactcccagattgccggtcttggaccccgtaaaggaagatgtaggaaggccccaaatcaggatctagtccgcggagttgcctatttgaggggagtaacaatggggattgggagagacttttatgctgaatttctaaactcccagctgaatcacgactagaacaaggatagcacctcctgaagagcaaagtttagatctcgtgtatcaactgaatgattcttgaatcctttcttcccttgcatacgagctaagtaggatgtctttgcagcaggaaataaaggggagagggtacagaaacccgggtctgggaaatggagagactgggccacattcatggagccaggagggggaaatcaatgagcatcatctgactttgcaaaggctttgatccttgtctccttccccacttccgagactttcccattctttcctggaggtatggcaggttatacatggatccattcacctttgcgggagtctttggccactgaacatagttaaagagcctttattccaatgtcttgaaaatagatgaaaatattaaacagaagtggagctgtttggctctttttgcaagccagcaacgaggatttgggcttccttaagttatatgtgtttaagacagtaatttttaaaagtcattataaggactttgggctgcaggaactctccctgccattcaccggcttaatggacattgtgccttcttgggcattcctgtccagcccgcgtccgggagatactcatctcctgcaaaggaagttgcctctttccccaaagagcaaattttcaaaacatgtaagttacaacttgcttcccaacactccactaaaaaaaaaaaaaatgctgtttcccttccttcttgcctccatcctacatccccccgctccccactccctgcaccttgactccctatttcagtatcagtgtttaattctacactcgcctttggtgcagcccacgggggcggggtagtgggaagcaaggaaagatggtcgcccacctcattcccaaaacatgtgcacttttgaggcttctgattggaacacattgtccccagacatcacagagccttgtgctgtggcttctgcgatgtctttggaatttactaaaaacagatagactaagacccctccccactccacaacaagcaaaaacacacacaagcgcgcgggcgcgcacacacacaaacacacacaccccctcagtaccccccaccccctttttaagcaatgctttgttgtgctaaaactagttggacgagttagggtgttactgttgctcccgaggccctggccaatagaaccagatccaccccgctgtgcgtaagcgcgcaattaaggatttaaccaaggctgtgctgcgcctcagccagcagtcagccggccggagacagagacttcacgactcccagtctcctcctcgccgcggccgccgcctcctccttctctcctcctcctcttcctcctcctccctcgctcccacagccatgtctgcttagaccagagcagccccacagccaactagggcagctgccgccgccacaacagcaaggacagccgctgccgccgcc

SEQ ID NO: 38749 - DNA, 2300 bp, Homo sapien
tgatcatccctatggctataggtggttattatattttgtgtgccctgaaaggcttaggtgatgtgttccatatacaattttaaggcatttaccccacgtttttctaaacaaaaaatttttaaagcaattatttaagagtggatatatgttctctttcactttacaaaaaattttggagggaatctgagagaagtcatggttagagattagtaaagttggaaagtactgcaaattacctaacccagctcatttacaagtgagaaaatctgggcacagagcggttaaatcacttgcagagtaacatataagaaaaagaaacacatgaaggaaggataaaggaaaggtctgcatgaagtgtagtgatctagattggtggccagaaatataagtgtgattttattttcagttcatggctatttttaccacaagaggaacactgatcagcctaaattggtcagggaaacagagaaaagttttgtcctcaaaacatagctcactgtccagcttgttgtaaaaaaaataaaataaaggttaactgtcattattctcactgttattgctttattccacttctcaaggcctaaccacaccactatgtcttggcttctctttcacccatcgtctgccattttgagcattgattctccaatgctttgtggaccctttctactctctttaggctcaattaattcctttattttttaattaattcattggcagaatgttttctcacatttttataagagtgttggctcttgaaagaggtatttattacacatgttctttaactccaaaggaaaccagaaaaaaacaaacggggacaagaaatcaattttcaattttacagggatattaacagatgaagtatggttagaaaaaaatttcctgaagcaaaataaccacgctgccattcaatccttgccattaatgcagtttgtcataataccaaattaaatccatttttaaaaagttctgtgttttttaaaacacatattttccctaaatttaagcaaaaggagaagctctattcaaagcaataaattctacttactatttgtatggcactgtggtgggccctgaaaaggatactaaaatgagtaagtacctgccttcagtagctgagtgtgtcttgtttttctttcagaaagtttttgcacagaaagaagtctggggtctgtgagacaatcacacaaatttcaacatttctgcctcttcttcaccagcaggaatatgaggcatctgacaccgttagtgagtttcacacattaattcaacagatatttattgagtgcttactacagacctagtgcaggtcactaacaaatcacaaaatccctgcccctatagaatttgtactctagttgggggataataaatggagaataagcacatgagtaaattatgtaagtaatatagagagaaacaaagcagaggaggagcataagaaattcttggtttggtgaggttgcaacttcaagcagggtttcaaatagggttgccagggagggtctcattagaaggggacctgaagtatgcgctgagtgaaataaaagtgttagccaggaagatacatttggcaaagcactccaagtagacgggacagcaagtgccaaggcctcagttgggagtgtacctggctttttaaaatatgaactaagagctaggaggccagtgtggctgcaactggctaactagggagaaagcaataggagaaaatttaaacctttaagggctagagactgggctttactctgatgaaaatccctggaggcttttgttgagcagaggagtgaaatgatccgatttacagtttagattgttaaaagaaaaactttaaacaagttaaatctaataaagtttatttgcacgagcgcacgtgcacacacacacacgatttatgaggcattcatcaggcagcagcacttaacagggagaggttcagagagctctacccagcactgtgggcaggcagtatttatagacagaaaaaggaagtgccccacagaaacagcttgattgcttacagttgggctagtcttatttgggcaggacattatgacgtatttgccttatatgcacatagtctgatcagttggcagcctgtgattggctgaagctcagctacttgtcacaagaatatactctcagttgcagttaatttacatactaagttaggttgcagttccctacatagcaactcagagtagggaggaaattttaggccaaatttaatttaaattatgttggagcatgaccaaagttggtcatgaccagaagctgaacacagatatggaagctaa

SEQ ID NO: 38750 - DNA, 2300 bp, Homo sapien
gtagctgagtgtgtcttgtttttctttcagaaagtttttgcacagaaagaagtctggggtctgtgagacaatcacacaaatttcaacatttctgcctcttcttcaccagcaggaatatgaggcatctgacaccgttagtgagtttcacacattaattcaacagatatttattgagtgcttactacagacctagtgcaggtcactaacaaatcacaaaatccctgcccctatagaatttgtactctagttgggggataataaatggagaataagcacatgagtaaattatgtaagtaatatagagagaaacaaagcagaggaggagcataagaaattcttggtttggtgaggttgcaacttcaagcagggtttcaaatagggttgccagggagggtctcattagaaggggacctgaagtatgcgctgagtgaaataaaagtgttagccaggaagatacatttggcaaagcactccaagtagacgggacagcaagtgccaaggcctcagttgggagtgtacctggctttttaaaatatgaactaagagctaggaggccagtgtggctgcaactggctaactagggagaaagcaataggagaaaatttaaacctttaagggctagagactgggctttactctgatgaaaatccctggaggcttttgttgagcagaggagtgaaatgatccgatttacagtttagattgttaaaagaaaaactttaaacaagttaaatctaataaagtttatttgcacgagcgcacgtgcacacacacacacgatttatgaggcattcatcaggcagcagcacttaacagggagaggttcagagagctctacccagcactgtgggcaggcagtatttatagacagaaaaaggaagtgccccacagaaacagcttgattgcttacagttgggctagtcttatttgggcaggacattatgacgtatttgccttatatgcacatagtctgatcagttggcagcctgtgattggctgaagctcagctacttgtcacaagaatatactctcagttgcagttaatttacatactaagttaggttgcagttccctacatagcaactcagagtagggaggaaattttaggccaaatttaatttaaattatgttggagcatgaccaaagttggtcatgaccagaagctgaacacagatatggaagctaacacaatatccagtggagagagattgtggtagagtacatggggcgaaatggttgatttctgcatttttgttggtgacgccatcaggatttgctgaagaaccaaacgtgtgacaggaaaggacaacacaaggagctgccagctttggaaaccagttctactctcagtattaccttcgcaaaagatagagctttgtaaatttctagattcctcgttcttattatcctagactatttaaccagaatctccagggtcgtggtcctggaaacaatacgtttaaaactcttcccaaggatccttcagcagccaacttgactttggctaaggagtccgccagctctgggctcacttgggttgtttgcaaggaagagcccatgcccagagtataaattgggagaacagcgctgtgcaaagagcgtgggttggtgagctagtggatggcgagattaatctcactctgatccctaaagcagggtgcagtaatactctaaatgcctcaaatgggttgggaaccatggaaggaatcccggaggagcccgatcttaacgaagcttttctcaggcctttggtaggaggacagaaacgaagttgaatgaaaaagacagtggagtgggactgagaaatgacaacggcccaccacagacctctctctttcaaggcctgtgtcgtcaggacgcaggccagaagaagccacgacgaggcgcaggcgcgactccacgagggccacgcccctcctagagaaggaccgacccgttttccgcccgcagcggagcttgggtttccgggaggacctgattgtgcaagggaccaaaccggatagaggtcgcgcgccctctttcgtctgccttccggttcactaatacgcaagttcgcagaagtgcgggaacgcgccgtccctctgcgcaggcgcagtcggcggtcggcgtggggcgctatgccggggcggcacgtttctcgagtccgggcattgtacaagcgcgtcttgcagctgcaccgtgttctgcccccggacctcaaatccctgggcgaccagtacgtgaaagacgaatttaggagacataagaccgttggttctgacgaggcacagcgtttcttgcaagaatgggaggcaagtgac

SEQ ID NO: 38751 - DNA, 2300 bp, Homo sapien
gagaaacaagttaaaaggcaatcagcaaagtccagaatgcggtacactctcctgacctgtcttatcaataaactacaatagagagagaaagagagagcgaattacagattcagggagatttaagaaacatgcagtagaaggaatgttcgtgtccctccaaaatgcatgtgttgaaatcgtaacccctaaggttatggtattaggaagtggggtctttggaagataattagatcatgatggtgcagctcttatgaatgagatcagtgccccgataaaagggactttgaagagctctctcattctttcctgccatgtgaggatataacaaggagacaatatgacagtctgtaacctggaagagggccttaaacacaaccagaccatgctgacaccacgatctcagacttccaaccttcgaaactgtgagaaataaatttctgttgtttacgtcacccagaccatggtactttcttacagcagcctgaactaacaaaaccaattgtaatgtatggacttcattataattctgatttcaagtagtaaactgtgtgggccggaattaggaagcaatgagaaatatttgaatgctaactggatatttaatgtaaggaattattttatgttgttttaggtgggataatggcgtggatatgtttttattttttttaattcctacctttatacagacatgctgaaatatttacagttgaaatgattaactgtctgggatttttttcaaaataatctcagtgcagaggaaactggaagggttgtagatgaaacttggaagtggatgtttctctctacttttggatatgcttataattttccatataaaagttctgaaaacggaaaataaaatgctcacattgtgaggctaaggccaaaagaaatcagagatgcatgagaatttccaaattcaggattatttaagaacaacatagagaaaaaaatacttctggtttgagttgcaaaaatttatttcttttatgcaatatactaaaaaatcataattaattgaaaaatataatacttcatatgtaaaggggagaaaactactccaccaaagatgtcacatcttttaattcatttggagatcaaagaaatgtgtctgccaggcaaccaagggctcatggaaaggtgtggtttctgtacaaatgctatttgtctaatattttgtgctgttaatgactgtcccattagcatcttcactacacttactttcatagaaaggagaaacatgatttatagagccctttagtgacaagggtgaggatcctacacactatgttgctggtttcctagtcttcagcaagaaagtgtaggagagaagcaaaaaacgtcctgttcaacccctgctcctggatgtggcaaggaagaggagttacccggcttgaaacaaaagaaatcctaagtctgacacacaatgtcatgtttaaattcccctttctccaaaatgtaaaataaatctgcttccatcttctaaaatactatgggactaaacatccttttgttatgctaaggaaaagccagtattcgcgttgatttagaagagggatgttctggttatagaacgatgctgtgtctcagaaacacttaaatactattaagctagaaatagaagggaaaataatgcttccccgcatctcccctcaagtgtagtcctctttttttagcctgatttccgacgaaatgtctgaatgcctacagttatttggccatcctgaaaagtgcaacttatcctgacgtctcgagggacggaaaagttaccgaagtccaaggaatgagtcactttgctcaaatttgatgagtaatatcaggtgtcatgaaacccagtttcgaaggagaggggagggggcgtcagatctgcagacggaagcaggccgctccggattggatggcgagacctcgattttcctaaaattgcgtcatttagaacccaattgggtccagatgttatgggcatcgacgagttaccgtctcggaaactctcaatcacgcaagcgaaaggagaggaggcggctaattaaatattgagcagaaagtcgcgtggggagaatgtcacgtgggtctggaggctcaaggaggctgggataaataccgcaaggcactgagcaggcgaaagagcgcgctcggacctccttcccggcggcagctaccgagagtgcggagcgaccagcgtgcgctcggaggaaccagagaaactcagcaccccgcgggactgtccgtcgcagtaagtgcccgcgcggtgctggccgcggctgcccgggtcaccccgccccgcatctgtccgaggtggc

SEQ ID NO: 38752 - DNA, 2300 bp, Homo sapien
aattaatacttttgtaatttcttatgcctgccttcactgcaatctctaaacataaattgtaaagatttcatggactaaacttatcacttccctaatcaatacccttgtgatttcctatgcctgtcattactttaatctcttaatcctgtcagccgagaaggatgtatatcgtctcaggacctgtaataattgcgttaagtacacaaattatacagcatgtgtgtttgagcaatatgaaatgtgggcaccctgaaaaaagaacaggataacagcaattgttcagggaataagagagataaccttaaactctgaccgccggtgagccaggcagaacagaaccatatttctcttctttcaaaagcaaatgggagaaatatcgctgaattccttttctcagcatggaacgtccctgagaaagagaatgcgcacctaggggtaggtctctaaactggccccccggggcgtacctgtctcttatggtcgagactgcagaggtgaaataaactccagtctcccatagcactcccaggcttattaggaagagaaaattcccacctaataaactttggtcagaccggttgatctcaaaaccctgtctcctgataagatgttatcaatgacaatggtgccaaaacttcattagcaattttaatttcaccttttgcatctccttgaaatgtctgcctttgcacactctccctgaaagaggagggcaagggagccaggatagaaagtgaggtggagaagtgtagagctctggacggacaagcaggagatacgcagcacaaggaagcacactaggtaacacaccaagcaggggaacctgtctttcactacataggcaagatgctacgggaaatgggctctgggtttacacagattatgactcagttctctactgttgtgaagctgtgtttggataaatccctcaacttttctgagtcttattttttcatttgtaaaatgtagatagaagacctactttcccacattgctctcaggtttaaagtacgtcaattaggatacagcaaagtctgtttgatactgaaaactttccagcaacaatgaaccttagaacaagtcatctctcatctttgctcttgcctgtaactactaagcgactactccatcttctgttcttagggattttaaattgttgacgtttttgatttagtcaggaatgcgttgtatggggatatcaaacctgcatgctctccaagcattgactgtagtctgatcttagtaggtcgtgcacatataattttactatttctcaatttatttcggtgctgatgtaattagtaaaatacgatttaagagtgttatgatactttttaaaaatcgtgatgtcttttcttcatcaaagagatacttaaaagcacataatcatcttgtggaggcaagttgacaaaatcctttttgagattctaaaaggaatctttgtacttaaaatgtttaaggaccactgatgtattttggcttcatgtatcaattagatttagattttattgttttagagatgggggtctccctttgtcgcccaggctggagttgagctcacctcagcctcaaacgcctgggctcaaactatccttctgcctcagcctcctgagttgctgggactaccatggtgtgccaccaatttttatagagatgtgatctcgctgtgtttcccaggctggtcttgaactcctggtttcaagtgatcctcttgccttggcttcccaaagtgttgggattacaggcgtgagccaccgctcctggccccgatttattaatagatcttataaggacattttaggcctcacgcatcagtttcttaggacaagcttttctctgcactgcataataaatcagacggcagtgcaacaaaaaaacggtgatgatttcccgaagaacaaaccaagttcagaagcctccctaattgtcagaacagcaggtagcctgggcggagctctgaggctatccttaaacaggcgcactgagacgcaaggcgctggaaacaaaagagctcctccttgcgcccttccgccgccccacttagtcctgctccgccccggacaccccgcggccccgcccctgtgcgcgctggttggtcctcgcaggcatgatgaaacttcccgcacgcgttacaggagccaggtcggtataagcgccagcggcctcgccgcccgtcaagctgtccacatccctggcctcagcccgccacatcaccctgacctgcttacgcccaggtgagccgggtcctgcgccccgtgccctgcgccccgcgccagcatcctcctcgcgtgccctggggc

SEQ ID NO: 38753 - DNA, 2300 bp, Homo sapien
caccacgcccatctaattttgtatttttagtagagacagggtttctgtcttcatagatttgcgtgttctggacatttcatataaatgacatcttagaatatgtgaccttttgtgactggtttcttccacttagcttaatattctcatagttcatccgtgttgtagcacgtgttagtacttcattccttttgatgactgaataatattccattgcatagtcaaaccatgttctatttctccactcatcagtagacaagcatttgtgttgttttcactttggcgctattatgaataatgctgctatgagcatttgtgtacaagtttctggacggacatatattttcatttctttcataaactggagtggaagtggtgggtcatagaactctgtgtttaatctttggaagaagtgccagactgtgtaagaaagaaagcctttcctcaccctgtgagactgagctccctctctccatttatacattctctttaagccctttgcttctctttcagagcaattcacattgacctgggtcaccctcaacttaaggctcataactcccctagatcctcagggtccacactaaatgtgatgaaatatgatgcaagccacatatttacttttgcattttgtagtaaccacattttaaaaagtaaaacaaaagaagtgaacgtaattggaataatatcacagatttaaacaaatctatccaaaataccaggtcaacatgtataaaatattttaacaataacaaaatactttgctttctttttatattaagtcttcacaatctaatgtgtatttgacacttctcgcacatttcagaatgatggcagcagcccatatggggggcccgcccatgatgccaatgatgggctctcctcctcctgggatgatgccagtgggacctgctcctggaatgaggccgcccatgggaggccacatgcccatgatgcctgggtgcccaatgatgagacctcctgcccgtctcatgatggtgcccagtcagcccagaatgactcaaccagacagataaggatagaggggaggcctcattgcatcagtgttgttttgttgttgttactgttgtgttttttttgtttgtaatgttttgttttgtttttgagacagcgtcttcctctgtcgcccaggctggagggcagtggcatgatctcagctcactgaaacctccacctcccgggttcaagcgattcccctgcctcagcctcctgagtagtgtgggactacaggcgtgtgcaccatgcccggctaatttttttttattttagtagaaacggggtttcaccatgttggccaggacggtctcaatctcctgacctcgtgacccgctcgcctcagcctccgaaagtgctgggattacaggtgtgagccactgcgcctggcctatatgaattttatatttacctgctcccttcaccaggagatcatgctgctgtgatatcgggttttcttaacagcataaggaagacttgcccccttgccctatcaaagagaatagttttggaggggagaagtggggccaaaaaagatgcagttttcatttgtatagggaaatgtgaaaataaaattgccaactcctttagttaaaaacaaaaaaaaaagaaaagaaaacaagacgtggggctgccaaatgcaatactgtggattccacggatcttctactctggaggctaatattatctttgctgaagccagaccaacctgacacaaagaccttttggttttttaatgtgactgtgttttattttagaatgtgtaattcactttagaagggcaaagtacctgtctggggaagactatttaatttcctgaatttatttagaacgttggctgatgttattatgaaggaaaacagctctaacaactgagtgccccccacatagacacagctcatgagttcacagggcaaaggaattgaacagcagcctcctaatagccggccatctttgtgatgtggaaataattatcagcatgtaaaagtctatatatatattcaacaattctgaccccctgcaaaattcaaatctacaactgatttgcttcctgggctcctgaaaacaactttgtcaaaattgttcagaaatataatcagccaatcgttgccccttggggacgcaggataaagcaagtcatccatgaccaatgtggagtcggccgtgcacaattacatgcagacctgcaggacatcgagtccctgctatggtccctccccagtcaggcccccattgcctgggctgcagccagaagcattcaggcacaagtgcattcaaccaatacttac

SEQ ID NO: 38754 - DNA, 2300 bp, Homo sapien
tctctcaaacaaggactctgtagattatgctaatgggccaaacagaaatgtgtttcttttctttctttttttttttttttttgagacagggtcttgctgtgttgcccaggctggagtgtagtggtgcaatcttggctcactgcaacctccacctactgggttcaagtaattctcctgcctcaagcctcccaagtagctggaaccacaggcatgtgccaccacgcctggctagttttttgtattttagtagagacggggctggtctggaactccaggcctcaagtgattcacccaccttggcctcccaaagtgctgggattacaggcatgagccaccgtgcccagccttgtttctttctaaatgaggcttcctttgtgtctttacatttccttctacaaaaaaactgccatggcacaggggcttatgcctataatcccagcacttggagagcccaaggccagtggatcacttgagcccaggagttcgagaccagcctgggttaacatagtgagaccccagctctacgaaaaatttaaaaattagccagccatggtggcatgcacctgtggtcccagctattcgggaggctgaggtgggaggatcacttgagcccaggagttccaggctgcagtgagctatgatctggccgctgcactccagcctggacaacagagcaaagtgctgtcttagaataaaatactttttaaataaactaaaaacaaaacaatgggccaggtgtgggtggctcacatccgtaatcccagcactttgggaggccaggtgaggcagaatagggcatgagggtaaccaagggttaaggcagaaacaaaagaacagcaggtgcagccagttctaggcaagattaggcagcatggaggccacgtgttcattccgtcaatcaggcggagaggggggcggggggagggtgacagcttctgattgacggcggggggtgggtggtggtgcgcaagtctccacttcagcctctgattggtcacaggccaatccttcagagggtgtaaccaatcggaggcatctaacgggcacctaggggcgttacctaattcttccagcttaataaaaatcctgacgggtgctatcgaaccgtttgctctatcccgctcctgctgtgtgaattgtactttcgcttcaataaatctgtctcttccttactccggttttttcttttgtttcttttcgttgctttgttcttttgctactttgtgcattttgttcaattctttgttcaacacgccaagaacctgggcaatccacggtcaagaccttccatccagtaacagaggcaggaggatcccttgatgccaagagttcgagaccagctggggcaacaaagtgagaccctgtctctactctctaactctctctctctctctctctctctctctctctctatatatatatatatatatatatatattttaattatctgggcatggtggtgcatgcatgtggtctcagctactcaggctgaggtgggaagatcgcttgagcctgggagttgaggctgcagtgagctatgatggcaccactgcactccaacccgggtgacaaagcgagatcctgtctctaaattaaattaaaaacaataccaccaaaacaacaacaggttgggcggtggtgtctcacgcctataatcggagcactttgggaggtcgaaatgggagaccatgtgaagccaggagttcgagagcagcctgggcaacacagaccccacctctacaaaaaataaaactggccttgatggcgcgccctgtaatcctagctacttgggaggctgaggcagggggatggcttgagtcccagaggttgaggctgcagtgagctgagatcccgccgctacactccagactggatgacaaactgagatcctatcaaaaaacaaacaaacaaacaaacagtgccccactcagtttttcctgaaacgcgcaaccctcgcccgtagccaggagaaaactccgcgagccagcaaaacacaaactcggccgggaaacagacaacaaggccaccctggggtgccagaagaggacgctgcgaggcgggttcttcttcctggtcggcggcgagcgcttccggggtggtggcgagggaggcggaagtgcggtgttctagcaggtggctgctttctctgggctggctgtgggaggctcccgaggtggggacccggccgggatggctgcagcggcggccggggctgggagcgggccctcggcggcccaggagaagcagttcctgccggcgctgctgagtttcttcatctacaacccgcgcttctggccgcg

SEQ ID NO: 38755 - DNA, 2300 bp, Homo sapien
ttaaaaatggttgagattatatattttatggaatgtggtttttacccaataattaaaaagaagagtctagcacagtgctggccatataaagcctcaataaatgtttgctgaaaattaaaaaaaaaaaaaaggccaggagtggtggttcacacatgtaatcccagcactttgggaggctgaggtgggagaattactcgagcccaggagttcaagaccagcctaggcaacatggcaaaaccctgtctctccaaaaaatatgtatattaaaaaaattagccaggcatggtggtgtgtgcctgtagtaccagctactcgggagactgaggtgggaggatcgcttgagcctggaggtcaaggctgcaatgagctgagattgtaccactgcactccagtcggggcaacagagcaagaccctgtcacaacagaaacaaaatcttgaggtgtctagtcctggcctcagcctcagagtatttgtttctgaacttgttagttttgggggttggggatgctggtttgatttcctcctttttgccttttgagtgtgtgcaatttatggtatagctgggaaacgtaaaagtcaagagttttgtaggaaaatcacgtcacttagccctgtctcctgtgccggacgagtcctgtgtgtgcacttggtgacaatggctttgagtcttcaactccagattgaggtcagccttacacatccatagttcccaaagctgaaaacaggcctgcctccaacggtacctgctaacatctggggagcttttcagcttacagagcaccctgtatgtgtttgtcttagttcaggccaccatctccagcttaccaggctctagaaccttctccacactttgccaacagggttcgtttgcagaattgaaaccttagttaaggtttgttgaggttgttgttgttgttgttgtttttacaattggctattcccacccacattcccttgagacataaatagaaaaaaaaaagaggtttcctgagtaggacaagacatttgagctgcatccacttgatccttgaaaaggaaatctaagaggttgtaactatcactttttctagcctatataaggtaggtcagtaaggtagcaaaagcacatctgttgttttgctccttcaactctttttcctgattcttcctgggggaaaacctaaaacggtgagtaactggtggacccatcagaccccagactcttcttcactgcatgcattcatattaggctcaggtgcttagactcctgttttcccatggctctgacatctggaaggattttaatctctgggagatgggcttttcatccatctgcttcccacctttcaggacaggtagcatgtcttcttccacagaatgtctgcaagcagcccaaactgtatcctttcccacgtggaatttgcaacagtgcatctctcggactgctgtaggaaaatgccagtgcatttgtaacatggtttacggctgcctatgcaaatgactgattatgtcagtataatttttataagaaaacaattgaatccttctttgggtcatgtttttttttttcatttttggcatatattcaaaagaaggctctgagacaaaaagggctggggtctttttggtatctggttttaatttggatattctgtcccgtcacttaatacaaaaccatgcttatcacattttaaaaattctagacaggcctggcttggtggcttatgcctgtaatcccagcagtttgtgaggccaaggcaggcagatcacatgaggtcaggagctcgagaccaggctggcaaacatggcaaaaccccatctctactaaaaacacaaaaatcagccaggcctggtagtgcgcacctgtaatcccagctactcggaaggctgaggcaggagaatcacttgagcccaggaggtggaggttgcagtgagccaagattgtgccactgcactccagcctgggtgacagagtgagactccatctcaaaaaaaaaaaaaaaaaaaatctagacacacatacagtttcagtgggcctgggaagatgtgtttcccctggatgtgcacgttcctgtttgtggcttatcgcctctcgtttattctgtgtgagtaggtagaaaatgagcatcacggacgtgctcagtgctgatgacattgcagcagcgctccaggaatgccaaggtagaggggacgtggggcgggggtgggatttcctcacagctttgcccctccagcgaggcaacacaaaatcaaaatgtaggccaggcggccagacgcagtggctcacgcctgtaatcctagcactttgggaggctgaggt

SEQ ID NO: 38756 - DNA, 2300 bp, Homo sapien
tttatttgtttgtttgttttaacttttgggcttgctcaaataatagcaaaatctactttgggattgtggtccaacgtgctgttggagtgcactttagttgtaaataaccactaccaggattatcaggtaaggccttccttaggccagcactacagcaggcagtcacgagcctccttgcagtacacagtgtgggtgtccctggcttctctgaactcaaagtgagaagcttcctgatagaagtagaagtataggctaggcgcggtggctcatgcctgtaaccccagcactttgggaggccggagtgggcagatcacgaggtcaagagatcgagaccatcctggccaacatggtgaaatcctgtctctactgaaaatacaaaaattagccaggtgtggtggcgggcacctgtagtcccagctactcaggaggctgaggcaggagaatcgcttgaacccaggaggcagaggttgcagtgagctgagatcgcaccactgcattctagcctggtgacagagacagactctgtctcaaagaaaaaaaaaaaagaagtagaagtacaacagggtgattgtgtctctttcctagacctttgccttccttaccaattctgcatataatcagcagaaagccgtgaacttttttttttttaagacagagtctcgctgtgtcgcccaggctggagtgcagcggtgtgatctcagctcaccgcaacctccgcctcctgggttcgagcaattttcctgcctcagcctcccaagcagctgggattacaggcatgcgtcaccgtgtctggctaatactttttgtatttttagtagagatggggtatgaccatgttggccaggctggtcttgaactcctggtctgaagtgattcacccaccttggcctcccaaagtgctgagattacaggtgtgagccaccgtgcccagccaagccatggacttttaaattcaatgtttctcgttccaggtatttgtctccttagatatttattggcttgcctcaatcatccaacaaatattccctgggcatcatctgtgtgtccagtgctgtgttaacatcatcgacagctggcatttaggatggacatttggggagtttggagaattggggaggttacactgttgccaggtggcaaagtctcatctgataagattgaaatcagctcctctcatgcacacactgaaccatagcgcctctccagaaaagcttagcattttcccaacccccatgcctctgaccactatattacttgtgtctggagagtgctttctctatcctctctgcaggactgtgttctcacctcacctcttggtggggagaaggccacccctgggagctgctctgccctggtacctgggaccagggccatgcaccattgctttagagaacacctgctccgacccaggtcctgcaccagggatttcccaccagctgaatcagacacagttgctgtcctcagggagcttacagtcacgggtcaataggatactgcagctaggatagcagtccacacagggccagggcggggcactaaggagatgacagtcatttctcctagagagtcatagatgaagtcatatgtcaggtgagtctcgacagatgaaaggaagagtgtctgccaggtggacaagaggcaacagcttgagctcaggaggtgagtcagtgggtgatgccgagagaggcattctcttgatcaattcaagtgaaaagcccaaagctgtttgatggctgagaggatgtgtaggtcaacttaaggagaagagcctaaaacagctctgacaagtaaaaaaaaaaaaaaggcagaagacaagacaggcctatttttgcatgttataaaacaccgagaaaaaaatatcaggatgattgtcatggtcttctttacattttcctgtatttttcaatttaaaataattgttggtgttacctgctgcccacgcactcctccgtctgcagggggcgcaccggccgccaccgctcactccttcaggatgatgggcggggcctcctgggccggtgtggactgacgagtggctggccgccctgtccatcacgacatcccgcccccgcgctacgtcacatgacgcagcccatcatggcggcgggagcgcggcttcccaggcccgccgctccgcagggctgctggcgttgctgctgttgagaggcggcggcggcggcgcaggcgggcgggaaggatggtgtttctgcgactggagcggcaggtgcggaccgggagccggaccgaggtttggcagaagcaacgtgtgctcgggagcaaccggcgcgggtgccactgag

SEQ ID NO: 38757 - DNA, 2300 bp, Homo sapien
ggggctggtgtatggatccaccgtcggattccgtctgcagaggaggacgtagggggccgtcacacccaccaggcctccctgctgtgctttaacacaggcagaagaggttcatggcaatataatagtcaatgaactttcagtttaaattgtgtacatttttaaattgtaagatttttactgtatattgatgcatagtgtgattcaataaattgcttgtaatttaaaaactatttaatattcaaaataaatatagttatatatttataaactctgttggccgcgtttcttctgtgttttgtccaccgtgcaagggccacctgggtgggtggcctggccctgccctgctgtgagcgcccgcagcctgtgttccaggcccctgccctggtccctctggagcttgtgtgacagacctaaactccccgcactcctgaggacataaagctttgtataaccactggaaaaccaaacctgtttagtgttcctgccaccttgaagcatgtctataaaccatgcctttgcactcatgaatttcggaagcattttcatttccaaggacctcatttggcccagcctcaaatgagctttaggccaagagaagaactaactaaccttggctccaagctagcctttctgtgcccgccccccgccccactatggcccctctgagttcccacccagaggtactgagacagagcggcgagacccatgagtgtggagcccaggcctgccagccagcgtgacactcaccgcacccccagcagcgtgcagtcaccgcacccctagcagccccgaatagtccctgagcaagatgctgctttggctgggcgtggtggctcacgcatgtaatcccagcactttgggatgccgaggcgggtggatcacttgaggtcaggagttgaagaccagcctggccaacgtggagaaaccccgtctctactaaaaatacaaaaattagctgggcgtggtggtgcatgcctgtaatcccagctactcgggaggctgaggcaggagaatcgcttgaacccgggaggcggaggttgcggtgagccgagatcatctcgctccattgcacgccagcctgggcagcaagagcgaaactccgtctcaaaaacaaacaaacaaacaaaacaggcgttcccaaggactgcacacctgcccaaggagccccccacccccaccccaactcgggctccgcccccagcccgtaggagccccaggttcccctaaacatcccgggcggcggggcgggggatcccctgggagatgcccgcgttttcgcggagcggctcgtcccggagtgctcctgggacttgggatctgtgtgctgagcctgaatcggggctgcccctccttccggcggctcccagagacctgtttcccattggcggaatgggcccgggccccgccacgagtggagaggccgggcaaggaggatcgcgggaggcatggatgcgggggtgctgtgtcagggggagggtcggggaaagcgggcggggggaggctgtctcgggcacggatatggggtaggcgggtgggaaaggcgcgagtggaaattgagggggaggatggggaaaagcaggttgtggggaggctgtcgggggacgggagtaggggaggtggggacgcaggctgtcttgggggggctgtagcgggagaatggggagagacgaatggggggaagctatctcggggcggttggggggctgtcgggggaggatggggagaagcgtgtgggggaggctgtctgggggaacgagggtcgggggctgtcgggggatggtggggagaggcgggcgggggtggctgtcttgggggacgagggtggggggcagtagggggaggatggggagaggcgggcgggggaggttttctatcttgggggcggggcggaagctgggggcggggctgcgcggccacctggtccgggagccccaggcgccggcctcccgcccgcccgcccgcaggtgccgccactgctgcccagcgcccgccgggacacccggaccccggccccgccccggccccgccccgagggctcatttgcatgcgtccgcggcccctcccggggcggctaaagcgacgtgtccttgtcccccgtgggcagcctcggcgcgtgtggccgcggatccccaggtaacccgggagctgggaactcgggtggggccgcggggaggggacccaggggcaggacctggcggtggggttgtgggggttgtgggggctgtggggaaacccgggtgggggacttctggtctgtctggaggctccacggggcccatccacgtggtgggattgggggc

SEQ ID NO: 38758 - DNA, 2300 bp, Homo sapien
cgtcagccactgtgcccagcaggctgtcacctcttaggagtgcgagtgcctggaggtggctggctctgagactggagctcggtgcttccctgtggggtgttatgggggtgtctgagtgagccagttcattccccagtctccctcgtcacctgccctgttgtcctgccgcaggggtctgcccacggaccggtacatgtggagcgatgcctcggggctgcaggagtgcacgaaggctggcacgaagcccccgtccctgcagtgggcctgggtgaggtcccgctgccccctggggggttgggaatccgccctcccacccctccttgcccctcctcgagtgttctgactgccttctggattcggggggtcccatcctcactgacccactcctcccaggtttccgactggttcgtggatttcagcgttccggggggcacggaccaggaggggtggcagtatgccagcgacttccctgcgtaagcctctccctgcacagggccttcgggctgggtcctgaatgtcagggccctggagtgtgtggcctctggcctcactgctcttccaggctgaaccctgccccctaggcctggccaaggagcagacccctggtgccagccctgctactggagggggaggagccagcagagaggccaggaggggcccaggggagtgctccctgcacacgtggcacccctggcctccatgtgtggcacgggtaggagcaccatggctcccccacgccacgttcatccctgctgtgccaggcacgggctctgggagggtcagatggtggcacccagggcaccagactgaggggcttgaggagggcgagtggcctctacagccttagcagggtgagctctggggggctttgagccaggcccttagtgttgagggacccaacacgagatgttaggtgaaggggcagtgtgagcccctcggagagatgcagtggctgtcacgaggccctggaccctggcggtgcaggtgcacggcgtgggcaggcccttcacggcacagtctcagcctgttggaagatggagccaggacagcctgagctggggcccagagccaggtggcttctgagcagaccaggaccgtcccctcggccacagccaggcctcctggaccaccctccgctcagcctcgggcctcatcctgaccgagggctcttgctccccaaaagggctctgatggggcctggggaggggagggctgagtccccttagcctgacccctgacaagtgactgctccgctccagccccagggaggcccgacccccttccccagggagacccctgcccctgggaggccccaacccccaggaggccctccctgcaggtccccagggctgcactcaaccctgatcctgccggggcagccaggaagcgcctcctgagagccgcgcgtggtgacacctccttctctgaaccccatccatggcttccacccagtccccatgccctgtaacgggtagaacaagaatgtttacatgcacggtccctttccagaaacttccacgaagtggccctgatttcatcttcttcctccttgcagctcataccatgggtccaaaacgatgaaggattttgtgaggaggaggtgctgggccaggtgaggcagggctgcagggtgactgtcacggtcaggctcctggaggagccacccttgagggagctctggttccctgcaccccgggccagatctcctggcctctgacctcagtcccaagggaagaagcagtggggagtagggtgaagagggaagccgaatctgagtaaatgtcagcccaggaaatgcccgcaggctcccggtgctctctggtttcagaatagtttgttttcatgaacaaataagagaaatgtcactggcacactccacctgtgagcgggacagagaacggggcctggctggggctgggggtgggggtgggggcctggctgggcctggatgggggtgggggtggggaggaggccacctctgggcccctctttctacccgccccggggttggctgctttcctcctcctggctccagaggcagaggccctggagcctggtggtcaccttggggtccctgggctgtgtcccctctccactgtacagaaaatgcaagctggtgaccagtgggccctggctggaggtgccccccatcgccctcagggacgtgtccatcatcccggagagcccgggtgccgaggggagtgggcacagcatcgccctctgggccgtcagcgacaagggggatgtgctgtgccgcctgggcgtgtcggagctcaaccctgcggtgagtgccggggcca

SEQ ID NO: 38759 - DNA, 2300 bp, Homo sapien
gtcatggtggagcacgctggagctgggcctgcctgacagcgcctgttcccctgcaagggagtgatgggtctgccctgatttgtccccagtgccggctgcttcttcggtgatgaggtgaggggtagtggcgagtctgcccccagcgacaccgatgcctcctcggaagtcgagagaccagggcctggccagattctccctgcagaacctctagacgattccaagaatgccacagggaactcagcctcaggcctgggggctggcaggaccgcagaagataccgtggaagatgcctgcccagccgagggcagcagggaggccagacccaacacgcaccccggcccggcccccaccccggccgagctgccctggaccaatattgacctcaaggaggccaagaaagtgcccagccactcggccgctggcttccccgagaccaccagcctctcctctctggggctcctcccactgggcttggaggagccgtatggggtggatgaccacccgctgtgggcctgggtgtcgggaggcggctgcgtggtggaggcatgtgccatgcccagatggttcactgtccaggcgggtaagggctcctgcagggcctgggggcatccacatggccaggtgccctgggggtgtggggtgtgggaggaggccggggtcagggggctcgggcaggcctgctgtcctccctggacgcctcactgtgctcagcagctctgagccaggcattgcgctcctctgtggcctccagagaccagcccgaggctgtcaggacctggaagcacggtggccagtgccccttcccctgtctgcagcccctcccctgtgctagcggtggtggctgctttccaggctgaattactgggggagagcaactcatccaacagggcaaagggtggaaggaggcttaacagagagcgtagcttttgagctagaaagggctgatttggtggaggggagcgccgtggcttcctgcccagctgcgggcaggacagtgccccggccctgaggctctctctgccccacaggcctgtcctcctcggtacacatgctgtccctgtccatcacgccggcccagaccgctgcctggaggaagcagatcttccagcagctcacggaaaggaccaagcgggagctggagaacttcagacactacgagcaggccgtggagcaggtgggtgccccggtggctgcgcatgcattttttttttttttccagcaatcattcattgagcgcctgctgtgtaccagctctgagagaaacagatagatgcctccatcccctggtctcccgcccagatgcaggcatagagaaatgagctcagggtttcttcgtccatcctgaagactttggtttgggcctcactgtgttccagactcgttggaggccctggggacccagagacggcagcaacctcagagggtggtgggtggggaagggagggtggccagggaggggaaccacgtcatcctcttcctgctggagggaaccccgggcgcccaggggtgtagcgtgtgattgcaaggagttagcacagagggcggccggagaccccacccctgggctgaccctgcttctgccccactatcctgtggcagagcccggccctcagaggtcaagtgtgggggtgacagggaagtcacacagagcatgtgacctgcctcattccaaaggcccctggacacaagtaggctgtggtttgggttctagctctgccgctggctcactctgtgacaccaaagccaggcacggaaccctcccgagcctgtctccccatgcagaaggcgggatggcagtgcccactctggctgtttgagagagaggaggttgtacggaacagccctggctcagcctgcacctattgggtgtccggcagcgtcactgttatcattagcatagggggagctgggctgacagccgggagtgctgggtgggccctaccccagccctgcctcctcctctgggcacccccagccccgccctcctcccctggcaccccgggcctgcctgtgatggtgtccactgccccggcctgcgcagtcggtgtgggtgaagaccggggcgctgcagtggtggtgcgactggaagccccacaagtgggtggacgtgcgcttggccctggagcagttcacggggcacgacggcgtccgggacagcatcctcttcatctactatgtggtccacgaggagaagaaggtgcccacgggtcccacaggagatggggccagggaggggacacagggctggggtgctagaggaggggtacagaaatgggggtgcccaggggaggggtacagaa

SEQ ID NO: 38760 - DNA, 2300 bp, Homo sapien
aagcccaggagttcaaggtcagcctggacaacatagtgagaccccatctctacaagaattttttaaaaaattatctgggtgctgtggcatgggcctgtagtcctagctacttacaaggcagaggtgggaggatcacatgagcccaggaggtcgaggctgcagtgagctatgatcacgtcactacactccagcctgggcaacagagaaagactctatctcaaaaaaaaaaaaaaaaaaaaaaagacaataacaaatgctagtgagaacatggagaaattggaacttcatacactgctggtaggaatgtgaaatggtacagccactgtggagaacaatttagcaattcctcaagacatgaaacccagaactgccatgtgagccagcacatccactgctgggtgtatatccaagaggcttgaaaacgcgttttagtccattttgtgttgctataagggaatcctgaagctggtcttttataaagaaaagaggtttatgatcgggcgcggtggctcacgcctgtaatcccagcactttgggaggctgagcccagcgaatcacttgaggtcaggagttcaagaccagcctgccaacatggtgaaaccccgtctctactaaaaatacaaaaattagccaggcgtggtggtgcatgcctgtaatctctcagctactcgggaggctgaggcaggagaatcgcttgaacctgggaggcggaggttgcagtgagctgagattgtgcccctgcaccccagcctggatgacagtgagactccgtctcaaaaaaagaagaaatactaattctagatcttcactctcagatatgtggatgtgattggtctgcagggtggcccaggtgtcagctccctggaagcaggtgctgatgtataccttgcacagaggaagagacaggagttcagagaggttctgacttgcccaagtttccacaggcagtcatggtggagcacgctggagctgggcctgcctgacagcgcctgttcccctgcaagggagtgatgggtctgccctgatttgtccccagtgccggctgcttcttcggtgatgaggtgaggggtagtggcgagtctgcccccagcgacaccgatgcctcctcggaagtcgagagaccagggcctggccagattctccctgcagaacctctagacgattccaagaatgccacagggaactcagcctcaggcctgggggctggcaggaccgcagaagataccgtggaagatgcctgcccagccgagggcagcagggaggccagacccaacacgcaccccggcccggcccccaccccggccgagctgccctggaccaatattgacctcaaggaggccaagaaagtgcccagccactcggccgctggcttccccgagaccaccagcctctcctctctggggctcctcccactgggcttggaggagccgtatggggtggatgaccacccgctgtgggcctgggtgtcgggaggcggctgcgtggtggaggcatgtgccatgcccagatggttcactgtccaggcgggtaagggctcctgcagggcctgggggcatccacatggccaggtgccctgggggtgtggggtgtgggaggaggccggggtcagggggctcgggcaggcctgctgtcctccctggacgcctcactgtgctcagcagctctgagccaggcattgcgctcctctgtggcctccagagaccagcccgaggctgtcaggacctggaagcacggtggccagtgccccttcccctgtctgcagcccctcccctgtgctagcggtggtggctgctttccaggctgaattactgggggagagcaactcatccaacagggcaaagggtggaaggaggcttaacagagagcgtagcttttgagctagaaagggctgatttggtggaggggagcgccgtggcttcctgcccagctgcgggcaggacagtgccccggccctgaggctctctctgccccacaggcctgtcctcctcggtacacatgctgtccctgtccatcacgccggcccagaccgctgcctggaggaagcagatcttccagcagctcacggaaaggaccaagcgggagctggagaacttcagacactacgagcaggccgtggagcaggtgggtgccccggtggctgcgcatgcattttttttttttttccagcaatcattcattgagcgcctgctgtgtaccagctctgagagaaacagatagatgcctccatcccctggtctcccgcccagatgcaggcatagagaaatgagctcagggtttcttcgtccatcctgaagactttg

SEQ ID NO: 38761 - DNA, 2300 bp, Homo sapien
aactcgggatagggggacatgggtccccaagcccctgaattcaggaaaactatattgaactttgtcaccacacatgaaaactgcaaggggccacagaaagctcctaattcaatgcctctttttcattttttttcaatgcctcttttaatgtggaaactaaagctaaagaggagataaatggctacagagtgtcacaggcaggacagaacccagggctccctacctctagactgtttctccagcagtctagcgaccactcatcctccttttttttttttttttttttttttgagacagagttttgctctgttgcccaggctggagtgtagtggcacaatctcagctcactgcaagctccgcctcctgggttcacctcattatcctgcctcagcctcccgagtagctgggactacaggcgcccgccaccacgcccggctaattttttgtgtttttagtagagacggtgtttcaccatgttagccaggatggtctcatctcctgacctcatgatccacccgcctcggcctcccaaagggctgggattacaggcgtgaaccactgcgcccggcccactcatcgtccttctgctaatagcaccctgatcttcctctgaggagccaccccctgtgcctggctgagcccttatgcttgaggggggctctgcccacatctccagaccaagtccacaaatgccagtccctcaggcccaagctaaagtcagggtcagacacaggactccacagagccatccggggtgaacaagaggcttctgggggcgttttcttccactggagctggcctgtgtggggcttccccaaacatgaaggcccaggaaaagcctgtgtgcaaccccagaaatgagacagaactagagggggagcaggaataggtccctaggtccaaccaggtgacattggtttagctcaatgtcgggtagtatctagccttccatcagatgcccttttttttcttttttgagaaggagttttgctcttgtcgcccaggctgtagtgcggtggcacagtggcacgatctcagctcactgcaacctccacctccccagttcaagcgattttcctgcctcagtctcccgagtagctgagattacaggcatgcgccaccacccctggctaattttgcatttttactagagacggggtttcaccatcttggccaggctggtctcaaacccctgacctcaagtgatccgcccgccttggcctcccaaagtgctgggattacaggtatgaaccgccgcacctggccgacatctttcttttttctcctttctccatcctaaccttgccagttttctgccaggcgggatacagtgttttcaaatcccagttccatcgcttacaacgtgagtcgctccatctctgagcccgtgttcgcatttgtaaaatgggaatgacgccgccagctctttgggttgctgggaggatgaaatgagaagacccaagtaaagcacttacgtcagtgcccgccaccccgggaggactcgcatattactattaatatattaggccagcttacactgggttttgtcactgacaatagagtttgagcaatccagggcctgttactgacaccacaccatgctatagtcacaaaatcacatatgcttccaggactcctcctcgaaagagtaaagctttaagtgtagtgtgtgctcaagggctacgtttcagttcgatggataccaggaagacacctgttccctgcgtcctctccacgccccaggccgggcgcccacaccctgctcctcctgacgccgcacagccacgcacccaggtaccctctccgccaccccttctcctcgcctgcaggcggtgtccacaccgccctctccgctcctgcagaccgggtcctggagggcggccgggcggtccacgggccggtgtcgcgccgccagagagaacgcggcaactcgcttcagccgactctggactcctgacctggcgcgaccccggaagtgggcgggcgcgcgacctcgaagccagcaccgacgcggcgcaccgcagccaatcgcacgtcccaggtcgcagcgtcctggcgaggctggccaatgggcacggggcctgatgccgcttccggcccaccctcttgcccggtccccgggagggccggtccgctcctcccggacgccgaggacctaccaccgcgacttcgccccgcccggcgcgggcccaggtgagtgcagagtggcgccccagctgcagcggcggccagggccgtgggaaagaatggggcgatgaagggctgggcacgccgccttccccaccacccccaggctgttt

SEQ ID NO: 38762 - DNA, 2300 bp, Homo sapien
cctcagcctccagagtagctgggattacaggtaccccccaccatggccagccaatttttgtatttttagtagagacggggtttcaccatgttggccagctggtctcgaactcctgacctcaagtgatccacccacctcaccctcccaaagtgctgggattacaggcatgagccaccacgcccggcccagtcttcactcttgatctggctgttcatcagtgccaggggccacccctcagttccctagtgtacctggaccacccctcagttcctttttcgaggactgtgggtacgatgactaggacagcaggtacaagatcgatgggaatgggcttcgaagagctggtcttgtgataaagaaatatgatggtcaggtgggcttggtggctcatgcctataatcccagcaccttgtgaggctgagtgaggaggatcacttgagcccaggagtttgagaccagcctgggaaacatagcaacaccccatctctacaaaatataaaaaaaaattagctgggcactgtggcgtgcacctgtagtccccagctacttaggaagctgagatgggaggatcacttgagccccggaggtcgacgttgcagtgagccagggttgcatcactgcactccagcctgggccacagagtgagactctgttaaaaaaaaaaaaaaaaaagatatatatatatatatatatatatatatgtatgtgtgtgtatatatacatgtgaatgatgatcccttattaaaaaataaaaataaggccgggtgcaggggctgacatctgtaattccagcactttgggaggctgatgcaaaaggattggttgaggccagcagtttgagactggcctgggcacatagcaagatcccatacaaaaatttttaaaaattagctgggcatggtggcgtgtgcctgtggtccccagctactgaggaggctgaggtgggaggatggcttgggcccaggaggtcgagactgcattgagcaatgactgtgtcactctactgcagcctgggtgacagagcaagagagcccccccagcaccccctacaaattttttttttaaaaattaaaaaggcgcggttcgagaagagctgtagtcgtcccagagctacagtgcaggtgatatcaaaatgcaggtgagaaaactggagacagaatacagtaacggatacaggtgcccctgaaaaggtgcagaggcgctaaggacgcaagcaatcctgaacgttccaatcgttcgttttaaagttgtcctggccaacccgtgaagccttgtatgaggaaatgtttcaacgagggcgcctgacgcagtccccgaggccagaaaacacccaggtttagatacgggctctgacccgcacctgccacagccaaatccctcccccttctgagcccgatcccgtgttgtcctccaggggtaagcaaaacacctggcagggctgcctgaagattagggaaactgaggagacgcggcaggtgcccagtatttatagttttgtccccaaacgggggagttatttgtaagcactggctactacccccgtcaatcacctaattgtccaaaaaaaggcaaacggagggaatgcgccgcagctgagcaccgcgcaggccgcagctgaggtgcacacccgggtgtgccctttgtattgctggaagcgctggcgatcataggggcagagggctggcgttggggcggcctgggacccacccggccccgccccctctcaggccccgccctccccctcctccaccggtagggggacctcggccggcctgggagatcggggcgtagggggaggtgggggtgcatccgcgagccctaaaggtcatgaccctatggggcgtctctgggtcgtcgtgggggatgggcgggggggggggtctccccgccacgggaggtctagagagcagcggcggcggggcggggcggagtgcagaggcgccgccggcggggcggcttcgggagggcgcggcccctttaagacgccccgccggccccgcccccgagccccgcctcccgccgcccacgtgaccccggtcttgtgactgggcccgggagggcgggggaagcccgcggctcgcgcccgccccgccccgccccgcgtctgcctcagaggggcccgagccacccggtccgccgcgtccccgccgccgccgccgcgtcccccgccggggccgaccgagccgagccgggccggagcggcgggcgcggccgggccgccatggaccacaagccgctgctgcaggagcggccgcccgcctacaacctggaggccggccagggcgactacgcgtgcggcc

SEQ ID NO: 38763 - DNA, 2300 bp, Homo sapien
tgtgaggccaggaggcccagaacacacagccattccccctgctccctgctcccgcccttggagcagcaccaatgcgtctgtaggctgtttcccacagctgcgctcccggaactcctgactgggattggtctggatgaaacgtggtcacttgtctaacaggagtgctgtctacagaggctggatgcgggtgacagttgcagtccctccccgcaatgcttttgcagtctgcataggatgttagaataacagcatgcagatgaccgcgccatgtcttatcaggaaagcgtactgatgtggaggccaagaagctgctggctgagatttcagaactgggtttctaacctgccgtgggccttggacagcggctgccattcttctgtgcctccctttctccatttcacgaggccccgctatccctctacctccccaggaggtcccagcacaggcactgctcaggaagcaccaccgtgaggtgcgaagggtgtgaaggtacgaaagacaggagggcaccacaggctggcggcaccactcccctcgcaggccagccagaagccaggcagcagtgtggaggctcatcctgcctctctggctggtgcccgaccccagctcttgagccccccaagtcaccgcaacgcccaggccttgtgtttttgccgaagctcgtgcctcagagcctggctccgacgctttcctcctagaagcctcccctgatgcgtcccaggaaccctggcctctccccttgtcctcaccccatgcatcgagcgctccctggactccacccctgcgtgggtctcattcctctttgtgtcctgagggcttggctctaggccgcccagtagaggccggctggatgaatgctgatgggacggtctcatctctgtccacaaaacccctcccccacagccataccctcactgccatgtgactgtgttgacagaagtctgctggcctcagaggtctgcggcccaggaaatctcagctgccatcagtgataaacatgacctccctgtgggcgtcacctccacccctgtgctggatgggccttctcatcgatttcagtgatcatgaagttaatcagcagtcagcactcaaacacgtgcagaatcaatgacaactgaaatgattagaatccgcataaggagggcattctcatgaggtatctggggcttttgaatgttcttggatgaaaccagaaatgaaaggctgctaaaatgaaagcctgaaagccttctagctttttttttttggtatatatatatatatatattttaagtggagacgggatttcaccgtgttagccaggatggttttgatctcctgacctcgtgatccgcccacttcggactcccaaagtgctgggattacaggcgtgagccaccgtgcccggccaagccttctagctttcaagacagaaagggggaacctgaagatgatggtgtgtgtgtgtgtgcacacgcgcgtctgtgtgtgtggtgggggttagagggagggtggtcttggggaagtgagctttggcaggtgcggcctgtggaggcagccggggactggatgactgggaatctctcccgtggaggggacagcctgaagctcgcgggtgtgagctgagaataccagctcaggtgggaagggtggtggtggtgtccacatgggccagctgcgctggtggaggctgcagggcaccaggtcaccccctgcaggcagccccagctcagcccaaccctccaggtcagggccctcggggacagtggtgtgcttaaagctctgctgcccgaggaagtgggaagccggtaagaggcgtgcaccgtgcgctggcagtctcccgacactgacagaatgtcatgatccagccaacgaagaggtttaagaatgaagccaggtcacctttccactccccagtgctaagtaaggaggaatctgtcattactgagtacactgatacttacaaccaggcttcttccatttatccaattccctgcagtaagaatggcggcgacagtactttcttcaccaagctttatccacacgataaatacgctgacaatgacacgttttcattttctaacactgaagactatccagggttggccaaagtgtcagtgctctcacttacaatgccagagctgtgatttttgggggcaagattcttttaccttaaaaggcattatccaacctcaataaagcagcaggctaggcgaacatcaacagctactaacatcacaaaaagagatggacgtccacacgtgcctcctcactggtgaaatgctccagcaaaacacaacagtcaaacaagcaaaacagca

SEQ ID NO: 38764 - DNA, 2300 bp, Homo sapien
aaatcaatgcaaagtcctttggacagtctctaggcaataactactgttagtatctgatctggaatacggatttgggggttttcggcatggaggtgctcagcaaagcccatcagtgtatttcaagccatgggagtggatgagatggcccagcacaggcaggaaggatggacccagggtgactcccaagaacactgatgtttaattgatgggcagaagaggggtgcaaagagctggtgaggcagaagacaaacagagcacaggtcaagcagccggggccagagaacattccagaaaaagcatacaacagcgttaagggctgtaagataagaacggtaagataagtgtaagataaggacggaaaacacatggcttgggtttagcgaccaggaggggcagggcacagggagggagtttcagagggctgcaggactgcgaggagtaggtggcctgggctgggtctcctcacagcagcaaagctcggggacaacagaaatcacggcagacagcactgtgagccgcggtctcatctctgactagtccacgagagctgaggcttagggcagggcctgcgacacagctagatggtggtgtgttacagaaacgacaaggcaggggtttctgtcaccgggagagctcagccacgttcagggctaccttggcgtgggcacggtcactgcttctgtctcattttcttccagcaacttcgtgtacgacgacgggaaccaacccctcctaccggcaaagagggagaaaagaccctatcagcagtagacatgtggacggcaacctccctgaacaacctggtgagagctcagggcagacaggtccactgctccagaaacgcccatgtgtggaggaaatgaaattaaggcttttaataggtaaatatggactttcacatacactgaacaatgtgtattgttaacaatttttttttaatagagacagggtctcgctctgttgcccaggctggagtgcagtggtgcgatcatagctcacagcagcctcgaactcatgggctcaagcaatccccctgcctcagcatccgagtagctgtgactagaagtgtgcaccaccatgcctagctaaaaagcaatatatgttgtatgtataacattaatttgatttggattacccctttttttttccatattggttttatttaatacatctgaacaatctgtctagaaaactgacaagctagttacaggaaggcttgtgcacataattatggctgaaattaagaggattgcattcaaactacctacgtgctaaaccttaacaaagtatatctgatatgcagattatcttcaataaatcaaatgctaattttatttatttttttgagacagagtcttgctctgtcacccaaggctggagtgcaatggcgagatctcggctcactgcaacctgcgcctcccaggttcaatcctgcctcagcctcccgagtagctgggattacaggcgcctgccaccacgcctggctaatttttgtatttttcgtagagatggggtttcaccatgttggccaggctggtctggaactcctaacctcaggtgatctgcccgccttagcctcccaaagtgctgggattacaagcatgagccactgcactggccaaatgctaaattttttttaaaaacaaaagaatgtttaaactactttcagacaggtgacttcatacgctctaataactatgcatgcaccaaatgtatctctacatgcacagacatacagaaaatagcctgggatcgaataacttcagttaactaaactagaactaaaccataaacttaactttggctaaaatgtgagcatgtccacgaagacagtttgcagcttggctgctctggaagggaggggccgtctggtgccctgcggggaccatcacgcccagacttacgccttggacacgtcgtgttctccatagagccagccatccttctcctcggggatgagcagcgtgatgacatctccctgtgcaaagctgagtaaggtcttgttggagcccgcagtgtgcgggaagatggtcttcactttctgcttcttcatcatgttcagtcccgttgcaaccgaaactgatcgctgtaaactgggatcttcggaagtacctgttggagggagtgtagcagtaatggcttttcaaagcatgagaatcaataggcacattccaatgagcaaaccccaggaatccacctgttctcatcttgccaacaatgctccttccacggaaactgaccctgtcctatttcctcgctttgatcattgcccagaaggaacagggactgttgagaaacag

SEQ ID NO: 38765 - DNA, 2300 bp, Homo sapien
tggtgcctgcctgtaatcccagctactcgggaggctgaggcaggagaatcacttgaacccaggaggcggaggttgcaatgagctgaggtcgcaccactgcactccagcctgggtgacacagtgacaaaaacaaaagttggagccagtgactgtctgcagatgttgccggctgcttcactggtcagaccccgtccttctgcacagtctttagcacccaggaccctcgagacctgtgccatggccccaacccatccacgtggggtgtctcacaggcccccatggtgtgaaggttgcggcagtcaagctgtttgtgagagagagccctggaccacagcgtgtgaagctattgggcaaaagaacagagttttccagaatgatgactaggatggcccagtagaggaagatgatggtctgcaggcatttgcctttgaaggaagtcctgtcagttaactaaaatacacagttaaagtatgtaatactctgtgcatcccagtgattcagatgactctggttcttattggtaaaagcagaatgaaaattgctggtggaggattgggcgcggtgactcatgcctgtaatcccagcactttgggaggccaaggtaggtggatctcgatgtcaggagttcgagaccagcctggccaatatggtgaaaccctgtctctactaaaaatacaaaaattagccgagcatggtggcacgcgcctgtaattccagctgttcaggaggctgaggcaagagaattgcttgaacccagccaggaggtagaggttgcagtgagccgagatcacaccactgcactccagcctgggcgacagagcgagactctgtctcaaaaaagaaagaaaactgctggtgggttcaacaccagcgaagtagagagtggcaggttaagggggcgcaggtttatgttgtaatcatgaagaatctgcaagaataaagcagaaagagatcttgcattgttttaaattaaagatgcttgttgtattactagcctgggaaaatttgaatggaaaaaaaaaacggccagaagcagtggctcaaacctgtaatcccagcactttgggaggccaagctgggaggatcacttgaggccaggaggtcaagaccaggctgggcaacatagcgagacactgtctctacaaaaaaatttaaaaatgaacctggcatggcggcgtgtgcctgtagtcccagctacttaggaggctgaggagggaggatcctttaagcctgggaagtccagactacagtgagctgtgatcctgccactgcactccagcctgggcaacagagtgagactctgtctcaaatgtatatacatacatatatatatatttttttctaccttttttcccctggagtggaaatatcagcctgtgtttgaatggagacatgaacagcacagcctcgtgctcatgggtagagagtatgggacaaacctgccctagctggttcctggcccagccacttgccagctgtggggtctgtcctgtggataataaatagcagcaccttcctcctgggagcctggcgggatggcagctgtgagacattgagatcgtgactggcacctggtgaggactctgtaaatggaactcatcctcaccttgtccttcttaggcctgggggtgagaagctgagcggccagcatggcaagaccaactgcatttccagctttcttcttttctttgtggacattggcagttgggtttgaactgtggccctagcctgcctttgcgattggaattgcgagggcagtttggcgttggagcggtttgtctctctaagaagagccatcctggctaaagcagtgcagatcaacccggcacacaccgccttgtccttgggcctggaaaagagcccgcagccgcagggatcctcttctgcacggtgcatgccttcaggctgcacgctgcctctgtttctcaacagtccctgttccttctgggcaatgatcaaagcgaggaaataggacagggtcagtttccgtggaaggagcattgttggcaagatgagaacaggtggattcctggggtttgctcattggaatgtgcctattgattctcatgctttgaaaagccattactgctacactccctccaacaggtacttccgaagatcccagtttacagcgatcagtttcggttgcaacgggactgaacatgatgaagaagcagaaagtgaagaccatcttcccgcacactgcgggctccaacaagaccttactcagctttgcacagggagatgtcatcacgctgctcatccccgaggagaaggatggctggctctatggagaacac

SEQ ID NO: 38766 - DNA, 2300 bp, Homo sapien
gatcatagccgaggccatagtccagtctgtgctttctctctctccccatattctaccacagtcctcattccgattcctcccctgcagcctctcagttccccactagaattccttttttggggggcggggagacagggtctcactctgtcacccaggctggagtgcagtggcgctatctcggctcactgcatcctctgcctcccaggttcaagcagttctcccacctcagcctcccaagtagctgggattacaggcacgtgccatcatgcccagctaatttttgtatttttaatagagacggggtttcaccgtgttggccaggatggtctcgaactccttacctcgtgatactcccacctcagcctcccaaaagtgctaggatgacaggcgtgagccaccacacccggcctggaattcatttttatctggccgctgagctgtaggatggtccgccggcacatcttgctgttggtcggcattgtttgatggtggtggtaacggtggttccagatgagtctatgtgtttctccatttcttaggtgtcagaccctaggaaacccgtttggttcctgcagataagttggcagagagaggcccttgttcacctttatcagatgtcacctgtagaaaggtggcagagagctggcgcactgccactcactgcagagatatgattgcaaacccgggggcgtgattgctgccctcggcggtgaggcttctctgtcctggagcatcctgcccatcatgtgactgtgcttggtttcaggggctggtgtattcccagcagaggcagggctgagcactcttcctgctgcgggttcccctggcgttagtattttccaaaacattgtaagaactaacgtgagaaaaaagaaatagcctttatctctcgtgcctgacagataatcagattactctggggattcgataaaaataaatcattttttattcctagagttagctactgtgatgaccgaagtaatcatttgtgagacaatttcaaaatttgaatcagatatatagaacttggcttagggaaaaagtgcatatagaaagggccacgtgggccaggtacagtggctcacacctgtcatcccagcactttgggaggctgaggtgtgcggatcacttgaggtcaggagttcgagaccaacctgggcaacatggtgaaaaaccctccccacaaaatgtcccaaaaaaatagctgagtgtggtggtgcacgcctgtagtcccagctactcgggaggctgaggtggaaggataacttgaacccaggaggtggaggctgcagtgagccaaggtcgtgccactgcactccagcctgcgtgacagagccagaccctgtctcaaaaaacaaaagacagaacagaaagactcatgtgaatttgaacagagtttgcatttgtctgattaattatgttgtagaagctgtttgctctcagctgtgtccccctggaagccactgtggggaccctgttgtgctcctgatgtgtctcagggatgatgcttagagaccctgaggacagtgtatttctgtgtttccctgttctgtttcacttttcctaatactttacaaaactgtgcaatgggcctggcgcggcggctcacacctgtaatcccagaactttgagaggccaaggcagttgatcacctgaggttaggagttcaagaccagcctggccaacacgatgaaaccctgtctctactaaaaatgcaaaaagttagccaggcatggtgatgcacacctgtaatccagctatttgggaggctgaggcaggagaatagtttgaacccgggaggcggaggttgcagcgggccaagatcgtgcctttgcactccagcctgggcgacagagcaaaaactccatttcaaaacaaaaaaatacgcaatggcttcccgctaacatatctggttttgttcccaggacatgtcctcatagagatttcaagtacccacaagaaactcaacgagagtcttgatgaaaatgtacgtgatctgtgtttctatttacaaaatacactcatttcaggttttagaacttattttgcttaaaatctcaaacctggtatgaatttatttccttttgttaacagtttaaaaaattccacaaagagattatccatgagctggagaagaagatagaacttgacgtgaaatatatgaacgtaagtgcatggttttcctccagccccagccttgggctgcctgacctcccagcctggggagaactcgttcccactgttgactcatcagcagcagacaggagagaagctccgtgttgatgatgcccagatgcatg

SEQ ID NO: 38767 - DNA, 2300 bp, Homo sapien
ggcccaagctggaatgcagtggcaccatcacagctcactgcaacctcttgggctcaagccatcctcctacctcagcctccggaatagctgggactacagatgcacactatcacacttggctaatgtttttaattatattttttgcagagatgggggtgggctccctatattgcctaggctggcctcgaactcctagactcaaccagtcctcctgccttggtctcccgaagtgctcggattacaggcatgagccatcctgcctggcccccagatagaagctttttgtttgtttgtttttgagacagagtttcgctcttgtccctcaggctggagtgcagtggtgctatctcagctcactgcaatctctgcctcccaggtttaagcaattctcctgcctcagcctcccgagtagctgagattacaggtgcacgtgctaccatgcctggctaatttttgtatttttagtagagacgggggcagggcggtttcaccatgttggctaggctggtctcgaactcctgacctcaagtgatccgcctgccttggcctcccaaagtgctaggattacaggcatgagccaccaagcccagaggttttaaaaaatcagaataagacctctgcccttgttgggtgcgggtctcaggtagctaaatggtggttcttactggggagaaggctgtcacccagcccaaggtacataatcctggaagagaggcccaaagaaggcagctgcctcacccttgggcagggctgaggccgggatggagacaaaatagggagcccaggagccacacacctccacagagtttgagtgatgacaagaagagaggcttccctaacacttcagctcaggtggttttctaaaccctacaacaatctcgtgagtagcatggttacactgcattgagttaaaggtcgttgttaatgtaaagtttaaaaatgtactactgggccgggcgcggtggttcaagcctgtaatcccagcactttgggaggctgagcagggcggatcacctgaggttaggagctcgggaccaacctggccaacatggtgaaaccccgtctctactaaaaatacaaaaaaattagcctggcttggtggcacgtgcacctgtaatctcagctactcgagaggctgaggcaggagaattgcttaaacctggggggcagagattgcagcaagctgagagagcaccactgcactccagcctgaggggacaagagtgaaactctgtctcaaaaacaaacaaaaagcttctatctgggggccaggcaggatggctcatgccaggcaggagaatcgcttgaacctgggaagcggaggttgcagcaagctgagatcgcaccactgcactccagcctaggcgacagagtgagactccatctcaaaaaaaaaaaagtactaacatttcggtaactagaccctggcatttattaattttttgatatatcaggagctttcaaaactgcaagtggcagcccgttttctccacctaggagggccgatgcccccacgggtccctctaacttttggggtcagtgagcggcggggcaagaagagatcaatcagggaaatcaatacaactggggaatgtggccccttcccttggtccccaaaacgcagggcttgaaggaagccctcatggaggaagtgggcctcggggtccccggggccagcaccacgcgaggcaaacaagggctccaggaccacagtctaaacacccccaggctgcccttgccctagcaaaacagcaaagcgagcagcccactccacaccggtccccactccagggtctcgggccctacgtcgccggagctctgggagagccgcgagggggcgcaccgtggcctcgctgccctgtccgccacaggtggggtgaccccgcccactcggggggcccgcttccctctggccacgcccattccagctgcctggccccgcctcctccccgcccaccccggccgggccccgctcaccaggccgcctcaggtgggtacgccacgcccctccggccctgcggccccgcccccgtctgccccgcccgcctcaggtggggccgcccggcccgcccagcttcctctggcggcgtccggccgcttctcctctgctcctcgaagaaggccagggcggcgctgccgcaagttttgacattttcgcagcggagacgcgcgcgggcactctcgggccgacggctgcggcggcggccgaccctccagagccccttagtcgcgccccggccctcccgctgcccggagtccggcggccacgaggcccagccgcgtcctcccgcgcttgctcg

SEQ ID NO: 38768 - DNA, 2300 bp, Homo sapien
cgtttaggagtaattatattgggatatatgctatttttactcttgtacactgctttctttgttcaggaggaaattagaattctggaaagatacttgattttgtttaattattaaaggaacaagcttctacttcaagtagttgcaaatatgaatgtatcagtctgtgtgtcaagaaaggatatatggaacaatacaggaacgataatactctattgtcacatccaattaagggccacctaggtctacaagtaaagaggaacatcaaagctatgagtgaaaatggaaaagtcacatcgttatctgaataattttgaaaacgtctggatttggtgccttatgaatcatctgaaatgtaacaaggcataaagtgctttgcaaccctgttgccttcattattgtaatttgtgcatatgtaggtttatttgaactttttcgagttttcatccagctgaaaaaggatgtaggaagaatgagtccagtcaaggtcatacttaacaaggtgaaactgacacctcctggggatgcaggctaacagaaacatgagcccattactcaccccaaatctcccatccatacctttttctgctaatgaatattcttacctgaaccatcattacttccattgtcctctgctttggataccttgcagaccaggttcctgtctctcatttttatccacgaagagattttcaagaatagaacttttcttataatttagcaataatgtccttgaaaaccccacaactatttacataatagaagctattgtttgaagtgcaaagcaggtcagaatttggtttctagagattaatcactgcagtctagtttatattatcataataatttcatttattttggtacaatttgctttcagaatcaacctcggcttctgcgcacaagtgacaaatccatttgtttgtggtataatggataacgtgattaatgaccttgcaacaggatttcttaaaaacatagagaggaaaagaaataaagatttccatttataaatgtgcagtaaaccagctcagtctgtagctgtgcaccaaaatccctctgaacttgttttaagccacagatttggagagattctgaaacaaatttgctcctgacttttgggggtttctgctcatatctgctgtctccaagaagctgagggcagtggcctcacttcgaggaagtggtgacactgcgggccctcctggttacaaggaccgggcactgttggaccacgtggctccatcatgatgactccagttagatgtcaccccgcccctgagctcaggtcttgctgaataaggtcaccgcccagggggcagtcgatgaacacgcgcgcgagggctctgcgagtggcctcgtgactttgtccctaactccgggtgtcccctccttcccatcagcgtccggcgcctggtcctggtcccggtccccgaggcccccgggattcttcccgagcgttttccgagttggcgcggggggtggaggcggggccatggagcgcgtcccggggaccgttgcatccggaggcggccgtcgtgcggctccttcccgcctcgagagtgaggtggccgggccttgacgagaaggcccacgcctgccgcgggggtggctcgcgatggcagtcggggttcgagtcccgcctggggggctgctcctgctggagaaaacgcctccctgagggcggcggcaaacgcgcagcgaggccccgtgccgcgccagaagccaccctgagaaaggggcaccgggacaccgaggggttcccactttctcctcagcctgtgacgcccgcgtcctcgggtgggttcgaggggcgcctgggcacggccagccgaggctctcgagagccccagtgtcgttttccacctcaggcctcctttcctgaggcagagcccgggacctcgcgctctcgcctcaggctccggcccacgctcccgcccggccgccaggcgcgcaacggaaagcgcccccgccccgccccgctccgcccactgcgtgacgcgcacccggccgagccaatcagagctcgtggcgcgcgccccacacgccggccccctccgcccctcagcttaagaaagggcgcgcggacccggcaggccagagtgccgagcagcgcggtgggtgcggctgtgagacggcaggagacttctgccccgcggtgcacgcgaccctcgagacgacagcgcggctactgccagcagcgaaggcgcctcccgcggagcgccccgacggcgcccgctcgcccatgccgagctgagcgcggcagcggcggcgggatgctggcgctgctggccgccagcgtggcg

SEQ ID NO: 38769 - DNA, 2300 bp, Homo sapien
agctaagaaggttgaatactatccaccacttttcaccccctcccccctcataaaagagcggtggagagagagagcaagggatctaatgaaaatttgtgaaagaaaaaccatgaggtcaaagaaaacctgcaactcagggatgaattagacgaattttatgggaattgcacttggacaagattacctatttcctcctggaaatacaggaaaggggtctcttgtccatcaggttgatttgtgtcagagattttcaatgtgtcctaaattgcaaaagaaaaagaaaataataacaaaagtgaattaattatttggaaatcatgtgtggttcccattctagccaattgcacccttgatgtggtcaaaatcacagtggctaagagtggagttgggaaacatcttctccctcacccgtcggggagacttttctacccttcccctttctggagtccatgaatcagggatttgtaagtcagaagtccatgtactggactattaattaattctgggttgtgttatccagactttagaggtactctttggaagtgttttgggtagtctgcatattctgtgtgaaaggactggtgtagccattttctagaatgttcagggctgcacatgctgtgttgctggaaaaggtaggtgtttcttccatgggccaagctttggggtgagtgccccatctctttttgcttttgccccttgagctctgggtgacttggggggcccttggagtcccctaaacctctgccttggctgctccataccccaactccatgtcacatggactcccaaacatggaaagatgaatttgtttgtttgagatgcagtcttgctctgtcacccaggctggagtgcagtggcacaatcttggctcactgcaacctccaccttctgggttcaagaaattctcctgcctcagcctcccaagtagctgggattacaggcgcctgccaccacacctggctaatttttgtatttttagtagagatagggcttcgccatgttggccaggctggtctcgaacctctggcctcaggtgatccacctgtctcagcctcccaaagtgctgggattacaggtgtgagccaccacgccggcctggaaagatgaatttggtgggtagagcaccaggccctgtgattggttccttcagccacatttggcaaaggcttcctggtccatttccaccctggatgtcctggccatccctgagacccctgaggaacaggggcagcatcacccaggggctgtgacacacctgattttgaaaaaacagactgagaaaaagtgtccttggagctggcaggtggtggtgggggagtcggcgggctcccatgagctgggccagtgtctgcagcaatgtctgcagcagacacagcccctccctgccccccatcccccctcccagtcccagctggctgccctcctgatccattcccctggcaaccgatctgcgtgataacatgcgtctgtctcactgcagatgctgtttggccattagcatgcagccgaatgtccctgctacctgccagcctcgctcaggcccacgcttctcagctggggtggcagggaggggatggggaggagaggggtgccaggagttagggggataagggaggaggtggtctctcatccatgcacctctctgtccacagcctggccaaatgctgcctcccagccaaagtggggagggagagcaaagcccaaccagggtagtacagactggttgggtggcctcaggcagcagcagtgacccatgcgggcttcaggtccctcaatatcatatacccactctgtttgcgtggaaaagctcccatcacagcttctggatttccctctttggggttaagacactgcaggtccccttttcaatgccagcattcccttggaagtgaccagctctcggcatcttgactcaaatgacttgatttttatttatttatttttgtagaaagggtctctcactttgttgcccaggctgaagggcaggggcgccatcatagctcactgcaacttcaaacccctgggctcaagagatcctcctgcctcagccttccaagtagctggggcaacaggtgcacgctaccatgcctggctaatttttaaatttttttttttgtagagaatgggtgtcgctgtgttgttcaggctgatctaaaactcctgggctcaagtgaccctctggcttcaaagcgctgtgattacaggtgtgagctgactgggcccggcctcaaatgcctttataatttaagaaatggctctgaaaaaaaaggaaatacgtgatgtgggccaaagcagcg

SEQ ID NO: 38770 - DNA, 2300 bp, Homo sapien
gctctgttgcccaggctggagtacagtggtgcaatcttggctcactgcaaactccgcctccaggttcaagcaattctccttcctcaggctcccaagtagctgggattacaggcgcctgccaccgagtctggctaatttgtgtatttttagtagagacggggtttcaccatcttggttaggctggtctcgaactcctgacctcgtgatccacccgcctcggcctcccaaagcgctgggattacaggtgtgagtcaccatgccctgccctgtctagcccttttaacttttcataggggctcactcaaatctattctccctccattccctgaacatagcagtggggccagtggggcccattcttagggaagctcacagctgtcccagagccaggggccctttagaccagtagtccccaacctttttggcaccaaagacaatgtttccacgaatgaggggttggagggatggtttcgggatgattcaagcgcattacttttattgtatactttatttctattatgattacatactcaccatcatgtagaatcagtgggagccctgagcttgctttcttgcaactagatggtcccatctggggatgatgggaaacagtgacagaacatcaggcattagattctcataaggagcacgcaaccttgatccctcacgtgagcagttcacagtagggtttgcgctcctatgagaatctaatgccctgctgatctgccaggaggtggagctcagcgtggctcacaggccctgctcacctcctgctgtgcagccagttcctaacaggctatggactggtactggcggccaggggcttggagacccctgctttagacgccttgatgtcaatgcactgggtggtgcagtgatggtccatccgtgctccacgggccagagaggaggtcaaaggccctcactgtgtgggaggatccctcgcccaggtagccgtagcaaagcggaagcatagctgggaccagaacccaccgggcttccagcgtttaaggccagccaggcccctccagcttctaggagagcccagccctgctcctctaaggcaaatggcagtaactgtgtaggctggtcacccctcaccgcagtagcctgactcccacaaggccctcagtgacaaagaagttgccctgggcccagatacgagcaggagccccatcttaacagcagctgtgagagggtaaaccgggggatgacatcaagcccacggcaggggccgggtgctcaggcccctctatcaagaaggggcaagaggctgggcacagtggcttacacctgtaatcccaacattttgggaggctgaggcgagaggatcacttgaggccaggagtttgagaccaacctggccaacatggtgaaaccccgtctctactaaaaatacaaaaattagccaggcctggtggcgggcacctgtaatcccatcttactagggaggctgaggcaggagaatcgcttgaacccgggaggcggaggttgcagtgagccgagatcgcgccattctgggacagagcgagactctgtctcaagattaaaaaaaaaaaaaaaagaaaagaggaagcagcagcagcagcagcagcaagaggaatttcgaggcctttcgcccaacgcctggcgcaccttaagctctcaacagttcttgaatgaggagtagcatctcggagccacgagcgtgcagagagaaggcacctggaggagagccccaagggacctgcaggcggcttgcagcgcagcgcacgcccctggggacgctgagtcagagccggcggcatcggatccagggcggggaggggctcgggggaagggaaaaatgcgggtgcggggggcgtggtttcgggtagtggaggggaaggatgcggccgggggtggatttggggtggggagggatgcggggaggagccagggcgcaggaagggagctctggaacccctagaggggaagcaagctgggaggggcgatcgtggactccaggagggcagggggcgcggccgtgggaagagacccggagagggaggacgcggccgtggagagggacgcgggagcaaggggcggcgggaggaggaggagggcgcgcggcgcggctgacgtgggccggggtcgcgcagcgggctgtgggcggcggcggcggcgcgcagcgacagagcgtcccccggcgaggacgagcgagcacggcgcccgcacctccccgcaccgcccgcgctgcgcgcccggaggagcgaccgccgcagttctcgagctccagctgcattccctccgcgtccgccccacgcttctcccgctccggg

SEQ ID NO: 38771 - DNA, 2300 bp, Homo sapien
ttttagtagagatagggtttcaccatgttggctaggctggtctcaaactcctggcctcaagtgatctgcccgcctcagcctcccaaagtgttgggattacaggtgtgagccaccgcgcccggcctattcctttgttttttagagatagggcctctccctgtcgcctaggctggagtgcagtggcatgatcatagctcactgcagagtagaactcctgggcttaagcgatcctcctgccttagcctcccgagtagctgggacttcaggtgcatgccaccatgccctgctaattttttaaatattttttagagatgagggtctcgctgtgttgcccaagctggtctcgaattcctggcctgaagcaatcctcccacctcagcctcctgaatagctgggattccgaaaaaatctccaaaaatcctgaaggattttaagcagaggagtgaatgtgatctaatttacctgatcaggatgaagttgacactgtccctcacctctaattcaggagacagatgagaaaacaggcaaaaatcatgaaagtgtgatgactaatttgataagacgcttaggccacctgaaagtgcagggattttgccaatgttagggccaggcttgactgtaggtctttatcatatgcaattgagccaaaacttattttaaaaaagcgtctacagctgttttcctaactcccctcaaaaaacaatattaaacaatcgtttagcacactaatttcagccctcaaatatttcagtcttcaactttggacctcttatttttttttatcttctgtgacaaagtctcgctcccacctcagcctccccagtagctgggaccacagatgcctgccactaagcccgactaatttttgtattttttgctaagacgaggtctcgctatgttgcccaggctggtcatgaactcctgaactcaaacagtcctcccaccttggcctcctgaaatgctgggattacaggcatgagccaccacagccggcttggacctcccacttttttgggggcagtggaggtaagacaatagcagattttgcttgcaaacaggcaacctcttccgtgatggaagggctattctgagccattttgtttctcctggggcagaattaactggtactaaaaacatccattcacaatcccagcatttcagctgtggccttgttctcgagtggcaacattaaacgagcaaggagcttgtttcagaaaagagcacctcccctccagggtatccacgggcactgaaacatttatttattgcagggtgtgaaatgtgtctaggaagggaacataatgatcttggtgggttagtgataaatggggtgagggtggggggtaggtgaaggaaggtgtaggaggtggaaccagggcctggaggtggccaagttcatgtcatgcttccacactctgtccctgtaacatggtaaccatggcgcctgactgtacctttcccttggagacaccttttggtccggcccatgccacctcccctggctccatcccactctatcccttcattgctctggcctggcctgaggcctctctccatccagttttgatggaggtagctctgcctgccatgtggatccagcctcggaggtaaagcagctgcagaatcaatggggcctttctgcacctgggcggccacttccagaaagcccacccggactttcttttactaacagggtctcggtccatctccagccgtcaccttcccaaagaccctcctggcctcctctccattctgcgggccgagaagaaccccaggagagcagcggggaccgggagcgaggagtgggggtggcaaaccctaccctgcctgccaccttcagtccagtggtggacaatacctggaccccatagctgccaactcgggaagccgcgcccccccccaggtgcccaccgcccccagggtacccgggcattccccgaggcctggctcctgggaggagactcagggaaaaaggagctcctagaacctgggcgccggcccggccccgtcaaggctgtcggggatttaaagggccgggacccacccggacggcggacgcccctccccgtgcccgcgcaggccgcacccacttgggggcggcgcgccggggcctggtgctcggtcggcgggtgctgccgctttaagcgggggcgggactgcgcgcggccgagcggttgcgacgagggctcggctgggggtcgccggggtcgcgggccgggcctgcaggagccgggccgccgaggtcggggtaagttggcgggcgggcgtccgaacggccccgggaggtgcgcgcggccctc

SEQ ID NO: 38772 - DNA, 2300 bp, Homo sapien
ctgcttctaatacaaagatttgtaatttgtttttgctttttggtagagacagggtctcgctaggttgcccaggctgctctcaaactcctggcctcaagtgaacctcctgccttgccctctcaacgtgctgggagccactgtgcccaatcaacacacagtaaagtaagtcttgggccttcacaaccaaaacataaccaagttactatttactgcttctatcaggacaaagctctccacttgttttctgtttgtctgtctttgggagaaattctttctctgtactgggaatgcctctttggcagcccctgtaacctagactggctgtcaggcaacgtcaccactaacgatgtactgcgtgtctgtctgttcctctgggacttgatctgagaccaaaacagggcagtctggaaaattccctgcaaaaacaaaatagatctcaaaactaacaagatgacagatccttaaaagatgaaatgaatattcaacttctgactcgatatttccagggggaagctcatttccagtatttgtgcaaagaaaaagacatcctttaagaagctatcgtagcaaaccaaaaaatacaaaattgtgacccagaggatgtacagtgacttctggctttctagggtaagcaattaaggatggtttctgtctctacagagctgggttccagggcgggcactcttttttctggagcttcagagcatactttccacatccatctaactccaagcactaaactactaaaggacaaaagccttgtgagtagggtgtgcagccaacatggtgcgttcccgtaatggacgccacagccatgcttggagcaggaccttggcacccaccatggtccaggaccagctgcattaccccatttcacaggtgtggaaaaccaagttagaatatgaagtcacttgccccaaatcacatgtcagagggtgtcacagctagcatctgaccccgcatccttgggttccaagacaggaaccttccatcatctcacggggcatctcagcagcatctagaactggttcccccaaggaaatgtggctactcgtctcaatggatggttccaggacaaagtgtacgcaagtgattgtatttgtaaaccatacaggaaataatctactatggagactcgtttttaagttaaaatttaggaagaaaacatttgcaatagacaaggtacgtgtgtcataagcaggattccaagaagatggggacccagaaatgtcagataaagtgaagcccaatacatccaaactaaaaactatacaattttccttaccaacaggtgtgtgtacataagacctggcagagaggaagacttgagcctgctggagtggtagccacactccactgaaacaccaatattaattaattacatggctcataacaaaattagtttcataagagactctgacaacctttgtgtgggacgctgcaaagtacttgtcccatctgacacaagcactactgccagtcattgagaattggcataaatgaaacagagtcctacaaatcggaaaacagctttaaaaaataacatgaggccgggcttggtggctcacgcctgtaatctcagcactttgggaggccgaggtgggcagatcacctgaggccaggagttccagactagcctggccaacatggcaaaaccccatctctactaaaaatacaaaaattagccaagtgtggtggcgtgcgcctgtagtcccagctactcaggaggctgaggcatgagaattgcttgaacccaggaggcagaggttgcagtgagccgagatcgtgccactgcactccatcctgagtgacaaagcaagactgtctcaaaaacaaaaaactaaatcaagagaaaatctatatttaaattttaggttatatatactgtaagaaagatgtatgttaagtttagcaataatgttggccctcttacaggtatttttttacatggccagtaaagccgctctatacagtgtcgtaatgtcggggggaaagtctcttgcttgagggcttcagaattgtcattcaactctagaatttctccttctgtctcaggtgctgtggcttttgagttctgatgatgacaaaaatattttggcagagactccatctcaaaaaaaaacaacaaaaaaaaaacgtgaacgtcagcatcctctggggctcccaggacgccgtgacttcctggccgcggtgcttaccaggtatgggccttcggaaggttgtctgtgttcgcgtctatcaggtggatggtgaacagccggggccctgccgcgcctgtagaaccttacaagacaacattc

SEQ ID NO: 38773 - DNA, 2300 bp, Homo sapien
ggaattagataaaataataaaaactacacaagacaaaacttcctagtactgaagagaaggccccgtacgtggtctgtcctctgaggcccgtcagcatcgtcagtgcctgtatgtgagttctcggcgatgaagggttgaatgtaagttctggaaaagcatctctttacacagacaagaaagttcttacccactatctggccacgaactgcatcagtatctgaggggtttagtttgcatagatccaaacgctggtctgtaaacaaacaattcaaaacttaacccaaggaacgtgaactagggaggaaggcaggaattcagtattcagcgatcaaaacaaaaaacgatgcctcctaagctttctttggttgcattaagaggcaggaaagtgtttggttcttacatccggtatcttttaatctgctgatggcattggagagcagccgcacacagcccaggaagccagctccctgtttcttgtgaattttcttatggttccacacgctaatggttatcgaatccgttttcccaacatatctggaaagaaagtgcaaaactcatttttaattgtgtttggttttttttgttttgtttttttttttttttgagatagaatcctgctctgttgcccccaggctggagtgcagttgtgtgatctcagctcactgcaactcccaagttcaagtgattctcctgcctcagcctcccgagtagctgggactacaggcgtgcatcaccatgcctggctaatttttgtatttttagtagagatggggtttcgccatgtggccaggttggtcttgaactcctaacctcaggtgatccacctgccttggcctcccaaagtgctgggattacaggcatgagctactatgcccagcttttaattgtatttctgaattatgatatctcattgagattttctctttaagaaaccttataaaataatgttgcctctgtattacacatgtaacaggcatttaataaatacgtatccattaatttcaacaagctgggaagaagaactaccttgctccttatggaaggggcaaatgtagataaccacacgatgataataatcttataacagacttactatattttatttatttttatttatttttttatttttttgagacggaattttgctcttgtcgcccaggccggagtgcaatggcgcagtgttagctcactgcaacctgtctcctgggttcaaggaattctcctgcctcagcctccccagcagctgagattacaggcacctgccaccacacctggctaatttttgtatttttagtagagacggggtttcaccatgttggccaggctggtctcaacctcctgacctcaggtgatcttcctgcctcggcctcccaaagtgcttagattacaggtgtgagccactgcacccagcaaatttactatattttaatagtcgcataggacagtaacatgattcataaattctcaccaattaggtttgatacagaatactggtttgcgacaagggactacttacaaacctacggatctattcaaagtacacaagaggacactaagacattaaacctccatttactgtcactgcaagtcaacggagagaggaactcaacccacttacacagcctcagtgtcactgaaactgaatcttagaatataattcttaaaaatcccacccaaatacagtataatttgtattaactaaaagacaataatctttcaggattactttgatgaaaatatcttagtaggaacatgaaaacatgggtgcatataaaatagtggtcttcacagccaggtgcagtggctcacgcctataatcccagcacttcaggaggccaaggtggatcacctgaggtcagaaggtcaagaccagcctggccaacatggtgaaacccatctctactaaaaatataaaaattagccaggcatggtggcgggtacctgtaatcccagctactcgggaggctgaagatcgagaatcgcttgaacccagcaggaggaggttgcggtgagccaagattgcgccactgcgctccagcctgggcaacagagcgagactctgtttgaaaaaaaaatttaatttaatttaaaaataaaataggccgggcgcggtggctcacgcctgtaatcccagcactttgggaggccgaggcgggcggatcacgaggtcaggagatcgagaccatcccggctaaaacggtgaaaccccgtctctactaaaactacaaaaaatagccgggcgtagtggcgggcgcctgtagtcctagctacttgggaggctgaggcaggagaatggcgtg

SEQ ID NO: 38774 - DNA, 2300 bp, Homo sapien
tcaggaacacctggggataagaacaggagcctgcacccaggtaagcagagagtgatgtctggttttgtttagagaggagactctttgaataggggggaaatactaacgggattggcagaagaatggggattacttgggagcattagagactggatggattaattcagacccaggcattcactctctgtgacaatcatctacaaatggaaacagctggattgtggctctactgctattgcttaaacattgcttatattcttgggtctttcttgaggataactgaaagagccgcaaggtgccatagaaatgacctaggaccatccttttatttgacagatgtgatgccttgaatcctgcccaggagagactctgctttcactagggtcatccgaggcaggcaggcaggcaggcaggcgggcaggcaggcaggtatgtctaggcgctctaggtagaaggctctgttccgaagactgtgaccttaggacaggcacaaggctgcaggggatggtagcaatggcccagagcctactttccttgggacacacacacacacacacacacacacagtattaaaagaatttgttcaagttgattgatgaagaatcaaataaaaataaaaaagaacttgtacatgaaaatgggtagtggggtctgggagcggtggcttaggcctgaaatcccagcactttgggaggctgaagcgggcagatcacctgagctcagaagtttgagaccagcctggccaaaacagcgaaaccccatctctaccaaaaatacaaaaattagctgggtgtggtggctaacgcctgtaatcccagctatacaggaggctgagacacgagaatcacttgaacctgggaggtggaggttgcagtgagccaagaccgtgccactgcactccagcctgggtgacagagtgagaccctgtctcaaaaaacaacaacaacaacaacaaggtagtgggtaaaaaacaagtttgataaacctagttttccctctttctaataataccagtttatttctataacatgctaacagagaggagtttgtttgctggagaaagcgcataatgagctttttctgtgtgtgtgtgtgtgtgtgtgtgtgtgtgttttgagacagtgtctagctctgtcacccaggctgtagtgcagtggcctgatcatagctcactgcagccatgaactctggggctcaagtgatcctcccacctcagcctcccagtacctgggactacaggcgcgcaccaccatgcccagctaatttttgtattttttgtagagatggagtctccctatgttgcccaggctggcctcaaagtcctgggctcaagtgatccgcccgcctcggcctcccaaagtgctgggattacaggctacagccaccgtacccagccatgagcttttggttctaacctgcaaccccgggagaaggggaaatttagcagaagacatgggaacacaaaccacaatgccactttcttgtttggtaaaattgtatgcagaatggataataacaaacatccgcctctcaactttatccctccctctcatctcgttttccttgtccgtatatggcacttctgcgattctggcaactttgttatgggtcagtggagcacacccgttgcacagaacacacctaagggctttgtctctttgagaagtccctcccttgaacttgcacgatcgaaagctcttaactgaaaaaaactggtattgcacgcctgtgtgcaaggagcttggtgtggacacagcccacggtttcatgcaaaccactcttcagtcactcaggagcccagagcctcgcagagacaggggtcaagacagagggcgaccgcgcgctgggtcccggggccagctctgctctcccttcccgggctcggggccagaccctcccacccaccgaccacaggaagggtgaagaccccaacccgcgggatccgggccccgcgcgcccgaggcaggcgtgcgggcgacgtagcagcgcaccccgccccgccccagcgtacgtggcgggggcgcgcacgcacgcaggcgcgggggcgcgcagggccgggccggcacggcggcgggcgcgcgcgcggctcggagaggcggcggcagcggcggaagcggcgagggcggcgggcgtccggctctgaggtggtggaggcggcggaggcggcggcggaggcggcggcggctcgggactgggctcggctggaagcagcgagggtcagagcgccgcagcaagcgccgatctcccggctcgaccatccgcctgccgcccggacgcctgggccgcggagtttgtgtccc

SEQ ID NO: 38775 - DNA, 2300 bp, Homo sapien
aatttacagaagagatagccatttttttatacctccctttcttcgcatcgtagatatctaatttttgttagcttgatgtccagattttatcataatgatgtaaattatattcagaagtgtgttttccttagtattaatccacatcttcactcatatgctttgttttccttgggtttacctcatatcaaattcttacagcctgtgtaaacctcctgctgaatgtaatacgtcagtaatctaccaacatgcttgtcatccacacccactggagagctctgtcatgctccagcctggaatagttgtcctcatcctctggtacacgtctattgtcctgggatcggcttttaccatcattgtgggggctccactcacttttcctgggtcagtgtccctgtttgcaggatctcacacctgcctgtgcttgttttcccctttattttagggacaaggtcttactctgtcgcccaggctggagtgcagtggaaccatcacagctcagctcagggcagccttgctaaagcaatcctcccgcctcagcctcttgagtagctgggtctacagatgtgtgccactatgcccagctaattgtttaattaatttggcttttaaaattttaattaatttggctttgggaagccaaggcgagaggattgcttgagccagggagttggaggctgcagtgagctatgatggtgccactgcactccagcctgggctatgaagtgagaccccatctccaaaacaaacgatcgcatgaggaggtaggcatgggatccaggaaacagggaagctgaccttgaattcctgggatcaagcgatcctgctgccttggcttctcaaagtgttgggattacaggcgtgagccactgagacccactggcttttaatatgtatcttctgagagaaggtgcatgggaggttaaatttcagacactgctcatccaaaaacatgtactttattttttatttttatttttgagacagagtcttgctctgttacccagactggagtgcagtggcacgatcttggctcactgcaacctccacctcccgggttcaagcgattctcctgcctcagcctcccgagtagctgggatcacgggcgcccgcgaacacgcccagctaatttttgtattttttttattagtagagacggggtttcaccatgttgaacaggctagtcttgaactcctgacctcagtgggattgcaggtgtgagccaccgcacctggcctttgaaaacatggactttgttttgactcctggttgacaatccagctgcagacaagtgttctagactggaaactatgaccttcagaatgttgcaagcatcgatcattatcttctagttttcagtgttgggttcaaagtcttctactctgattgccaattattttgtgcatgactctcttcccctgtctcaactctactgactgaaatttgtaggttgtgtctccagtattcttaaatgtgctgtcctgaatagaaacctattttctgtacatccaagtatcagccttgcagtctagaattgtccttttaatttttaaaaaacagcttggaacagtggctcacgcctataattccagcactttgggaggctgaggtgggaggaccccttgagtccaggagtttgagaccagcctgggcaacatagcaagaccccatctctaaaaagaaaaagaaaaaaatagaattatctcccctgccaccaccatttttttttcccactgaaacggatcctctcattttcttgtcccattctctattttccatctttattttttactttctggggtattctactttatctcttcttccaggcttttcatttctgcagtcacttaattcgagacactttgttttcacaggcttcccttttcaagcctccttcttcattagcgcaagatcctatctgtgctatcgacctagctttgtttatgcattgattcttgggggggtgtttgttgttagtttggtgtgcctatggcaaaggcttccatcagatgtctgatgtccttggatctctgcttgtaatagaaaggtcctcaggctgtgagcggggcctgtcattggtggatatctgctgggtgaccccacagaaacctggccattccaacaagtgatcccaacgatcagagctgcagatttttttttgagacagtcttgttctgtcacccaggctggagtacagtggcacaatctctgctcactgcaacctccgcctcctgggttcaagtgacttctcctgcctcagcctcccaagtagctgggattacaggtacaagccaccatgcccg

SEQ ID NO: 38776 - DNA, 2300 bp, Homo sapien
gctggcacaaagaaccctgtgtggctggccaggtgcggtggctcatgcctgtaatcccagcactttgggaggctgaggcgggcggattgcctgaggtcgggagttcaagaccagcctggccaacatggtgaaaccccatctctacaaaaaatacaaaaattagctgggcgtggtggtgggcacctataatcccagctactggggaggttgaggcaggagaatcgcttgaatccgggaggcggaggttgcagtgagctgagatcgtgccattgcactccagcctgggcgacagaagcaaaactccgtctcaaaaaaataaaaagaaccctgtctctcagagctgccgcaaccaagttcacacactgggtggcttcaaacaacaggaatttttaaaaatttttttactgatacctaatagctatgcatattttaggttttatgtgataacttgatacattcatataataaaatcaggataactgggatatccatcgccttaaattttatttttgagtgggggatggggtcttgctctgtagcccaggctggagtacagtggtgcgatcatagctcactgcagcctcaacctcttgggcttgagtgatactcccacctcagcctcctgagtagctaggactacaggtgcactgtaccacacctggctaattttttttttggtagagacaaggtctccctatgttgcctaggctcatttcaaactcctgggctcaagcaatccacctgcctcaacttctcaaagtgttaggattacaggcgtgagccactgcgcccagcccatcttccctctttttatatggacaccagtcattgaattagggtccaccttactccagtatgaccacctcatcttaactagttacatttgctgagaccctattcccaaacaaggttcccttcctaggtattgggtgttaggacttcaacgtatcctttcggaggacacagcttaacccctaacaggaaacaactaatataaaccctctctttatagtttcaagtcatgtcacagccttcctcttacttgattcacataatgatgctatgagaggggcatggtagggccagcacccccactttacagatgtggaaactgaggtctgagaggttaaggaactggggcaggttcatgcagagccaggattagaactcagcaattctcactccacatccctgcccttggaaccatgtttttcagccatctccctaacctggtaatttttaaagggctgggtctggccaggtgtggtagcccatacctgtaatcccagcactttgagaagccaaggtgggagatcacttgagctcaggagtttgagaccagcctgggcaacaggagatagggagaccccatctctacaaaaaaaaacagaaacaaaaaattcgcaggtggtggtgcatgcctgtagtcccagctactttggaggctgaggcaggaggattgcttgagccagggagtacaaagttccagtgagccataattgcaccattgcactctagcctgggcaacagagtgagaccctgtctcaaaaaaaaaaaaggtaggtccatcccagatgacctgtgattcactctatttctttgtggtcatagaattagtaatgaattcctgttcccatcagcaggccacctgcagccctggactgaaggcagggataccagttaggggctgatgtgagggatcttggcctgattcagcccagggccttggtgcacaggaggtcctcaataaatggcagttgagtgaagctgcagggaacaagaaacgggcagattccagcaactttgcagatccatgggatttggagactaatgggtgatttctggtggaggagggaaaatgcaggagtcaatgactggtatgtctcagccttgtgccatctgggagggacctggttccatcaggtttcacctcagctcccttatcgtgctgctaagctctgaccccaacgtgagtctccctgccgcagaccacatgggcaatgctgggtctcgagaaggcactttggtgtctgaacaaggtagatctgctggcttctattcccaggccccaccccttccccagggaagccaggtcctaacaccttcattgtaacccactcaaccctggattcttttcgcagaatgggcctgaaagtcattcagcagaacgtgcacaagttcctgcagctccgtttctggggctggtggaagctgtacaacaaggtgagggccgaggggccaggccaggggggactgctgctgcctatgggctgggggagggcttgatcctggacagagat

SEQ ID NO: 38777 - DNA, 2300 bp, Homo sapien
gcgcaggaggtcaaggctgcagtaagccatgatcacgccactgccctccagcctgggcaacagagcaggaccctgtcagaaaaacaaaaaacaaaacacacacgttcgctcagccgcattcctctcttcctcccacagatcaaggaactagagacagagctggatggggaacagaaacagcacgtggagacagtcaagacactgtgtaagaatgagcgtcgcctcaaagagctggtcttccagacagaggaggaccacaagaccaatcagcgcatgcaggcgctggtggagaagcttcagaacaagctgaaggtctacaagaggcagattgaggaggcggtgggtgtccatgcgcctccccactcctccttccctcactcttgtttctcagtgcgggtcgccagccttgctgggaattaaccacagggaaagaagcaagcactggccctaagatgactctgcgaggctcatgtccatggtgtctcctccttggaatccagtgggagggaggaccagacactacacaccagagataagaacttgtaaagaggccaggcatggtggctcatgcctgtaatcccagcactttgggaggtcgaggtaggtggatcacctgaggtcaggagtttgagaccagcctggccaacatggtgaaacccatctctactgaaaatacaaaaattagtcaggcgtggtggcgggcaccttaatcccagctacttgggaggctaaggcaggagaattgctggaacctaggaggtggaggttgcagcgagccgagatcagaccactgcactccagcctgggcgacagagcgagactgtctctcaaaaaaaaaatttttttttaatgcacacttaaccagaaccagccacgtttatgccccgtttcccgccgtgcctttgtcacaggaggaccaggccaaccagaccttggctcgatacaggaagacggtgcatgagctggatgacgctgaggaccgggctggcatggcagagactgccctaaacaagctgcgcaccagacaccgcgtggccggcaagggcatcacctctgtggagatcatccaggtgtccaagacaggcacctcgaaaaccctttctgaggagtgaggccctccgtgtcctaggccacaactggtaggtgtggactccgctctggacggtctcgctcagagcgctccttccctgcactggctttgctgctagtattggtactatgtgacccagccatactccccctgctccccagctccagtctttgtcacacccagtctcatgcaacaggaaccccaaagctcttcccctccttcttcagctgcaaaactcctctagagtgtcacagccctcgggtggggtgctgttcacctgtatcacaggtgctggccgacctgatgttcccccatctgcacagaagggcggttcccaagtgtgatgccacttgacactagccttggaacctaggtgcttagtacagtcacagggacgtccacaagcttatggcaatgtgtgttatctttcgtgtcccccacaatatcatttttcactggagatttcatcaatcctggttgaattcaggtctctaacactaagaaaatgataattatcatcacagctaccatttcttgaacactgagtgcaggtgggattttaaggaaacaatttaaagtagtctttattccccttaattcagaactaatcaaggacaaaaaatattggagataaatatataaaagttaaaataggctgggcacagtggcttgtgcctgtaaatcctagtactttcagaggccaagggggaaaatggtttaagcccgggagttcaagaccagcctgggcaacacagtgaaaccctgtctctacaaaaataaaaaaaaattatccaggcatggtggtgcacacctgtagtcccagttactcaggaggctgagataggaggatcccttgagcccaggagtctgaggttacaatgatctagcattccagcctgggcaacacagtgaggccccatctcaaagaaaaaaaagtcaaaatactagttttatttatttatttgagagtctcactctgtcaccaggctggagtgcagtggtgggatttcggctcactgcaacctccgcctcccaggttcaagcagttctcccaagtagctaggactacaggtgcacaccaccatgcccagctaatttttgtatttttagtagagacggggtttcaccatgttggccaggatggtctcagtctcttgaccttgtgatccacctgcctcagcctcccaaagtgctgggattacaggcatga

SEQ ID NO: 38778 - DNA, 2300 bp, Homo sapien
tcctccctttcccaagctgtctcttggagggggtaatgaatttacaatgatctttctacactatctgctcgattaccctatgaccaaagactttgtaaccacaggtcagagttaaaatcagaatttcagtgaagcgatgttccatgaacagctggattcactaactcagtggtccccaatctttttggcagcagtgaccggtttcatggaagacaatttttccacggaaaagggggcaggggctaggggagaggggtggggtggttttagatcatcaggcattagattctcataatgagcatgcaacctagatccctcgcatatgcagttcacaatagggttcactttcctatgagactctaatgcccccactgattggacaggaggcagagctcaggccgtaatgccagagatggggagcggctgtaaatacagatgacacttcgttggctcgccctgctcacctcatgtgccaatgggttcctaacaggcaacagaccaacacccgtcagcagccaaggagttggggaactctgcactaactccaaagaacatagcgggtctggcagggcatggtggctcacgcctgtaaccctagcactttgggaggctgaggcaggcgggatcacctgaagtcaggagttcgacaccagcgtcgccaacattgcaaaaccccgtctatactaaaaatacaaaaattagccgggcatggtggcgcgcagctgtagtcccagctactcgggaggctgaggcaggagaatcgcttgaacccgggaggcggaggttacagtgagccgagatcgcgccactgcactccagcttgggcgacagagaaaggctccgtctcaaaaagatcacagcgggtctgaaattgagagtttgacaagtatacctacataaacctcaccttacaataccaaagggaaggagacaagcccttggttggcctggcatggcgctgggcggcggcgggggggagctcacatcgctttgggaagcagaggctagaggattgcttgagcccaggggttcaagaccagcctggacaacataggaaaacctcatctttacaaaaaatataaaaattagccaggcacagtggctcacacctgtaatctgagggctttgagaggccaaagagggacgatcgcttgagcccaggagttcaagaccagcctaagcaacacagcaagaccctgtctctaccaaaaaataaaaattagccaggcgtggtggtgtgcacttgtagtcccagctccacggggggctgaggcgggaggatcgcttgagcccaggggttccaggctgcagttagctatgatcgcgccactgcactccagcctgggctacaggttgagaacctgtctaaaaaaaaagaaaaaagaaaagctctcgattagccccatctgtgggggctggggatgctccagaatttctagggttcaagggcagcagcctgattgcaggtggggatcagggcatttcttggaggctgcatctgcggggcaggctctgtcctctgtgaattgggggccttgccaagttcccccaacccttttatccctgctgcgccatcttgggagcagggaactgcttgggagcaggggattctgtcccaggaagggtcgagaaagttcctggggggcttcaggggctttccacagagggagcacggcgggggcggaggctccctgcagggagcagcgctgaggtagactggctctgaccttggctctctgaagggagaaaaacttaatcgttcttcaggtccaagagctccaaagacccccaatcctcagtaactcatctcctgacaaaagaccttgcgaaactgccaaagcgccacacttcggctcgcgattgtgaggaaattggttgaggaacggagtgggacgcccatgccgcttcgccagcacttgccaggcgttccgtggggcagcatctcctctgaagggccgccgacagtaccacgccaatggaacggcgtaccctcctccactgcagcctgcctaaccccggactgcgcgcccgagctgtgcgcatgcgcggaccgtccgcgcggtcgcaacgcgcaggcgccgtgtccacttccgggatctgtcagccgctccctctgggcttccgtcctccgcccgcgcccgacggagcctgttcgcgtcgactgcccagagtccgcgaatcctccgctccgagcccgtccggactcccccgatcccaggtaacggccagcaggggcgagcgtctcaccctgtcggcctctcttgtccaggcctggcgccggacttgccgcgggggcagtg

SEQ ID NO: 38779 - DNA, 2300 bp, Homo sapien
cttgtagccacagctactcaggaggctgaggtgggaggatcacttgaggccagaagacggaggctgcagtgagcatagattgcaccactgccctccaaacctgggtgagagagcaagaccctatctcccctgccccccacccaaaaaaagaaaagaagttacagaagacatcatgatacttcatccctgaacacttcatcattatctttgtctcctaagagctaggacattctcctatctaatggcaataccgttatcacacctaagaaaatgaaaataattccatatgtaatatctagtttaaattgtaattttccctgttatacaaaatacatcttttctgcccattttttaaaatgtggattatgggccaggcacagtggctcacacctgtaatctcagcactttgggaggctgaggagggcgggtcacttgaggccaggtgttcaagaccagcctggccaacatggtgaaagtccatctctactaaaaatacaaaaattagctgggcctggtggtgcacacttgtaatcccagctactcaggaggctgaggcaggaggatcacctgagtccaggaagtggaggttgcagtgagctgagatggtgccactgtactccagtctgggcaacagagtgagactctgtctcaaaaaaaagaaattatattataatcaactttcacttatcaaatttggttttcatagctctctagaacagttctcatcctgcctccatattgcctttttggaatagtccaggccagttcttctatagaatggcacacaccctggctttaactgtttatttcctccttgtgttgcttgactagttcctttatcctttatttcttgtaaactgaaaattagatctgaatcttgattggatttagagtaaatatgtttggcatagagacttcattggtaggttgaccatattcccaggtttctccaggatagccctgtgacctgttgtgttggcataattattatttatttttgctctcagaagtgttctggtttggatggtacgttaagtcactatttataagtgacgatgtgtacttcatgtggactgccatcaggaggcccatccagttagattgatccactatttataacatggtgattacgtggtgattgccagatttcttcaacgtaaaggcatctttttctctttgtagttaataagcaatctgtgggatgataatttgagactaggaatatcctgtacccatggtttaagagtccattgacgaccctgaacagaataaattccacattagttgttacaatgctagatttattcagatggttaagttttgacaatgagatagatttttttttttttttttgagacagaatctcactgtgtcgcccaggctggagtgcagtagcgcgatgtcggctcactgcaagctccacctcccaggttcgccattctcctgtctcggcctcccaagtagctgggactacaggcgcccgctaccatgcccggctaattttttgtatttttagtagagacggggtttcaccgtgttagccaggatggtctggatctcctgacctcgtgacctgcctgccttggcctcccaaagaaagttctgggattagaggtgtgaccaccatgcccggcctttttttttttgagacagagtctcgctctgtcgcccaggctggagtgcagtggcatgatcttgattcactgcaacctctgcctcctggatgcaagcaattctcctgcctcagcctcccgagtagctggaactagaggcgtgtgccaccacgcccagctaatttttgtatttttagtagaaactgggtttcaccaggttggccaggctggtcttgaactcctgaccttgtgatccacctgccttggcctcccaaagtgctagtattacaagcgtgagccaccgtgcctggccagattattttttaatgggaggacaatgttttatttatttccgaacatcttaagatcctcaggcaacttaaacattggttacttgccttttccctattgtataaaatgctttttgttattgttcattgcagctttctctcctttgaaaacactaagaataatgtcactgcatcagtttttactagagccaatcacctgtcatgcctggaacagggatcgtactcgtaagtattttattaactttgcttttgtattttggtacctttggtacatttcatctttagacacatttagggctcacatatctcagtatcacatgtgcaaagaacatacatctattatatacattcagaagggaactaagtcagtcctttg

SEQ ID NO: 38780 - DNA, 2300 bp, Homo sapien
gtcagaggtgaccagagctccggttacttctctgaccttctctcggctctgcactctccctgcagcttcccttgttgctgttccacttccgcgttccacttacgagtccagattcctgcagctcgctcagaaggggctttgtgcgctggatcatcagctgaagtcctgggctttgctttgattgggtcatcttaggtcacaagtgcagcaggacagggaacaccgtgagctgatttagaccactcagggccacttggggtcattccctgggcatctacaaagcggcagaagagtaggatggaagccagggaagcagcaacagggtcacctcagttaccctacacttgtccctgtgggaagagggctgccggtacagaccccttgaagctttgtatctgcttgaactaaaaccaccgcctgtgtttgctgaggttgccgacatctgtctgagaaaatacgcaggagcagcaaggttgggggggctcagaaaagttcgagcacttcctgtgtgcacactgtatgacccgattcacacacctggacacatttaatcctcccaactaccctagggggtcgaattcagtggaaaagagagcggcggctaagggcacctccaatggggagggtgtcggggcaaagcgacctgagacccccagccacatactgcaggacaaaccaatgtcggcaggtgaggacagggtgggaatagtgttccaggcagaaggaacagcgagtgtcaaagcctctaagcctgacagggtgggagtctggcctcggatctccagagatccaggaagaccctgcacaaatactagagagaggggtctgaaggagagaagaggagggaaggtttttgttgttgtttgagaggaagtctcgctctgttgccaggctggcgtgcaggggccccatcttggctcactgcagcctctgcccccggggttcaagcaattctcgtgcctcagcctcccgagtagctgggattacagcagcgctccatcacgccatggggctccttgcagctaattttttttttttttgaaacagagtctcactctgtcgcccaggctggagtgtaatggcgcgatctcggctcactgcaacctctgcctcctagattcaagcgattcttctacctcagcctcccgagtagctgggattacaggcatgcgccaccacgcctggctaatttttgtattgtttagtagagacgaggtttcaccgtgatagccaggatggtctcgatctgagctcgtgatcctcccgcctcggcctcccaaagtgctgagattacaggcgtgagccaccgcgaccggccgaggtaaggttttcactggggtctcttccatctgcctggccgccaggccacgtatccactgaagaggcagagggtcaggatgggaagactccggggaccacctagcccaagacccgcaatcaggcggctctgcaaggctaaccgggtaacttaaagaagtgaagccgattgacgtaaaacagaaaggaaagaagttaactggccggccagcgtcagcaggggcggccagtgtcaccctgcccggggacagcacccctgtttcgtggcgaggacacggagggccaagggggcggggccgggctgccctggccacgcccggaccgcctgctccccgcccagggcctgcacagttggcgcccaccggcatcagcgtgaagggagctcctcgctggctgccgacggggctgcagggctcgctagccgctcacctgcgtgtgagcgcggagcccgcagtacccgccgtccgggctcagaggacgtgactccccgaccctgcgcccggcagtccccgggggccgtgcgcccggcccaggctcggaggtccagcccagcggcggctcaggctgcgcgcctggctcccagcctcagtttccccattggtaaagcattgacggtggttgcggacggcttctgcggacagagccttgggctccgacgtctgcgcgggtaccggcagcacccccaccccgaagggagggcgggacctggatctcgcgaccgctgccccaggtccccgcccccgggccctaccgggctgaggtcggcaggccccgccccccgcccacgaggaagtggctgctgctccggcgcggagcccagagccggttcggcgcgtcgactgcccagagtccgcggccggggcgcgggaggtgagggccgtgggggcgcccggaggtgggggtcaggggagccacctggaggtgggggggcgcgtagatgtggggcgccgcctgggagtgagcgggactggagggatgagagg

SEQ ID NO: 38781 - DNA, 2300 bp, Homo sapien
cttcccctccatccccggagccttccgggttgcagccgccgggaaatgagctggcgtctcctgccgccccgcccctgccctcctggccgctcccgctgctcccacccgcctcccccgggccaggtccgaggggtcccgtacggggcgggcctggctggcggggtcccggaacgcaccccctcagctgcagggctccgcggccagggcagatccgagcagcccctccctttccggaggcgctgggagagcagccaggccgcctagggcggggcggggccgggctgcacccgcgggcagtgaagggatcaggagtgcaagcctggggagtcagacctccccctgcctcctctgccaatgcagcccggaggctaccaccacccatcccggccgggcgcggtggctcacacatagaatcctagcattttgagaggcccaggcgggaggatcgcttgaggccaggagttggaggccagcatggacagcattgcgagaccctttctctattaaaataaataaataaaatgtagccaggcgctgtggctcatgcctgtaatcccaacactttgggagtcgaggtggacggatcacttgaggtcaggagttcgagactagcctgaccgacatggtgaaaccctgtctctactaaaaatacaaaaattacccaggcatggtggcacgcacctgtaatcccagctactcaggaggctgaggcaggagaattgcttgaacccgggaggcagaggttgcagtgagccgagatcacgccattgcactccagcctgggcaacagagcaagactccgtctcaaaaaaaaaaaaaaaagccacgtaacatgcctgtaatcccagctacttaggaggatgaggcaagagaattgcttgaacctgccttggcagtgagccaagactgtaccactgcactgcagccttggcaacagagccagactccgtctctaaataaataaataaaatcttagggacctaggtaggagtgccagcttctcccttcactggccagtgactggtaagccacccaactcctgccagcctcaactttccttatctggaaaatgggaaccttaaagactgggaggctgaaatgcaatactgcaagacacctggcagcgtgtcaggcgctgacagtataaacgtgcgtttgttgctcaccttgatcatagtgttcccccaggtgaacctaacttcctggcctccaagatttggggtcagagtcccaagctgcgtcatttagtagaagccgagtgactttgaacaaatcgttgcttttgtctgagcctgggtttcctcctgtacaaactgaaggtaaaaagcaaacaggctgggcgcggtggctcacgcctgtaattccagcactttgggaggccgaggcaggcagattacctgaggtcgggagttcgagaccagcctgaccaacgtggtgaaaccccgtcactactaaaaatacaaaattagccaggtgtggtggtgggcacctgtaatcccagctactcaggaggctgaggcaggagaatcgctagaacctgggaggcggaggttgcggtgagccaagatcatgccgttgcactccagcctggggttacaaagcgagactctgtctccaaaaaaaaaaaaaaaagcaaacaaaaaatgtctcaggcttgcttcagggggagaatggtgaaaggtctgggtaaaatcgccctgatagatgccggtaaagtttgtttcttacatatgtctgtacataatccattgataggtctttttctttttttctggagtccgggtctcattgtgttgcccaggctatagtgccatggcttgatcataactcactttagccccaaactcctgggctcaagggatcctcctgagtagctgggattacaggtatgttcctccatgcccagctaatttttaaatgtttagtagaggtagggttttgctgtgttgtccaggctggcctcaaactcctggccttaagcgatcctcctgccttggcctcccaaagtgctggggttacaggcatgagcctccacgcctgccttatacgtgctttctttttttttttttttttttgagacagtgtcttgttctgttgcccaggctggagtgtggtgacactaccttgactcactgcagcatctgcctcccgggttccagtgattctcctgcctcagcctctcaggtagctgggattacaggtacatgccaatatgcccggctaatttttatatttttagtagagacggggtttcaccatgttggccaggctggtctcgaactgctgacctcaggtgatcc

SEQ ID NO: 38782 - DNA, 2300 bp, Homo sapien
ttcccaggggtgtctaagtctatgcttattaaagtcctattgtgagagagcaagtgtgccaagaaaaaaaccaacaccctttcttgctctcttaatacaccaggcaacagtaacaactcaaaattgattactataggctctcctctcatgcacttggctatgggaccctgaccttagcttggtccacagtaattttatagtagactcttcaagactttaaaaaacgatttgcacttaacataatggaaacaagcgttggtcctttgctcttagggagtttgatacttttaacaccttcacggttttttgtggttttcagattaacccaagaaaatgtaaaccttgtctaccccaaaaagcttttcacaagcccaaagaccatttagctatgaattcatatttaaggttttatcgttgtaacctccaacctttacccaaagtatccattaagtaaaacttcggagggaggatggctcattcagcaacctccttttacagatgaagggactggggaacaatagcagagagacttttccagccacagaataaatcagtagagagctaggtttaaacacatttagctctgtaatgcccaattatctctggagtcaggaagcgatttaggtttgaaaacgctacaggcagatgtttctgtgggttgagtgcattaaccaatataacacatgagctaccaacacaaatatatttgttctgtgccaggaggtggccaggcactttatgagcgctataattttaccaccccggccccaattcaacaagctaaggattagcccagtgtttcagatgaggaagaggttaacttgttcagggccacagaattagacgtgacatagctgggattcaaactggggactatcgattctaaagggggaaacaggatagagaacgggctagaagatagaggacgggctacaatggactgggcagtcatgaacctacttacaagatcaagagctggcaaagccttaaaaataagaatagttactgcttcactgggcacttttaacgactgcctggcactgtactgcgcactccacgtggattacctagttgaagcctcccaacagtactaagaggtaggtacaatcgttattcccattggcaaatgagaaaacggagacacaggaggtggagcgactggctcaaaggaacacaccgagccgctaccgaacgggggagtcgaaaccaggtctggaaggctcatgggcatctccttaagtcctcctaggcaggcctggctgaaccgaagccagaaaaagcccacgttttacgcgagaggcaggcgggcccggcacaagcgcgggacgcggtgactcagttcctagccagccaaagagtgggataaattccagaacccctagacccggagaagcgcatcctagatccggctttctaggccggcgaggacccagagcttccgaaactcctcagaccactgacggagtgactctgggacaccacagtcctcagtttccccatcgggacaattgggcgtcgaggcccaggcctggctctcagccggtgcggacagcctccctctgcgctgctctcagagacgcgcacgggctgaggggacagcggaagccggacctgggccgcccctccaggcctgcgggccaccggcgcccgcccctcacctcctttaggcattgcggctccggcggctgcggcggcggcggcggcgcctcgaactgacaccggaaccggaaatagcttgggctcgacttcttcctcctgggccagccgccgccgccgcttcagtggccgcagtggccgcaaggacccggacctcagggaggcctccgcacgaagtcggaccgtcctgcgcgccgcctaagtccaggcttgcccgtctgctgccaggcaacaacgcccctagtctctccgttcgggaagacgcgtggccctgcctgccacccaccggaagtgagggcaaatggcaacagcggctctggaattctatacaggcattgctgaggacacctaagatgacgcaatctccgcgcgggtagggcggggctccgcaaggacctcatgccttagagatcgcctgaagagcggaagccttctgtcgagaagcagctacccaagctccaggagcttccggtatgtgttttccctctgttctcgattaccttggcaacggctgaggcgggagaccggtggtctgcaccgtcctggagggagatatgagtggctggactctcagccagccactgggatgtgttcgggctttggaccttgaggccggagagagctcccgagaggaggcggcgcca

SEQ ID NO: 38783 - DNA, 2300 bp, Homo sapien
gtataatgtgtgcctaagagacatttgctgttgtcattagctaacttcaactaaaagcttaaccctatactggatgttgggaacacagaacaaaagttaagcctttgccccttagaaggtgacattttagcaaagagacagacaagagaaaaagcaattacaatagagtataaggagggctgtgactcggggagccatgggggtgagtatttaaaaaggcaaagatggaaggtcaggcacggtggctcatgcctgtaattctggtcttggccagcaccttgggaggctgagatgggaggatcacttgagcccaggaatttgagaccagtctgagcaatgaggtgaaaccctatctctaccaaaaaaaaaaaaaaatcaaaaaaattaactgagcatggtggtgggtgcctgtggtctgagctacacggaaggctgaggcaagaggatcacttgagcccaggaggttgaaagtcttcagttagccatgttcacactactgcactccagcctaagtgacggagtgagaccatgtctcaataacaaacaaaacaaaacaaaacataaaataaaaagggaaagatgactgtaaaatcaaagtaccttaggatgtgctttccaagagtatagacagcagaaagatctctcgtctctgcagttgcaggcttggattcttgttcagctctaaaaaattattctgtgactttcaggtcaccttccctctctggtcctgtttcttctgtaaaatgagggcagtggattggctgattgccaaggtctctttcacaccaaacaacatattacataaagtcaggtagttcccatacaagaggccgatcccaatctaaatagcaaagcgtttttcaaaccacacagcatttccttgctgccagagagaacccaggttaagtatttacctttcagcataacagattcatctctctcaaattcattcagtcactcccttctgtactgacactttacaaagacccaccccccccccgcccacagagcctcctctcatgaactctctaaaacaaccatatagaggaggaatcaaactctataaggtagaatcagggtcacacagctgagaatttgcaaaacctgactctggagggctcctgactcccaaatcagtggtcttcgcactagtctcccctacgctgaagctaaaaataggtgaattctggtctcggccccaaggcgcatagtctgtgacaagagaatgatcgcttttctacgacccagggaaattcgagggccctgatccagcctggaagtcagaagaggcctctcggaggtgaaaatggtaggcggtaaccagatcgaggagaaagaggacgtaggaggtaatcagatcgagaagaaagatgtgccgggaggtgtaagagagattggggcgctaggggaaggaggcgaggaggagcgaaggaagatagtgcaggattgtagggaaaactcataaaaaggacagcatctgaacccagcttagaaaaacaatcagaacacagaagacgttcctaccagaggaaacggcgcgagaatcctagaggaaaacccccaaatctaccgtcccctcagaagaacgaacgtggcgccgcctcctctcgggagctctctccggcctcaaggtccaaagcccgaacacatcccagtggctggctgagagtccagccactcatatctccctccaggacggtgcagaccaccggtctcccgcctcagccgttgccaaggtaatcgagaacagagggaaaacacataccggaagctcctggagcttgggtagctgcttctcgacagaaggcttccgctcttcaggcgatctctaaggcatgaggtccttgcggagccccgccctacccgcgcggagattgcgtcatcttaggtgtcctcagcaatgcctgtatagaattccagagccgctgttgccatttgccctcacttccggtgggtggcaggcagggccacgcgtcttcccgaacggagagactaggggcgttgttgcctggcagcagacgggcaagcctggacttaggcggcgcgcaggacggtccgacttcgtgcggaggcctccctgaggtccgggtccttgcggccactgcggccactgaagcggcggcggcggctggcccaggaggaagaagtcgagcccaagctatttccggttccggtgtcagttcgaggcgccgccgccgccgccgcagccgccggagccgcaatgcctaaaggaggtgaggggcgggcgccggtggcccgcaggcctggaggggcggcccaggtccggcttccgctgtccc

SEQ ID NO: 38784 - DNA, 2300 bp, Homo sapien
gaggcgcccctcacctcccggacggggcggctggccgggcggggggctgaccccccacctccctcccggacggggcggctggccgggcggggggctgacccccccacctccctcctggacggggtgctagccgggcagaggggctcctcacttcccagtaggggcagccgggcagaggtgcccctcacctcccggacggggcggctggccgggcagggggctgaccacccccacctccctcccggacggggcggctggccgggtggggggctgacccccacctccctcccggacggggcggctggcctggcgggggctgacccccacctccctcccggacggggtggctgccgggcggagacgctcctcacttcccagacagggtgactcccgggcggaggggctcctcacttctcagacggggcggctgccaggcggaggggctcctcacttctcagatggggcggttgccaggcagagggtctcctcatttctcagacggggcggccgggcagagacgctcctcacctcccagacggggtcgcggccgggcagaggcgctcctcacatcccagacggggcggcggggcagaggcgctccccacatctcagacgatgggcggccgggcagagatgctcctcacttcctagatgggatggcggccgggaagaggcgctcctcacttcctagatgggatggcggctgggcagagacgctcctcactttccagactgggcagccaggcagaggggctcctcacatcccagacgatgggcggccaggcagagacgctcctcacttcccagacggggtggcggccgtcttggcactttgggaggccaaggcaggcggctgggaggtggaggttgtagcgagccgagatcacgccactgcactccagcctgggcaccattgagcactgagtgaacgagactccgtctgcaatcccggcacctcgggaggccgaggttggtggatcactcgcggttaggagctggagaccagcctggccaacacagcgaaaccccgtctccaccaaaataatacaaaaaccagtcaggcgtggtggcgcgcgcctgcaatcgcaggtactcggcaggctgaggcaggagaatcaggcagggaggttgcagtgagccgagatggcagcagttacagtccagcttcagctgggcatcagagggagactgtggaaagagggagagggagaccgtggggagagggagagggagaccgtggggagagggagagggagagggagagggagaccatggggagagggagggggagagggagagggagagggagaggcccggccaattttttaaatgttttacagttgttttgagacactctcgctctgtcacccaggctggagtgctgtggcatgatcacggctcactgcaacctcgatctctgggttcaagtgattctcccacttcagcctcctgagtagctgggactgtgggcatgcaataccacacccaataatttttgtatttttagtagagatggggtttcaccatgttggtcgggctggtctcgaactcctgatctcaaggagtctgcctgccttagcttcctaaagtgttgggattacaggcgtgagccaccgcgcctggcgtatttttttgaggcagggtcttgctatgttgcccggtcttgtctcgaactcctgatctcaagggatcctcccatctaaaactcccaaggtgctgggattccaggcgtgagccctgcgcccagctgctgaatgggagcacccagctgacgtttgtctcttccgtggcaggtgtggcggctgatgctgagtctagggctacagccgagccgggacagctacaacctgctgttggtggcagctcgggactgtggcctaggggacccccaggtggcctcagagctgcttctgaagcccagggaggaggcgactgtgcttcagcccccagtgagcaggcagcggccaaggaggacagcccaggccaaggcaggcaacctcatgtcagccatgctgcatgtggaggccctggagaggcagctgtttctggaaccttctcaggcacttgggcctccagagcctccggaagccagagtgcccggcaaggcccaaccagaggtggatactaaggcagagcccagccacacagcagccctcaccgcagtggccctgaagccacctcccgtggagctggaagtcaacctcctgacccccggggccgttccccctacagtggtctcctttggaacggtgaccaccccagctgaccggctggccttgatagggggcctggagggcttc

SEQ ID NO: 38785 - DNA, 2300 bp, Homo sapien
agacaggtatggtggtgtgcaccagtagtgctagttaattgagaggctgaggtaggaggatcacttgagcccaggagttggaggttgcagtgattgtgcatttgcactccactgtgccatcgcactccagcctgggcaacatgaagaccccattccacaaaaaagaaaattacataaacaccatgcttgtaagaaggagtggcagggcttgccagatgcagaatgataaaggccccctgcactagtttcacaaaaggtgctggtcaggacaatcatcaatgcgttacatggacctgagttcaaagccagcccagcccaagctggccagtctcacccactgcactgctgcaggaccccagcaagtctctccccttgctgggcctagttttttgtttgttgttgttgttgttgttttgagatggagtcttgctctgtcgctcaggctggagtgcaatggcgcgatcttggctcactgcaacctctgcctcccacgttcaagtgattctcctgcctcagcctcccaagtagctgggattacaggggcacgctgtcacgcccagctaatttttatattttcggcagagatagggttcaccacgtcaggctggtctcgaactcctgacctgaggggatccacccaccttggcctcccaaagtgctgggattacaggcgtgagccaccgctcctgacctactgggcctagtttttaatctgttcaatctgccatcacttgtaagacttttccaatcgcaaccttctaatataaccagactctaaaatactttaggctgggcatggtggctcattgctgtaatcccagtgctttgggaggtcgaggcgagaggattgcttgagtccaggagttcaagaccagcctgggcacatagcaagaccctgtctctaccaaaaaataaaattagccaggcatagtggctcacacctgtagttccagctactcgggaggctgaaatgggaggatcgcttgagcacaggagggtggggctgcagtgagctatgtctgacctgaacctaggctttctaacctctgggcccatacttcttattttatttattattattatttttttttttttctgagacagagtctcactgtcactcaggctggagtgcagtggcgcgatctcagctcactgcaagctccgtctcctgggttcaagcgattctcctacctcagtctcctcagtagctgggattagacgtgtagcaccacacccagctcatgttttttgtatttttagtagagatggggtgtcgccaggctggtcttgaactgatctgcccgcctcggcctcccaaagtgctgggagtgcaggcatgagccaccgcccctggcctgttctttttctttctttcttttcttttttttttcgagacagagtctcactctgtcacccaggttggagtatggtggcgcaatctcagctcactgcaagctccatctcccaggttcaggtgattctcctgcctcagcctcctgagtagctgggattacaggcgcacagcaccaagcctggctaatttttgtatttttcatagagacggggtttcaccatgttgtccaggctggtctcaaactcctgacctcaagtgatatgccagcctcgacctcccaaagtgctgggattacaggcatgagccaccgcgcctggcctgggcccatacttgtaaccacttctttctttctgccttttgttactaggaactgagttgactctcttatttttcctgatatattccaggccctggagggacaggaaagccagaaatggacttcgtgagactcgctcgactgttcgccagggcccgccccatgggactgttcatcctgcaacacctggacccctgtagagccaggtgggcaggaggcagggaggggctgatgcggccaatgtgggcgcccttcagcagctcctcctctcagctgcccctcggccaggagcgtcaggaaaacacgggcagcctgggctctgacccgagccactccaactccacggccacgcaggaagaagacgaggaggaggaggagagttttgggaccctctctgacaaatactcctcccggagactattccgcaaatccgcagcccagttccataacctgcggtttggggaacggagagatgagcaaatggaaccggagcccaaattatggcgaggccggagaaacaccccgtactggtacttcttgcagtgcaaacacctgatcaaggaagggaaggtaaggggcactttgggttctgtggctcctggcttctttcccctggtggctcagtgtttt

SEQ ID NO: 38786 - DNA, 2300 bp, Homo sapien
tgtggaatggggtcttcatgttgcccaggctggagtgcgatggcacagtggagtgcaaatgcacaatcactgcaacctccaactcctgggctcaagtgatcctcctacctcagcctctcaattaactagcactactggtgcacaccaccatacctgtctaattttttgtatttttttgtagagatggagtctccctatgttgccaggctggtctagaactcctggcctcaagcaatcctccagccttggcctcccaaagtgttgggattgcaggcgtaagcctccatgccctgccttacgtgcattaattacaatacacagaattacaaaacaaaaagcaatgatattgaaatggcatcaaaatgctttaaaaacaaatttctgctatactagtatagatgcttattttcaatgcatgaaataacaagaccctatcataatttcttttcttttctttttttttttttgagacagtctctcactctgtcctcaggcgtgacctcggctcactgcaatttccgcctcccggattcaagcgattctcctgcctcagcctcccctggagctgggactacagacgcatgccaccaagcccagctaatttttgtatttttagtagagacagggtttcaccatgttggccaggatggtctggatcttttgaccttgtgatccgcccgcctcggcctcccgaagtgctgggattacagccgtgagccaccgcgcccggccgactctatcataatttcaaagcagtaataaatgtaagtgacagcttaagataccaccttgtagttgctgcacaaactgggtttttttgcgtctcactctgtcaccaggctggagtggggtggtacaatctcggctcaatgcaacctctgcctcccgggtttaagccatgctcatgcctcagcctcccaagtagctgggattacaggaacgcgccactactccaggccaatttttatattttcagtagggacggggttttgccatcctgtccaggctggtctcgaactcctgacctcacgtgatcctctcgcctcagactcccaaagtgctgaggttacaggtgtgagccaccatgcctggccctgcacaaactgttatctggaactatcatttacactcaccctcacagtttcaggcactgctaaggctgctccagcaatcaggaaaggaaatgctatacttcacatagagaaaaataggggtgcattttgttcctacacaagctcattaccccaccctggttaaaaaaaaccctgaattaggctgtatagtggctcatgcctgcaattccagcactttgggaggcccaggcaggaggatcgctttgggcttggggccaggagttcgagaccagcctgggcaacatagcaagacccgccacccgcccccccaaccccgccgtctctacaaaaattaaaaataaaattttaaaaattagccaagtgtggtggtgcagcgtctgtagttccagctactcgggaggctgaggtgggaggatcgcttgagtctgagaagttgactgcagtgagctatgatcgtacccctgtactccagcctgggccacagagcgagaaaaaaccctgaattagagacacgctgcggccgtccttcctcggagagacccgcccctcctcagaggcccacccggaccctcaggccaacgccgacccctctccacacggacttctgcagcctcagtttccctcctcagacgcccccggctccaatcccggctcgggcacttccttcccctctggcgtgtcttggcccgggtcccggggctcctgcgaggatcacacaggaactcacttgaagtgtccggcgcagtgcactccgacggggagccctgcccggtccccgcggcgaaccagtctcttcctcgggtccccctctccccaagcgcgcaggcgcaatccgcgtcgccgactcacgcggctggtttcaggtttctggcgaggccggtgttcggctggcggctagctgggactagcggaacggcggagtctcgattggcagtgcctggacaggcgcaagggccggcgcgggctccgggcgctcccggcatccctcgggcggcggcggcggcggcggcgaggcgaagcgaaggaggagtgtgtgcggcggggccggcggcgggtaaaggcgagaaggctgcaggagaccgagggggagccgggccggtggggccgccgccgccgccatgcaggaaatcatcgccagcgtggaccacatcaagtttgacttggagatcgcggtggagcagcagctgggggcgcagccgctgccct

SEQ ID NO: 38787 - DNA, 2300 bp, Homo sapien
taagagggggtgtgtgtgtgtgaatttgagcagctgctttttagggagtgtacagtggtgatggtgtttgtgcctgtgtcaaatagggtggtctgatgatgtctccttataagcactatcttgtcttcttgaagacttaattaatttccaatgaaactatcttgtacagaactatcaccatgtaaagttgtgggacaggcaggaaaaaaaaaaaaaaaaaaatatatatatatatatatatgccaggtgcagtggctcatgcctataatcccagtacttccgaaggccgaggtaaaaggatcacttgagcccaggagttcaagaccaaccctgggaaacatgatgaaatagtgtctctaccaagaaatacacacaaaaaaatttgccaggcgtgttggtgcatgcctgtggtcccagctacttgggagactgaggtgggaggattgctggagcctgggaagtcgaggctgcattgagccatgattgcgtcactgcacccagcctgggcgacagaggggcccctgtctcaaaagcaaacaaacaacaacaacaaaaacacataaagggacagactcagaggtcacatgtgcatgagaaggtgtgaccgcctgaggggagtgaggctgctgggagcggtgggagaccccgctggtagttgtgggcgacagcacacaacactggagagcttgcccgcctctgctatgcactgagtgattgtcagcaagtcccttcccccgcttgggtctcagtttccccatctgtggattgaactcagtgacttccacaagcccccaaactttaaggttatagcattagatttcaagtatgtccagataggaaagaagacacaaagaaaactactggtttcttttaaagtacaagatatcccaccgagtaggaggtgggaagccaggagccaccatatgaaggggagcagtgaagggagttcaggccaagggtccacaccagctgctgggtgtgatgaataactcagagttggggtccagaaaaaagtagggacgggccaaaaactagggatgagctcccaggagagtgagtcctagaagggagtttgagagtctagctggggtctcctacagaaaggtggtccttccctcagcacatctcctccaaccgcctagttttgatgaaatcaagaagagacgctcaacgtagcgggtgtgatatcctagtactctcctgcagttgggagagtgttgagggagagttccaatccaggataacccacccttattcaagaattaagcgaacagacaaggtctaccctcctacagattacctttgaacagccgcagagggccaaagatccgaggcagtgaactcctgagtccgagtgagggtaaaaggagtccccagacggtggaaatgggggcctgggagtcaggagtcctgaaaccaaggggagcgtcccgggatccagaagaggaggtctcaggatggagtgggaagagtctcgggaccacagatgagggagttcggtaactaaaggggaggatcccaggacccggaggaggtgggagggactctcaagacctagagggaggagtcctgcgaccaaaggggaggggtcccaggatccagaggaagccgggggaggtctcaggaccgaggcgagggagtcccgggatcacagaggagcgggtcccgggttcgagtcgctcttgccctcccgcccgggccccgcgctcactgtccatgccggggaagggcagcggctgcgcccccagctgctgctccaccgcgatctccaagtcaaacttgatgtggtccacgctggcgatgatttcctgcatggcggcggcggcggccccaccggcccggctccccctcggtctcctgcagccttctcgcctttacccgccgccggccccgccgcacacactcctccttcgcttcgcctcgccgccgccgccgccgccgcccgagggatgccgggagcgcccggagcccgcgccggcccttgcgcctgtccaggcactgccaatcgagactccgccgttccgctagtcccagctagccgccagccgaacaccggcctcgccagaaacctgaaaccagccgcgtgagtcggcgacgcggattgcgcctgcgcgcttggggagagggggacccgaggaagagactggttcgccgcggggaccgggcagggctccccgtcggagtgcactgcgccggacacttcaagtgagttcctgtgtgatcctcgcaggagccccgggacccgggccaagacacgccagaggggaaggaagtgcccgagccgggattggagccggggg

SEQ ID NO: 38788 - DNA, 2300 bp, Homo sapien
cacttgggagtccctccctgggcaggccatgtgtccaggtgggagagttgtgggcctgaaagagcaggtcgctagcaggtcgccttctggcggccttgttctcccttgcatctgcggagttgctggctagtttctgcaccactgcactttccatcctgagctccctcaccctctaatttgaaagaaactctgtaccactgagaatttcagagtcatgtcccgactggggacttggtggatgatttgggatttggtgggcactcccttagttgaaaactgcatttgaacagtgttgttgtctgtctctcctcttcccccacttcctgctgttcccagtgtggcgagaaaggacactacgccaacagatgcaccaaagggcacttggcctttctcagtggacagtgacagcagctggagccagctccgagcagcccgggggccccgctgttgggagtgtgcatttaactgtttcatgcgcttgttggcgcgactgtggctcgagctggcccgcagacacgtgggtttcatcactctgaggggccacgtctgttagtttcctatcattttgccttagtattttttgaaaaagggacatgtgtcctgtgggtccctgcagtcgacatcatgtttggctgggcatcgatgcctcctttctgggactcccggcacaactcccctcatccagggagggaggcagctgctggggaggggcttggctaggtagttctgtgtggcggtggtcattcccctcattaaacaccagttcttggtgacgccaggggctggtaggtcattcaaagctgtggccagctcacgcctgcttcctccctccctgccctgctgaatcctaaagctgtgcctatatctgtgatttgaatgagggagccctttggggcaaattcaggtgcccccattgcctcaggctggccctggtcccaggtggcagcggttgaggaggggtacagggctctcaagcctgaggttttcttctctgggcttaattttctcttggggtacgtgcctgacagtgtttaaggtgtccgttgaactggagttgcagacttttaaatagatgaccccttcagatcatctgtgcctacctcctgcccatcaggcgtctacactgtcactcagacacctgtggcatgtggaggagactgccctgtcctgagcctggaaaatgtgaaactgtctcctgcaacctgctgggcatgtgggcctggctgtgttcaattgcaagaacaatttttatgaaatggattaaagcttgttttttaagccatgtctcattaattaagggtctcatgccaacccttttacactggctgcaatcacggcgtagctttcttgtccctttcaacaaatgtcagcctcacaaagggaagtgcagctgcccagaaggcctgcaagcagctggtcaagtctgggagtctgatctgtggagccagcaggcaggtcctccacctcagctcagatgtctggtggcacctatttctggggcacagtatcccacccccaatgaggctctgatgaagaggaagcagggaggggccgccatagcccctcacttttccccatcacccccaacccactaagcctcctgttagagaagccgcctcagccggagggccacaatccctgcagcctgggcgtgagtgctgcctgaggtctctccagacagtgccgggtcacctcaccctgtagcccttgatgccccagggtgatgcagaaacacaggatgcgggccatccctgcctggagccacaggacagccggggtgggatctggcgctctcaggtacgcaagcctttgtgttacaccataaagggccagccaactaaaggccagaatgtctgcaaatgcacctgcccacagcactcatggcaagggacggacttcggcactgctgcttcgggaaggtctggatgacaccctgccctccagggagctgggacacgaccagagtggtggtctgggaagtccacaaaggccttcaccggtcaacggcctggaaagacgacctccccccaccttgtgccacaggagcccctggaacatgggataatggctacggcagacaggcaggcaatcagcacacgtaccagtcatgttttatttggaggttaattcctattaggatatgaaaggattcagcaacgattgagattgtgttcctcacggaggggctcgggccaaggtcgtggggtgggggggtgcagagtgtgtcctcttcagtggtatttgcggagccgctcgtgctctgaagtcaggaaggcaagatggtaagtatcttaaaaggt

SEQ ID NO: 38789 - DNA, 2300 bp, Homo sapien
aaataaactttgaagacagagagttcaagggtgcaaggaaccgttgagaacactcctaccgcagtacactactatatttgctggggttggttggtttgtttggagacaagttctcactccatcacccaggctgcagtgcagtggccccatctctgctcactgcaacctccgcctcccaggttcaagcaattctcccgcctcagcctctggagtagctggaatgacaggcgcatatcaccacgcttggctactttttgtatttttagcagagatgaggttttgccatgttgaggaggctgatctcgaactcctgatctcaggtgatccgcgcaccttggcctcccaaagtgctgggattacaggcgtgaaccaccgcgaccagcctggtttttttttgtttgtttgttttttgttttttttgagacagagtcttgctctgccgcccaggctggagtgcagtggcttgacctccgctcgctgcaacctccacttcccaggttcaagtgattctcctgcctcagcctcccaagtagctggaattgcaggcacctgccaccgcgctcagctaatttttttcgtattttcaccatgttggcccggctggttttgaacacctgacctcaagtgatccgcccacctctgcctcccaaagtgctaggattacaggcgtgaaccaccgcacctggcctgtttgttttgttttgtttttttaaccatttttaattcccactggcgatgctggccgtgctttcacacacctataattgtatatgcgattttcactgcctggggagaagggaagcagacatggaggagccccacaatgccacctctgaaacaagaaatgtagcagaatgaactgaacgagggtggcatttatttggcaagttatgactacaagacctgctctcgaggttgttttaaaaatcggaggcccggcgcggtggctcacgcctgtaatcctagaactttgggaggccgaagcgggtggatcacgaggtcaggagattgagaccatcctggctaacatgttgaaaccccgtctctactaaaaatacaaaaaaatacaaaaaattagccaggcgtggtggtgggcgcctgtagtcccagctactcgggaggctgaggcaggagaatggagtgaaccccggaggtggagctggcagtgagccgagatcgcgccactgcactctagcctgggtgacagagcgagactctgtctctaaataaataaataaattaattaaaataatcaaaattgaagtagcccgggcagtgtggttcatgccggcagttccagtattttgggaggccgaggtaggaggaacgctcgaggccaagagtttaagagcagtctaggcaacatagggagacgccttctctacaaaatataattagctgggcgtggtggcgtgcacctgtagtcccagctacttcggaggtggaggaagaacgcttgaggccaggagttcaagaccagcctgagcaaaatagagagcctctacccccactcctcaccacactgtttccaccaaaaaaaaaaaaaaaaaaaaaaaaaaaaaaaaaaagctggaagtggtgatgtgagcctgtagtcctagctacttgggaggctgagatgggtggatcgcttgactccgggagttcaaggctgcagtcagccgtgatcaagccactgtctgaaaagtaaatgctcgtctgaaaagtaaaaaataaaaataaaaatagactgggcgcggtggctcacgccggtaaccccagaactttgggaggccgaggcggggggatcacgtgaggaaaggagttcaaggccagcctggccaacatggtgaaaccctgtctctactaaaaatacaaaaattagcttgctgtgctggtgcacgcttgtagtcccagcgcggcctcttcccaccttttaaggtagagagcccaggctgaggcgcccctctctctaactgcaggaccctcggatttttgctgtccaggcacctcgcccttcgcttcatggccttctagtagttccagggtgttcgcagttgtgacctgcttcccgtgagcctctgctctacgcccctggatggggcgtgcattccctacccagcagccctcgcgcggtccggcacagcggacaccaggactccaaaatggcgtcagttggtgagtgtccggccccaggtaaggctgtttggactccgtggtggaagcaggagccagggtccagggtccagagccacactgggagagaaggaagctgcggagctgcctgccctttgctcaggcacttcgccacgacctcactt

SEQ ID NO: 38790 - DNA, 2300 bp, Homo sapien
ttgagcccaggagtttgagaccagcctgggcaacatagcaagaccccatctcttttattttttattttattttatttatttatttatgagacagagtctcactctgtcacccaggctggagtacaatggcacaatctcggctccctgccacctccgcctcctgggttcaagcgattctcctgcctcagcctcccgagtagctgggattacatactcctgccaccgagcccggctaatttttgtatttttagtagtgacggggtttcaccatgttggccaggctggtctcgaactcctgatctcaggtaatctgcctgccttgacctcccaaagtgctggaattgcaggcgtgagccactgcactcagccaacacacatatgtttattgcaacactatttacaatagcaaagacatggaaccaacccaaatgcccatcagtggtagactggataaagaaaatgtggtacaaatacaccatggaatactaagcagccacaaaaaggaatgagatcctgtcctttgcagggacatggatgaagctggtggccatcagcctcagcaaactaacacaggaacagaaaaccaaacacagcatgttctcattcataagtgggaattgaatattgagaacgcatggacacagagaggggaacaacacacacctgggccttttggggagtcgggggtaaggggagggaacttagaggatgggtcaataggtgcagcaaaccaccatggcacatgtaacaaacctgcacgttctgcacgtgtatcctgtttgttttgttttgtttagaagaaataaaaaacaaacaaaacttgggaggccaaggcaggcggatcacttgaggtcaggagttcgagaccagcctggccaaaatggtgaaaccccgtctctactaaaaacacacacacaaaaaaaattagccgggagtggtagcgggcgcctgtagtcccagctactcaggaggctgacgcaggagaatggcgtgaacccgggaggcggagcttgcagtgagccgagatcgcgccactgcactccagcctgggcgagagcgagactgtctcaaaaaaaaaagaaaaaaaattaaccccttactcacattaaaactgtattttgggggtaatttacataagccacacaattatccttttaattaagatctaatattcttttttttttttttgagacagagtctcgctctgtcgccagtctggagtgcagtggtgggatctcggctcactgcaagctccgcctcccgagttcaagtgattctcctgcctcagcctcccgagtagctggcactacaggcacgccgccaccatgcccagctaatttttttttttttttttttttttttgagacggagtctcgctctgtcacccaggctggagtgcggtggcgcaatctcggctcaccgcaacctccgcctcccgggttcaagcgcttctcctgcctcagcctcccgagtagccggggttacaggcaggcaccaccatgcccggctaattttatttgtatttttagtagagacgggtttctccattgttggtcaggctggtatcgaactcccgacctcaggtgatccacccgcctcggcctcccagagtgctgggattacaggcgtgagccaccgcgcccggcaatttttttgtatttttagtagagaaggggtttcaccatgttggccaggatgatctaaatctcttgacctgatccgccggcctctgcctcccaaagtgctgggattacaggcgtaagccaccgcgcctggcccatttttcttcttttatctgataaccttactcccctccacaaacacacagccaaagaaacgaattgtgtcgctcttgaatcatagaataattctaaattatgttacgattaaacaggaggggcggggccctgtccatcacgtgactctctcggtgctgtctccggccgttgattggcctgggcggggagggcggccgttgattggttcgggcccactcgcgcgggcgccactctctttgtctgacaagagagtcgtgaagcctccgcggtcctagaggggccgctggctgggacgcttcgctcggcgcgcgcaggtggagccagcgagaggctctgaggctgccagagtggttgtgtctgttcctccggtaaggggtgattcgccgaggggcgcggaccagacagacctcgggtcaggcccgggaaccccgagaggagagcccagcccctggtggaggcggcttggcggagattcggagccgtcagcaggtttggggagaaggaaacgagtgttgtgggggg

SEQ ID NO: 38791 - DNA, 2300 bp, Homo sapien
attctcctgcctcagcctcccgagtagctgggattacatactcctgccaccgagcccggctaatttttgtatttttagtagtgacggggtttcaccatgttggccaggctggtctcgaactcctgatctcaggtaatctgcctgccttgacctcccaaagtgctggaattgcaggcgtgagccactgcactcagccaacacacatatgtttattgcaacactatttacaatagcaaagacatggaaccaacccaaatgcccatcagtggtagactggataaagaaaatgtggtacaaatacaccatggaatactaagcagccacaaaaaggaatgagatcctgtcctttgcagggacatggatgaagctggtggccatcagcctcagcaaactaacacaggaacagaaaaccaaacacagcatgttctcattcataagtgggaattgaatattgagaacgcatggacacagagaggggaacaacacacacctgggccttttggggagtcgggggtaaggggagggaacttagaggatgggtcaataggtgcagcaaaccaccatggcacatgtaacaaacctgcacgttctgcacgtgtatcctgtttgttttgttttgtttagaagaaataaaaaacaaacaaaacttgggaggccaaggcaggcggatcacttgaggtcaggagttcgagaccagcctggccaaaatggtgaaaccccgtctctactaaaaacacacacacaaaaaaaattagccgggagtggtagcgggcgcctgtagtcccagctactcaggaggctgacgcaggagaatggcgtgaacccgggaggcggagcttgcagtgagccgagatcgcgccactgcactccagcctgggcgagagcgagactgtctcaaaaaaaaaagaaaaaaaattaaccccttactcacattaaaactgtattttgggggtaatttacataagccacacaattatccttttaattaagatctaatattcttttttttttttttgagacagagtctcgctctgtcgccagtctggagtgcagtggtgggatctcggctcactgcaagctccgcctcccgagttcaagtgattctcctgcctcagcctcccgagtagctggcactacaggcacgccgccaccatgcccagctaatttttttttttttttttttttttttgagacggagtctcgctctgtcacccaggctggagtgcggtggcgcaatctcggctcaccgcaacctccgcctcccgggttcaagcgcttctcctgcctcagcctcccgagtagccggggttacaggcaggcaccaccatgcccggctaattttatttgtatttttagtagagacgggtttctccattgttggtcaggctggtatcgaactcccgacctcaggtgatccacccgcctcggcctcccagagtgctgggattacaggcgtgagccaccgcgcccggcaatttttttgtatttttagtagagaaggggtttcaccatgttggccaggatgatctaaatctcttgacctgatccgccggcctctgcctcccaaagtgctgggattacaggcgtaagccaccgcgcctggcccatttttcttcttttatctgataaccttactcccctccacaaacacacagccaaagaaacgaattgtgtcgctcttgaatcatagaataattctaaattatgttacgattaaacaggaggggcggggccctgtccatcacgtgactctctcggtgctgtctccggccgttgattggcctgggcggggagggcggccgttgattggttcgggcccactcgcgcgggcgccactctctttgtctgacaagagagtcgtgaagcctccgcggtcctagaggggccgctggctgggacgcttcgctcggcgcgcgcaggtggagccagcgagaggctctgaggctgccagagtggttgtgtctgttcctccggtaaggggtgattcgccgaggggcgcggaccagacagacctcgggtcaggcccgggaaccccgagaggagagcccagcccctggtggaggcggcttggcggagattcggagccgtcagcaggtttggggagaaggaaacgagtgttgtggggggcgtgggtgcggggggtaggccactgcgcacacccccggctcgcaggggacgctccgggtttgtgcggcggctctcggggcctgtggcaccagcttttgagtatttttggcggtgtcaagtcttcggcagcgagaggagcaaagtccgaagaatgaatggatggtgaacgcctg

SEQ ID NO: 38792 - DNA, 2300 bp, Homo sapien
tcagcctcccgagtagctgcgattacaggcatgcgccaccatgcccggctaattttgtattttttagtagagacgaagtttctccatgttggtcaggctggtcttgaactcccgacctcaggtgatcccctcgcctcggcctcccaaagtgctgggattacaggcgtgagccaccgcacctggctccataagagatatttttatgtctagttattaaacacacctggattgataaatagtgttcggtttgtttgggcgtggggtggggagggggattgcttgaacccaggaggcagaggttgcagtgagccgaggtcaggaaatcaagaccatcctggctaacatggtgaaaccccgtctctactaaaaatacaaaaaattagctgggtgtggtggcacgcgcctgtaatcccagctacttgggaggctgagataggagaatcgcttgaacccgagcgatactccctctcaaaaaaaaatttttttatttttatatggagacacatcctctctatgttgctcaggctggcctggaactcctggtctcaagcgatcgtctcattttatgcaagttgcaaatcaccagcagcttgacatcaaccaagacactttgttttagagacagagtcttgctctgtcacccaggctggagtgcactggtgcgatcatatctcactgcagtctttacctcctgggctcaaaggatcctcccacctcagcctcccaagtaagtggtgtatcctgagttggttccttccagtgggttcatcctctcgctgacttcaagaatgcagcctccgaccttcactgtgttacagctcttaaagatggcacggacccaaagagtgagtagcagcaagatttattgtgaagagcgaaagaacaaaccttccacagcatggcagagcactccagccggttgcctccgctgactggggtgggagcttttagtctcttatttgtcccctcccatgtccgtttctgtcgtatcagaacgcccttttttccatcctccctgcgattggctgcttttagaatcctgctgattggtccattttacagagcgctgattggtgcattttacaaacctcttgctagctacagagcgctgattggtgcatttttacaaacctcttgtaagacagaaaagttgtccaagtccccactggacccaggaagtccaactagcttcacctctcactgggactacaggtgtgcaccaccacacccagctaattttttattttttgtagacattggggtctccaattcttggcttcaagcgatcttcccccctcagcctcccaaaatgctgggattacaggcatacgccactgagccaggccaggacacatctttgagcctcaatttcctcatcttttttgtttgtttgttaggatcaaagtcgttaacatctgatgtacatggaagcacttagttttaaaaaaaaaacaaaactttttccaactgggcgcagcggctcacgcctgtaatccagcactttgggaggccggggcaggcggatcacgaggtcaggagttccagaccagcctgaccaacatggtgaaaccccatctctactaaaatacagaaagtagccgggcatggtggcgcgcgcctgtagtccaagctactcaggaggctaagacagcctggcgacagagcgagagtccgcctgaaaaaagaaaaaaaaacaactttgtccaacctgggcaatataatgaaaccccatccccacagaaaaattaataaaccgggcgtggtcgcgcgcacctgtagtcctagatacttgggaggctgaagctggagaattgcttgaacccgggagacagaagttgcagtgagccgaaatcgcgccactgcagtccagcctgggcgacagagccagaccctgtctatttaatcctgaaggttcccgcccttgccggagctcggccaccggctcggacgcccgtatttcctcgggatgcgggaaaccgtcaagaccctctgcgtcgggcggggctaggacgataaaccagcgagatgcacctcaccccatcaggcgcctagagaggccccggaaatgcagggaaaggtgccgcaaggcctcgatgacgcgcttccggcacgggatgttttcggttgtttgaccgagagagttgtaggcgcaaagctgaggaaaggagagtgtggagaggggcctggtgtggtggggcccggtgtttgggaccggagggtgttgacggctgatgagttccttgggtttgctctttcttcacctgaaaagaagactccaggaagggcagcacatgccggag

SEQ ID NO: 38793 - DNA, 2300 bp, Homo sapien
tagagaggatgtgtctccatataaaaataaaaaaatttttttttgagagggagtatcgctcgggttcaagcgattctcctatctcagcctcccaagtagctgggattacaggcgcgtgccaccacacccagctaattttttgtatttttagtagagacggggtttcaccatgttagccaggatggtcttgatttcctgacctcggctcactgcaacctctgcctcctgggttcaagcaatccccctccccaccccacgcccaaacaaaccgaacactatttatcaatccaggtgtgtttaataactagacataaaaatatctcttatggagccaggtgcggtggctcacgcctgtaatcccagcactttgggaggccgaggcgaggggatcacctgaggtcgggagttcaagaccagcctgaccaacatggagaaacttcgtctctactaaaaaatacaaaattagccgggcatggtggcgcatgcctgtaatcgcagctactcgggaggctgaggcaggagaatcacttgaacccaggaggcagaggttcactaagccaagatcgtgccattcactccagcctaggcaaccagcaaaaccatctcaaaaaaaaaaaaaaaaaaaaaaaaaaaggaaactagtcatcttggctatctctagagagaaaaatgaatgtagaatgagaatgagaggaagaccttaagtgccttattgaattttgactcatgcaaatgtgttatctatttaagaaataaattattgaaatgcaaaaggtgtttataaataattcaaaccggttgcggtggctcacgcctgtaatcccagcactttgggaggccgaagcaggcagatcacgaggtcaggagatggagaccatcctgggtaacacggtgaaaccccatctctactaaaaatacaaaaagttatccaggtgtggtggcacacacctgtaatcccagctactcaggaggctgaggcaggagaatcgcttgaacccgggaggcggaggttgcagtgagccgagatcatgccacggcactccagcctgggcgacagagtgagattccgtctcaaaaaaataaatagataaacaaacaaataaataaatcatttaaatggaggtaaatatattagaaaagaatgggtatccaccaaacatttttttttttgagacggggtgtctctgtcactgaggtgctgaagtgcaatggcacaatcataactcactgcagcctcaacctcttgaattcaagtgatcctccagtctcagcctgctgagtagctgagactataggcatgtgccaccatgcctagctaattttattttattttttgtagagacggggtaaaaaggccaggctggtcttcaactcctggattctagtgatcctctcacctcggcctcccaaaatgttgggattacaggcgtgagccaccatgcccatctggaacaactttcatagacattaaacaactttatacgagcaacaaaattaagccataggtgcaaaattctataccaactcactaacacacaaaatacgggcattgcaaacattcaccgggggtttggtcctagataggaagctacttaaaatgcaagattttgggctccctgaaaagagacctttaacttctaaatatcttctcatctttttgcagatgctgcaatttcacagcagttccttccttcgcgcctgtaaaacagtggcaacagtaactcttctcctgcctgcccatcaactttgtaaactgcgcggggcgtagggggaggggagggctggggcctggaaactataaagcaccatatgaaaaggagagcactgggaggtcgatgcgggcgcatcacctgaggtcaggagttcgagaccagcctggccaacatggggaaaccccgtctctactaaaaatacaaaataagccgggcgtggtgagtgtgcctgtaatcccagctactcgaaaggctgaggcaggagaattgcccgaacctgggagcagaggttacagtgagccgagatcgtgccattgcactccagcctgggggacaacgagactccgtctcaaaaaacaaaacaaaacaaaacaaaaacgggagattattactaagagatggggtctcactatgttgcccaggctggagtgcaatggtgcgatcccggctcactgcatcctcagcctcccgggtccaagtgattctcctgcctcagcctcccaagtggctgagattacaggctcgcgccaccacgcccagctaagtttttgtatttttagtagagacggggtttcaccatgttggcca

SEQ ID NO: 38794 - DNA, 2300 bp, Homo sapien
agaggaagaccttaagtgccttattgaattttgactcatgcaaatgtgttatctatttaagaaataaattattgaaatgcaaaaggtgtttataaataattcaaaccggttgcggtggctcacgcctgtaatcccagcactttgggaggccgaagcaggcagatcacgaggtcaggagatggagaccatcctgggtaacacggtgaaaccccatctctactaaaaatacaaaaagttatccaggtgtggtggcacacacctgtaatcccagctactcaggaggctgaggcaggagaatcgcttgaacccgggaggcggaggttgcagtgagccgagatcatgccacggcactccagcctgggcgacagagtgagattccgtctcaaaaaaataaatagataaacaaacaaataaataaatcatttaaatggaggtaaatatattagaaaagaatgggtatccaccaaacatttttttttttgagacggggtgtctctgtcactgaggtgctgaagtgcaatggcacaatcataactcactgcagcctcaacctcttgaattcaagtgatcctccagtctcagcctgctgagtagctgagactataggcatgtgccaccatgcctagctaattttattttattttttgtagagacggggtaaaaaggccaggctggtcttcaactcctggattctagtgatcctctcacctcggcctcccaaaatgttgggattacaggcgtgagccaccatgcccatctggaacaactttcatagacattaaacaactttatacgagcaacaaaattaagccataggtgcaaaattctataccaactcactaacacacaaaatacgggcattgcaaacattcaccgggggtttggtcctagataggaagctacttaaaatgcaagattttgggctccctgaaaagagacctttaacttctaaatatcttctcatctttttgcagatgctgcaatttcacagcagttccttccttcgcgcctgtaaaacagtggcaacagtaactcttctcctgcctgcccatcaactttgtaaactgcgcggggcgtagggggaggggagggctggggcctggaaactataaagcaccatatgaaaaggagagcactgggaggtcgatgcgggcgcatcacctgaggtcaggagttcgagaccagcctggccaacatggggaaaccccgtctctactaaaaatacaaaataagccgggcgtggtgagtgtgcctgtaatcccagctactcgaaaggctgaggcaggagaattgcccgaacctgggagcagaggttacagtgagccgagatcgtgccattgcactccagcctgggggacaacgagactccgtctcaaaaaacaaaacaaaacaaaacaaaaacgggagattattactaagagatggggtctcactatgttgcccaggctggagtgcaatggtgcgatcccggctcactgcatcctcagcctcccgggtccaagtgattctcctgcctcagcctcccaagtggctgagattacaggctcgcgccaccacgcccagctaagtttttgtatttttagtagagacggggtttcaccatgttggccaggctggtctcgaactcctggcctcaggtgatccacccacctcggcctcccaaagtgctggcattacaggtgtgagtcaccgagcccggccaagggagggtatttctaatagacaggggtctcgctatgttgcccgagctggtctcgaactcttgggctcaagcgatcctgcttcttcagcctgtccactagctaggcttacaagcgtgggaccccgcgcctggctgaagagaggtatcattaaggacgagacccccttggccagggaagccctgcgtaagcaacgcccctctcttcaaagggatgccccgctccctccgcccactcccagccttccagccttggctcccgaggacacgactccgggccctgccaccttctgataggctcgcgagaccgaggctgcaaagagagccgccccccattggccaaccggcgagtcccgcgcgccacctcctgggagatgtagttccgggaacagctggcccctgcgactcgcgggtgtgacgttgaagatgtcggccttctgagccgactgcggtggtcaagaggtgggtttgtttggaaagtgggtggtgagagtagcgaggatgcgggtgaagaaaacctaagggccccaaattcaacataagcgaggtttgcgggctgtcagcaaggtacagacctacttcaaatcggggcgcagagcgt

SEQ ID NO: 38795 - DNA, 2300 bp, Homo sapien
cgggaggcggaggttgcagtgagccgagatcatgccacggcactccagcctgggcgacagagtgagattccgtctcaaaaaaataaatagataaacaaacaaataaataaatcatttaaatggaggtaaatatattagaaaagaatgggtatccaccaaacatttttttttttgagacggggtgtctctgtcactgaggtgctgaagtgcaatggcacaatcataactcactgcagcctcaacctcttgaattcaagtgatcctccagtctcagcctgctgagtagctgagactataggcatgtgccaccatgcctagctaattttattttattttttgtagagacggggtaaaaaggccaggctggtcttcaactcctggattctagtgatcctctcacctcggcctcccaaaatgttgggattacaggcgtgagccaccatgcccatctggaacaactttcatagacattaaacaactttatacgagcaacaaaattaagccataggtgcaaaattctataccaactcactaacacacaaaatacgggcattgcaaacattcaccgggggtttggtcctagataggaagctacttaaaatgcaagattttgggctccctgaaaagagacctttaacttctaaatatcttctcatctttttgcagatgctgcaatttcacagcagttccttccttcgcgcctgtaaaacagtggcaacagtaactcttctcctgcctgcccatcaactttgtaaactgcgcggggcgtagggggaggggagggctggggcctggaaactataaagcaccatatgaaaaggagagcactgggaggtcgatgcgggcgcatcacctgaggtcaggagttcgagaccagcctggccaacatggggaaaccccgtctctactaaaaatacaaaataagccgggcgtggtgagtgtgcctgtaatcccagctactcgaaaggctgaggcaggagaattgcccgaacctgggagcagaggttacagtgagccgagatcgtgccattgcactccagcctgggggacaacgagactccgtctcaaaaaacaaaacaaaacaaaacaaaaacgggagattattactaagagatggggtctcactatgttgcccaggctggagtgcaatggtgcgatcccggctcactgcatcctcagcctcccgggtccaagtgattctcctgcctcagcctcccaagtggctgagattacaggctcgcgccaccacgcccagctaagtttttgtatttttagtagagacggggtttcaccatgttggccaggctggtctcgaactcctggcctcaggtgatccacccacctcggcctcccaaagtgctggcattacaggtgtgagtcaccgagcccggccaagggagggtatttctaatagacaggggtctcgctatgttgcccgagctggtctcgaactcttgggctcaagcgatcctgcttcttcagcctgtccactagctaggcttacaagcgtgggaccccgcgcctggctgaagagaggtatcattaaggacgagacccccttggccagggaagccctgcgtaagcaacgcccctctcttcaaagggatgccccgctccctccgcccactcccagccttccagccttggctcccgaggacacgactccgggccctgccaccttctgataggctcgcgagaccgaggctgcaaagagagccgccccccattggccaaccggcgagtcccgcgcgccacctcctgggagatgtagttccgggaacagctggcccctgcgactcgcgggtgtgacgttgaagatgtcggccttctgagccgactgcggtggtcaagaggtgggtttgtttggaaagtgggtggtgagagtagcgaggatgcgggtgaagaaaacctaagggccccaaattcaacataagcgaggtttgcgggctgtcagcaaggtacagacctacttcaaatcggggcgcagagcgttgggggtgggggaaggcgcaagctccccggccaatcagacacgagcaacctcagcccaactctggaggccccgcccccttccccgccccacggaaaggggaggagcttgggctgtttgaatggctttgggatggagcaggggagagagtggctccgtttgcctccccgctttggtgatgctgtgcgagcggcttcgggggccctggagacgtccgagtcactgagggtgggctgggactcggggcccgcgtcccatctccccgccgattggtccgccccccgtgcgaggtgaggtcctccgggattcc

SEQ ID NO: 38796 - DNA, 2300 bp, Homo sapien
tgagctcaggagtttgagaccagtccaggcaacatggcaaaaccctgtctctaccaaaaatacaaaaatgaaccacgtatggtggcacatgcctctggtcccagctacttgggaggctgaggtgggaggatcgctggcacccgggaagttgaggctgcagtgagctgtaatcatgccactccactccagcctgggtgacaaagcgagaccctgtctcaaaaaacaaaaaacaaacaaacaatggtccccatggccacatgcccactgctgcacctctggctgtaatgtgaatggtctggggtgatgttatataataaccagcccctgcaaaccaggatagccactaccaagcttctcagtgatgctgatggccccccaaccagggcattccttggaaccttggtaaacagaatgctctccagaccctcctaaggaacataactgaaggtgggttgcttggtcttatcttctagttccatcctagtttgtgtatgtatgaatctttggatccctttgttaagtctgccatggttttgtcatctctacgtcatttaatgtgggccactgacttttctaagctttcaagaatcactccaaggccaggtgcagtagctcatgcctgtaatcccaacatttgggaggccaaggctggaggatcacttgagcccaggagttcgagaccactctgggcagcatagggagataccatctctccaaaaaatgttttttttttttttttttttttttttagacactgtcgctctgtcaactgggctagagtgcagtggcgtgatctcagctcactgcaacctctgcctcccgggttcaagcgattctcctgcctcagcctctggagtagctgggactataggcatgcgccactatgcccagctaatttttgtattttaagtagagaccgggtttcaccatgttggttggccaggatggtttcgatctcttgacctcgtgatctgcccgcctcagcctcccaaagtgctgggtttataggcatgagccaccgcgcccagctaaagtatgttttttaaaaattagccactcatggtggcatgtgcctgtagtcccagctattcaggaggctgaggtggctagaccacttgagcccgggaggtcaaggctgcagtgagctgtgattgcaccactgcactctagcctgggcagcagagcaagaccctgtctataaaaaaattaaaaagctaccaagaaggtcctctgacacacacttggcattaaattggtggttatttgccctgtcattttcttctcttcaaggattcagtgactttcagcaagagccacccaattccataatctttattttcctgtttgtcccaaacctctacaagtcaatagatcgctttccacctgtatctcatcccagttccccacaagtgaatgacttagtgactggacaggtaccacatgccaggactattaacagtgatgcgggtcttcactccctcctggcgagtgaccaactccacaatccactctcacagcagcttcctatgaccacttgtggcaccaaatgtcttagatcaggttctctaaagcagagcctgagacagggattcagaaccatgtgattgacagtgtgatttatttgggaaacgcctttgagggagggaatgaaacaggatagagaagggagagagcttagcacggatgaaggctcagaaaaagtctagcttggcctgatccaagggtgccagagcagtcatagcaccctggagttttctccgctttaatcaaatgaaccaggtgttggggtgtagagaggaagtgactcctgggtgaggtgagatggctctcatctcctgagggcaattctccagtttctggagaacaagagctgtgagcacttgcagcccaaactcagagcagctggggatgggggtctcagcttggtagaggggactggacagggcaccacagtgtacaacacatatggtcaacaaatatttattgggcatttattgtaagccaggcaagtcagcagaaacggcctgagcagtgcccaagagcactcactcactctccctagcaaacaggctcagaactctctcacacatgtcatcctctttcccactcaaaactcccaccccaaccttcctggaaggcagggctaacaggacctcctgcctgcctgctcacgactgattactttcaatcccagctgcaatgcaaactgaaactcattctgtatatcaccactctacaggagaggtctatttctggggcacccagaagtcagcacacatactgctgggaccaggactcgt

SEQ ID NO: 38797 - DNA, 2300 bp, Homo sapien
gccaccgtgcccggccaatatggtctacctcttaccaaggctgatgtaactctcaccatggtggagtgtccagcctgccagcattagagaccaacactgagtcttagagataccagctaccaccaggttgagtgcatcagatcccttttaccttggaatgggcatcaatttgttcttaccagaattgatatatgctctaaatgagcttgtcttccccaactactttgcctccagcagcaccaccatctgagagcttacagggtgccttatccattgacatacctgaaactaaggaacccaccgatagccaaggaggtgtgacagtgaactcgaagctacaaaattcatggtgcatactcatcatccagaagcagctagccagatagggttttggaatggcctgttgaagactgggctaaattgcgattaagatgtaatgccttgcaaagttgggagcagttcttcagaatatggtatatgcgctgaaatgcattgggccaaaatggatatatagtattgtgtctccagtaggactatgtgcatacaggagtagcctctattactatcacacccagccactcacctgtagaatttgtgcctcctcgctccgaaatctggagccagctgggttatgatcctcatttccaggaagaacatttcctctaggaaacattaaatcgtgccactgaactgaaaacagaataccaccaggccactttgagtttcttgtgccagtaggtccgtaggcaaagaaaggagtcgttatagagatgcctacaattcctgccacacacacaacataaatacaaaatcatatacccagtcaactgcattcagtaatctgccttcctggaccctttaggcacttcagtgtaggaatggggacgggtggggaggagagactttagacaaagaagaaaaatacagtgtgtagcaatgtaatgactcttagcgatgacttggaaccctggaaggaaatatgaggatgtatctggaggaataagttgagactatgatgtcatcacggaggactgtaggttagaaagccagccagtgataaaggagcaaagattggatttgacggtgccctaggaggaaaaaaaaaaaaaaaaaaatatatatatatatatatatatatatatatgtgtgtgtatatatatatatgtgtgtgtatatatatatacatgtatatatatgtgtatatatatgtgtgtgtatatatatgtgtgtatatatatatatggagcaaagatgcacttaagtggattattgagaagactcgtgggtaggtagaaaatggcaaccatagcaagatcaaaccccctaaggaatggagcattagtgagggtctagaaggtaattcgggataccacgtaatcataggctctgtatcaggtagccgttccttttgtaggcttttatcttattgggctgtaccacagacttgcccagaacttttagagtcatgccccagccattcaaggtctcagttactgttttataaaaggtgaagttattcttgatctaatcatagaagccctaattattacaataacacttggacagcaaaaacgcctcaaattcaacttatttcaccgttgctaatctgaaaactccctggaaacataaggcaaactcagaattttataactatctagtgttggaaagaacgtctgttgcctatagatcaagtatttgaaaatactgcccattcaactggcaatacgtacataatcagcgtctcaagagacaatcccttcgatttgtgaaaccatttattcttgatcttcctgtctccaccctcgtttcattcagctcctctgccacagacaatcactatttttattgtaactattacaattattgtcatcaagaaaaatagaaggaacatataaatatctgagcagggcggtataaagggaaattcatccctttttccccgccctgtgcacctcctcggagcggacaagctgaggagcaagatccccaaacccgagattagagccctacacagggatgcaaagtcctcccgcgatcctagagaggaccccgaagcggagcgcagctccggaaggcgggtgtgacgcacttccggcttttgtgacgctttccctgggctctgaaggccagggggcttggatgtgagtctagtgctcctggtccccaaagtcacaaccccttctatcccagcatcccagacttctccgggcggggacagagttggacgtgcatggctgtgtcctgcaatcccctcgccacgaccgcccgggacggagtggaagcgggtccgtgcccccgtt

SEQ ID NO: 38798 - DNA, 2300 bp, Homo sapien
ccctctccctgtatgagccacgactttgactcaggggacctgccgagtctgcacaattggtctcctttacattactgtcactgttacaaacagatcctcggcctaattttcagcttagctagatgcagaattaccttagtaatttataaaaaatcagctattgtatgtatctagatctatttctggacttttttttctttaagaaattcaacctcatatttctggactttctgttctgctctgttgatctatttgtctctatgctgataccataccatcctgattactgtacctttaggaaaaaaatcttaaaaaaatacaagtattccaattttattctttttcaaaattgttttggcaatcctaaatccttagcatttctatataaactttagaatcagtttgttaatttgcactaaaaaaaacaaaacaggctcggtgcagtggctcacgcctgtaatcccagcactttgggaggccaagacgggcggatcacccgaggtcaggagtttgagaccagcctggccaacatggtgaaaccccatctctactaaaaatacaaaaattagctaggtgtggtggtgcccacctgtaatcccatctactctggaggctgaggcagggaaaatgcttgaacctgggagctggaggttgcagtgagctgagatcgcgccactgcactccagcctgggcgacagagcaagactctgtctcaacaacaacaaaaagacaaaaacgaaaaaaggtaacaattttttgagttgtttccacctctgtcatctggcaaactgttaaaagaaaattttgctcaaaagcaaaatagcagctgctgtttcttaacactttgttatgttttgatgagtactggtgggaagtggcctctttaagtgggtaccttttgtggtcctctcactggagccaattgcctgagtcagctaaaacttggacgcgatgtgcctcactgccatagctcactcacctttgctgctgaaatggtttcccatcacattgctaataggtacaacctgtgaagggttctaggtggggaaatggcaactcaggaagaactccaaacctttagctctcctaggatattaaaatggccgttatgaagaggaagaagtactgtgtcatctattgtcctggggacctgtcaacaggaacaatagatagacatcaccaggggtgtatttctgttcaacacaaggaaaagtttctaattggagctgtccagcatgaaatggactaagcagtgcattttctttctccgatcctgactccactgtgacgggcactgcagactagagagattgtgtcctagtatgaatttaggttggataaatgatacttagggataaagagaggaaaggaatatcagaatctccaagaagctgatacattttgaaaaaatatataaaatgccacacttcaggttttcttgtgtttaatttgaaacgtccagtaacattaaagaacagcatttgatttgcttaaacaaagtagtaacagctgaagttccttccaaatcacttttctgattctctaagaggcttgcctatgccttgcagatctagcttcacctacaagacatattctgtaaggatccaggttcagcaaggtgtcagaatgtcctaagggtttctgtcccggcgctctgcctgtcccgcttgtgcacaatgcttttgcctatccctgtttctgcatagattttagtcttcccaccagggacgcaactgtcagtttcctccgtctctctcggttctattccaatctgctcatctcccctcccgtccccgctttccccaaggacctactgagatttcgatcccacaacttagtgggtcccatctcacccaggccccgcaatcctcgccttctacttgtcagcgttgtactacactctgagcaggcacccctgtgctactcacggaagcgggaccattaggtcggccattcctcctcaccccacgacacgcacccactgggtcgggccgcctccttgcagggagtctcaaggatgggctggcgtcagggaggggcccagggggcgctttcccaacactggtcgcagtcattgttggtataacggctagagacgcccagtgagttagcatggagggcagtgggaccggaaaaagacgtggaaaagctgcgaaaacgagccttcgaatcatggacgcgcgggcccagctcctcctccgagttcctcatccggggccgtcactcacatccggggccctcactcacatccgggaccctcatccggggctctcacccacatccgggaccctcatgcctgg

SEQ ID NO: 38799 - DNA, 2300 bp, Homo sapien
tgttaatttgcactaaaaaaaacaaaacaggctcggtgcagtggctcacgcctgtaatcccagcactttgggaggccaagacgggcggatcacccgaggtcaggagtttgagaccagcctggccaacatggtgaaaccccatctctactaaaaatacaaaaattagctaggtgtggtggtgcccacctgtaatcccatctactctggaggctgaggcagggaaaatgcttgaacctgggagctggaggttgcagtgagctgagatcgcgccactgcactccagcctgggcgacagagcaagactctgtctcaacaacaacaaaaagacaaaaacgaaaaaaggtaacaattttttgagttgtttccacctctgtcatctggcaaactgttaaaagaaaattttgctcaaaagcaaaatagcagctgctgtttcttaacactttgttatgttttgatgagtactggtgggaagtggcctctttaagtgggtaccttttgtggtcctctcactggagccaattgcctgagtcagctaaaacttggacgcgatgtgcctcactgccatagctcactcacctttgctgctgaaatggtttcccatcacattgctaataggtacaacctgtgaagggttctaggtggggaaatggcaactcaggaagaactccaaacctttagctctcctaggatattaaaatggccgttatgaagaggaagaagtactgtgtcatctattgtcctggggacctgtcaacaggaacaatagatagacatcaccaggggtgtatttctgttcaacacaaggaaaagtttctaattggagctgtccagcatgaaatggactaagcagtgcattttctttctccgatcctgactccactgtgacgggcactgcagactagagagattgtgtcctagtatgaatttaggttggataaatgatacttagggataaagagaggaaaggaatatcagaatctccaagaagctgatacattttgaaaaaatatataaaatgccacacttcaggttttcttgtgtttaatttgaaacgtccagtaacattaaagaacagcatttgatttgcttaaacaaagtagtaacagctgaagttccttccaaatcacttttctgattctctaagaggcttgcctatgccttgcagatctagcttcacctacaagacatattctgtaaggatccaggttcagcaaggtgtcagaatgtcctaagggtttctgtcccggcgctctgcctgtcccgcttgtgcacaatgcttttgcctatccctgtttctgcatagattttagtcttcccaccagggacgcaactgtcagtttcctccgtctctctcggttctattccaatctgctcatctcccctcccgtccccgctttccccaaggacctactgagatttcgatcccacaacttagtgggtcccatctcacccaggccccgcaatcctcgccttctacttgtcagcgttgtactacactctgagcaggcacccctgtgctactcacggaagcgggaccattaggtcggccattcctcctcaccccacgacacgcacccactgggtcgggccgcctccttgcagggagtctcaaggatgggctggcgtcagggaggggcccagggggcgctttcccaacactggtcgcagtcattgttggtataacggctagagacgcccagtgagttagcatggagggcagtgggaccggaaaaagacgtggaaaagctgcgaaaacgagccttcgaatcatggacgcgcgggcccagctcctcctccgagttcctcatccggggccgtcactcacatccggggccctcactcacatccgggaccctcatccggggctctcacccacatccgggaccctcatgcctgggcggaggagggggggccctcattcgggaccctgcactccgtcgccggaagtgccaccgagaagcgccggcctcggggctgtctacagcggcccgggagaggctgtggtggccccgagcgcgagtgtgtaggtgacaggacagcggccaggcccgcccctcccctcggtgagtacccggaagccgttttggggtcgcagcggggtggcagcttgttttgccttcacgggagtagaaggaggcggcgtccggccgcggccgacggtagttcgcttccccgagagtgcgcggaggcccgggtgcgaggagggcctgtttctcttcagccctggttcattcacctcgcggaccgagggccccgccgtcaggagccggcgaccgtgccctggtgcgagctggtctgta

SEQ ID NO: 38800 - DNA, 2300 bp, Homo sapien
ccctgctgcttcctgggctggtatttcctccatcactgctctggaggacaatgaccatcactgcaaggtaagattaagagaaattactgtaataagttaaagcatttcatcattttatatcgtcaggactttgcaaaggatcttacacactatggatattcaataaaaattagttgataatgattaaccaccctaaataagtaacagaaaaatggggccaggcgcagtggcctgtaatcccagcactttgggaggctgaggcgggaagatcacttgaggtcaggagttcaagaccagcctgatcaacatggtgcaacttcttctctactaaaaatacaaaaattagccagcgtggtggtgcgggtctgtaatcccagctattcgggaggctgaggcaggagaattgcttgaatacagaaggcatacgtggcagtgagccaagattgcaccactgcactccaacctgggcaacacagtgagactccgtcccaaaaaaaaaaaaaagaaaaaaaagaaaaagaaatatggatatgcttcagctttaaatacttaagaaccaaatcatagaagagtctctaatttggaatttgtggcattaaaaaaattaacacggtacaatttaatagtgtaaagctttctgtggaaactttaaaatatttaaaattggccacgtgcggtggctcaagcctgtaatcccaacagtttgggaggcacagacgggtggatcccttaagctcaggagttccagaccgtcctggacaacatggtgaaaccccgtccctacaaaaaaaaaaaaaaaaaaaaaaattaggtggcccaggcctgtagttccagctactccaaaggccaaggcaggagaatcgcttgagcttgggaggtagaggctgcagtgagctatgactgcgccactgcattccagcctgtatgacagcgtgacagcccacctcaaataaacaaaacaaaatatttaaaatttacaatcgtctttggaggctcaagttggtgcccagagaaaaatgctagttatgattgctcattttattttaattttgttttagcagagatgggagtctcgctatgttgcccaggctggactcgaacgcctggcctcaagcgatcctcccacttcggcctcccaaagtgcggggattacggcgtgaaccaccgtgacaggcccgcgtttacgtaaataaactcatttaaataaataaaacagcaggccccctaggaaatgtcttggtaacaccgtcagcccactccgatttactacacgggcttggcgaataaaactccacttttggggtcaggcccttcgctaactcagaccagctagaccggccttttcccggaatcctgagagcaacgcaggtaagagctgcggttcgaacaggtttgagcggcgtccttcaggcccaaggacgcatgagggtgccgtccccctcccaccaccctcgccctgggcccctgcccggctcccagctcggtcctcagaaggccttgcccggcgctgccctcctcccacttcccttttaggccaaggcaaagtcccaaaaggaccagtgaggacatacagaccagctcgcaccagggcacggtcgccggctcctgacggcggggccctcggtccgcgaggtgaatgaaccagggctgaagagaaacaggccctcctcgcacccgggcctccgcgcactctcggggaagcgaactaccgtcggccgcggccggacgccgcctccttctactcccgtgaaggcaaaacaagctgccaccccgctgcgaccccaaaacggcttccgggtactcaccgaggggaggggcgggcctggccgctgtcctgtcacctacacactcgcgctcggggccaccacagcctctcccgggccgctgtagacagccccgaggccggcgcttctcggtggcacttccggcgacggagtgcagggtcccgaatgagggccccccctcctccgcccaggcatgagggtcccggatgtgggtgagagccccggatgagggtcccggatgtgagtgagggccccggatgtgagtgacggccccggatgaggaactcggaggaggagctgggcccgcgcgtccatgattcgaaggctcgttttcgcagcttttccacgtctttttccggtcccactgccctccatgctaactcactgggcgtctctagccgttataccaacaatgactgcgaccagtgttgggaaagcgccccctgggcccctccctgacgccagcccatccttgagactccctgcaaggaggcggcccgacccagtgggtgcgtg

SEQ ID NO: 38801 - DNA, 2300 bp, Homo sapien
tgtgctagttactttaatattttggaaagaatagcaagcgatatgagccatagaccagattttttaatacaaataaaaatttcaggagtgtgttcaaattatttatttatagtggagtttcctcaaatttattattgtttggactattgtctagggatttggatttttttttttttttttgaaatggagtctcccaggctggagtgtagtggcgtgatctcggctcactgcaacctctgcctcccgggttcaagcgattctccttcctcagtctctcgagtggctgggactacaggcacccgccatcacgcccggctaatttttggtatttttagtagagacagggtttcaccgtgttagccaggatggtctcgatctcctgaccttgtgatctgcctgccttggcctcccaaagtgctaggattacaggcgcgagccaccgtgcctggctggggtttggatttttattgtaaaggatttccatttccttgataataaatcatcttttagatcccttttaatttttaattttaattttttgtagagatggagtctcactatgttccccaagcaggtctcaaattcctgagctcatgagatcctcctgccttgacctctcaaagtgctgggattacacgtgtgagccaccatgcctggtccatagatcctcttgattcgtttgttggttgattgactgactgactgactgacaggatctcactctcacccaggctggagtacagtggtgtgatcttggctctctgcagcctcggccttctgagctcaagcgatcattctgcctctgcctcccaagtagctgggactacaggcgtgtgccaccatgcctggctaatttttgtattttttgtagaggtgggatctcactatgttgcccaggctggtctcagactcttgggctgaagtgatctgtccgtcatggcctcccaaagtgctgggattacaggtgtgagcttctgtgcccagccatagatcccttttaattaacacttctgcgactccaattatttaggatcctggttcaccgtatgttattctaatcactttttctctgttgtttgtatttaccttttacttcactgtcaatattttataaatcatattagaaaactcaagatttaaataaaatcaaaaagttttaatacattaattttaaacaggaaaaatgtaaataaagcaagtgcatattttgaaagcaaagttttgagttaaatttaggaaataggcatttaggctagtgccaagaaaacttacacgttctttctgtgtgtaatttggaggaagggatggattttgttcacagtcattatttattttttttcagggcttgttaggaggcaaaatcataattttttttttactagcagattgtttaaaggctaggttctgaaataagactgtgcaggtttgaaaactaagcattaccagttattgtaaccttgggcaagctacttaaccactctgaatcttagtattcccatctgtaaaatggctataataatagtttctacgttttaaatttatggtattaaatgagtgaaaacctagagagctcttggcatggtactttgcacctaccaagtacttagtaaaacttaataatattttgatggtactgatgataccctgttctctcttctaaactgtgatattgtatctttacctgctaggcattttctcttttaaaaaaaattatttcagtagttttgggggcgtacaagtggttttttgttacatggatgaattctaatacatagtggtgaattctgagattttagtgcacctgtcactggaatagtgtacattgtacctaatatatagttttttatcccttgtcccttctcccaccctttcccttcttagtctctgaagtccattttatcactctgtatgcctttgcgtactcatctgctgggcattttctcttataccttcgtacattacattaaacacacatctaaaatcaaacccctcatcccacatgaagaccaccttttttgttgtgcatatgtgttttaagtgtagatatggagtaagcagccagaatttatttcagttaccaaatatcgacagacactttaaatatctcagagttaaaagttgcaaattatgttattggaattctgagaacaatattgattgctgcttcatgttacactaactttactttttaaacttctgaaacgatttcatttgacagggtggaccttaattaaatatatgtccacaaggagagttgactctaaatgtcccacaggatttcagaaacacagtaaatacct

SEQ ID NO: 38802 - DNA, 2300 bp, Homo sapien
accttggactggtgatgctgacaagaaaaaaatttacatggaagaaaaacaatatcaaccctctctagataaattcactttatcctggaactcaaagaaatttcacaaaaatgtttccaaggaaaatgagcagcctgtcacacaaggaaacaaggtactgtggtatgttcgaggaaggtatgtttgaggaatgcccccaattaatgtcctggggacattatttaatgctctagggacattatataatgtccccagaactcataaatcaataagaaagagataaacagcttaatagaaacacaaagaaaagtccgttcacagaaaagggaaggcaagaagttaatgaaagtaggaataatgactgacctcacttataatgaagaacatgcaaattaaaaaatgaggtaacatttacttcacctgtcaattggcaaaaattaaagctggataatggcagagatgatgagatatgggaaatggatgctgttaggtactgctggtggaagtggcaccatcaaaaacagtggaaatagcagatcacagaaagatatctgaggggacttcagatctcagaattatcaggctcaactatatttactatgtacaaagaaaagcttaaacatatcggtaaattcttttaaaagatcgatctagaatatttggaaaaaatcaaatagaaattctagaaatggaaaaaatatattaattaaaacaaaaatatgggtggccaagtggggaggattgctcgagcccaggagtttaagactagcctgggcaacatagtgagaccctgtccttacaaaacattttttaaagattagctgggtgtggtggctcatgcctgtagtcccagctatttgggaagctgaggtggattgcttgaacccaggagttggaagctgtagtgagctatgatagcaccgctgtactccagcctaggtgacacagcaagacctcgtctcttaaaaaacaaaacaaaacaaaacaaaaaaacaacaactgtggattttgtagcacattagaaacagctgaaaagtggattattaataaaaaggtgaagacataaacccaagtcaaatatgggcagacaagaaaaatatgaaagtgggacagagacatggaggataaagtgagatggtctaacacctatgttatattctaggagttcatttactctataagtgtatatttttagcaaatattgtaccagacactttgcaaagtgctggagaagagtaagacaagagggtttcctgtttcctgagtggattctggagtaacactgggccacccagttgagacagactgccttcaggctggacgcggtggcttgcgcctgcagtcctagcactttgggaggccaaggggggaagatcgcttgagtccagaagttggagaccagattgggcaacatagagagatccccctctctgcaaaaaattgaaaaaaagtcccagctacccaggagactgaggtgggaggattgcttgaactcagggcttcgaggttgcagtgagctatgatctcaccactgcactccatcctgggagacagaacaagacttctctctctctttctcaaaaaacacaaacaaacaaacaaacaaaaaccccccacaaaaaacagctccgatgctggctcctccaggaagccttccctgactacacatacacacacgcacgcacactacccggggtcaggagcctcttaagtgagccggttagatccagtgcgccccctatctcctctgcccctacgcctcgcgcaaggccctcgcagccggaatagtcgcgcattgaccgactggactctaaagccccttggggcaggtgctgtgtccagtagtgtatctggcgatgcaccgagtcctttccacggagggcaagcaggtgaaatggcacggaagtggaaggggcctagccacagagcgcctcgagctgggcagtcaatcctggggaagccctggtggtcttcgcctcgccgggttcggaacagcaggctgggatcagcaaccatcgagacgcatccgccgagacctccgagcatcctagagaggacacggaagcgagtctttccttacgcacctgtctaacagcgtccgcagctcacttccggaccgcggatagcactggcgaccctagcgggtgagaggcccttcagggccgcggcgggtgagagcctcttcagggccgcagcgggtggcgggcgaagtggtaaacgggcgcggggacgggttttggtgccgctacggggctcggcggcagcggggttgcagtagagcccgtctccctccgctcagc

SEQ ID NO: 38803 - DNA, 2300 bp, Homo sapien
agcccaggagttcaaggttgcactgacttacattcatgccgctgcactccagcctgggcaacatggggagaccctgtctctacaaaaataaataattagctggtcatggtggcactcgccagtagtcccagctactcgggaggctgaggtgggaggatcgcttgatcctaggaggcaaaggctgcagtgatcgcaccactggtctccagctggggtgataaaaccctgagatcctgtctcagaaacaaaacaaaagagtcacaatgggtggggggagataaagaatagcaatggggcaatttctatttgtcaaatggcagagataaaagatgaatgaggatctttcttgcctccagggaatctgttagagggagacacatgggtaaacatttgcactgtagtgcattaaatgcactagtggagtgaaccaatgcaatagctagaaaggaatgaaagagaaatctcaatgttgcagagtcaatgaatagactgaaaatataaacttggtttaagtgggggtagataaatacacaaactcacaatagaatatttagcagaagctttggggtgtgcctcctgccagctgcccattctctgctccagtcaggtgatctttccgttttctgacaagcaggatctccttcccctggtgctttggacttccaagtctgtcttcccagtctaggtcttccgcataatccacttggaggtaaataggactcattctccagtctacttcaagcctcttcttttccttgagtacttggacttagattagttttctctctttttgacttcacatttttttttcaatctgtaccatgtattttgggaggcagttatcatctagtctcttttttttcttctgagaagtaggaggagtagcactcatcctacagaagtgttttaagtattagatgaaatatgtgttcacatgctttctaaagagtaaagcctgtacaagttagaaatctttaggtcatttgtcataatggtatatatgttgctccattgtctttttcaggttgagcgcaccatcacatctaagccatcagcaagtttgttggttttaatctccaaaatacgtcttgattttgtctgactctttgccaccaccctgatctaagcccttatcatctgcttgaatcactgtaagtgccatttccctcttgccacctctagcctattccctgtcaacacacaggcagaatgacttttataaaacatgtagttcctcgctaaagtaagaaataagaataaagttcataattctttctgtggcgcaggctctgggtgatctggtttctgtctgcctctgccacctcttctggtgcagctctgctcgtcactgctgaagccacactgggatatggcttgttcttggacacccagagtaatttcttagcctcagggcttttgcctggaatgctcttagaatgactgactcattctcatccttgagtcagcctggtatcatgtctttagaaaagccttcttcaagtcagttgccccctgttaacagagcaccctacttattttctttctagaacttgtctccacttgcagtttttaaaagagttgcttccatttgactttttctgtctgctgtaccagcatatgagtttcaggagggtaagctcccagtgtgtcttgttttctattttatttgttgtttctgcctgcctcttgtgtgtgtatatgtgtgtgtttgtgtgttgcatgtatgtttcctttagtattggaagagtaggccctggtgactcacccagttataacccattatatattattctctgattgtagtgttattctccagtgagatcctaagttatttgtgggtataaaagcaaaatcttagacattttctgtttagtctctgtacctaatagttgcttagcaaatgattactatgttgaattgacctgacttttgggatctgtgttcagtcttttgaaaatgccttgtaaaaggtaattactgtgttctccagtggaatattccttgatgtagagacagaactgggatgggctgacctttcatgtgtctcttgttctcaaaagggtcattgatgcagtcattctcagtctcctcggagggagtctgaagatgcttaaagagcatccagagatggcggaagctcctcagcagcagttgggtattcctgtggtgaaactggagaaagagttgccatggggcagaggaagggaggaccctagtccagagacttttcggctgaggtttcggcagttccgctaccaggaggcagctggaccccaggaagctcttagggagctccagga

SEQ ID NO: 38804 - DNA, 2300 bp, Homo sapien
agtcagcctggtatcatgtctttagaaaagccttcttcaagtcagttgccccctgttaacagagcaccctacttattttctttctagaacttgtctccacttgcagtttttaaaagagttgcttccatttgactttttctgtctgctgtaccagcatatgagtttcaggagggtaagctcccagtgtgtcttgttttctattttatttgttgtttctgcctgcctcttgtgtgtgtatatgtgtgtgtttgtgtgttgcatgtatgtttcctttagtattggaagagtaggccctggtgactcacccagttataacccattatatattattctctgattgtagtgttattctccagtgagatcctaagttatttgtgggtataaaagcaaaatcttagacattttctgtttagtctctgtacctaatagttgcttagcaaatgattactatgttgaattgacctgacttttgggatctgtgttcagtcttttgaaaatgccttgtaaaaggtaattactgtgttctccagtggaatattccttgatgtagagacagaactgggatgggctgacctttcatgtgtctcttgttctcaaaagggtcattgatgcagtcattctcagtctcctcggagggagtctgaagatgcttaaagagcatccagagatggcggaagctcctcagcagcagttgggtattcctgtggtgaaactggagaaagagttgccatggggcagaggaagggaggaccctagtccagagacttttcggctgaggtttcggcagttccgctaccaggaggcagctggaccccaggaagctcttagggagctccaggagctctgtcgtcggtggctgaggcccgagttgcacaccaaggagcagatcctggagctgctggtgctggagcagttcctcactatcctgccccgcgagttctacgcctggatccgggagcatggcccagagagtggcaaggccctggccgccatggtggaggacctgacagaaagagcactggaggccaaggcggtgggtgaggaggggatccaggtctggcgcccttggcgtgggcagggaatgttaaagaatccaaagatttgaggaagcagtaggagtggacgaggtgtggagccgccctcctctgccctcagactccctgaggttctttttggagagcagtggcgttttcagcaagaaaggccattcccaggggagatgctgccatgcagaagggcctgaagcctctgtttggtcatgagggcagaggcctggccatatttcccttgtgggcatcaggcaaaaagaaggcagttgtgattgtttttggggtccctcatagacctgaccctgctttggacagagatgcctctgggaaggcagagaatcccacctggggaatatttttccggaaaagggttgtccatggcagtactgtttctctgtggctcatagggctcctgtaacaattctctggtgctgctctaatgacaccaagtgatttggcaccgcacgtgcttccttgaggttccagccatatttcggtcactttgtggtacagccccctgatggatgactgggaaaggagagcaggactgatgacaccgtcttgctcacaagcccccgtccttctgtagttcagcctcccgtgcacactctcgtcaccctgacttcctgtcttcagaatcctaagagaattttttcctactcaactcaggagcttaaaagtggacccagaaatgccttgtttttgtgagtacttctcagtgagagagtcctcctgatttttcttgctctttttaatttattatttttgagacagggtcagtcaacagcctaggctggagtgcagtggcacaatcctagcttactgcagccttgagctcctggctcagttgatcctcccacctcagcctcctgagtagctgagaccacaggcatgcatgcctggctaatttttttattttttgtagagatggagtctcgccatgttgcccaggcttcctggctctctttaaagcaactatttctcactggcctgttcactgcagggtctaggctttgcattttttattttcagctttttcaattaggaatttttttttctagtagtgagtatattgtgttaaaatcctcagcaggataatatttgggcttggtgatggcaggtagaggggacccttgtcaaatggcgtggacagataaaagttgctcagggcctgatgcatgagtttagcttccttttcacttcctcactaatgtcctggggaagagctcagctgatttttccttcctctcc

SEQ ID NO: 38805 - DNA, 2300 bp, Homo sapien
tctgtcacccaggttggagtgcagtggcgcgatctcagctcactgcaacctttgcctcctgggttgaagcaattctcctgcttcagcctcccaagtagctgggcctacaggcatgtgccaccatgccctgttaatttttttgtatttttagtggagacggggtttcaccatgttagccaggatggtctcgatctcctgacctcgtgatctgtccacctcagcctcccaaagtgctgggattacaggcatgagccaccgcgcccagcccacgtagctttattttgttattgaatctcataggaggttattcccagagtgtgactgggtagcatgggtagccctggacggacagggccgggacaatcttgccagctgagaacaggagacacccaggccccagctgagaatagggcaagggacacccaggcccctgtgcatgggaaagtgtggtaccagagtgaaaagggattctgtctggagtcttctggttcctgaggttgtgagcatctggtaggggacacatttgaacgagctaacagcataacatcactgatccttctgatctttctcatgctttttgtccctgctcagcactacctgttctgcaggcgggtcctggcctccccgcagtgaatcccagagaccaagagatggcagctgggttctttactgctggatcgcaggtgagctctgactccctttgcagaaatcatgaccgttgctttgattgaggttcaccttccccaaggtttctctgcacaacagtgttcccttcccgccccaagttgagtcattctcccttcctagtcccggtggacctgatggtgtggtttcctccactgaaccatcagccgcagttgttaatttacatcgaaccttatgtctgtcgcccaggctggagtgcagtggcacggtcttggctcactgcaggctccgcctcctgggttcacatcattctcctgcctcagcctcccaagcagctgggactacaggcacctgccacctcgcctggctaattttttgtatttttagtagagacggggtttcaccgtgttagccaggatggtctcgatctcctgatcttgtgatccacccacttcggcctcccaaagtgctgggattacaggcatgagccaccgcgcccagccacagatggactcttacaactgttacagatagaaaccccctagggctatctaggctgtgctgattggccccgagataaccctttgtgggtgccgtttatgggtacttctgctgctgatttttctgttttggaaactttcctgtcccctaacctcagcaggaatgtggctgactcagggttggggctttcagaagcattgagcagggtggtctctttggccatacaggccacactaggagttggacctcgttaacattactcatctgccacaaatgaggtaactgaagcatagatggggtgctctcttttccacagggtgctgagcactagtagcagggaggtgggggctttccagtggggcaccttcctcaaggaggcgagtctaaaagagttctttgaagaagaaaaggtgtttggcagaaaaaagaaggggatcaagtctggtcctgctcaagccgtatttgggcaaggctggatgccagcatcatttcccttttcctgttctccaaggatgtactttggaggggatgaggaatgacatcagtgctttttaatttggttggatcctcccttgtaccataatagttcttcgtggtgcagtgagtgagaaattgaggatgcatttattttatcacagccttgttcttaagacagggcttggccgaatgtgaactttgttcttgatgagaaggtaaatagcggctgccaggctctgtcaagcatgaggtgtgagtgggaggctgctgcagagtggaaatgaggtgacttagttgttaggggcaagctgagccccagccacagaggctcacaactgcagtggctcaaacaagtggattactcccattcaactgttgggaggaagctggttgggaggaagttggattacagacatgagccactgtctctggcctaggattctttctttattcatagcaatctcctattgttgcaggggttggggccatttaaagatatggccctggccttccctgaggaggagtggaggcatgtgaccccagcccagatagactgctttggggagtatgtggaaccgcaggactgcagggtctctccaggtaagactgtctccacccacaggtgaggaactggggagttctgaaagctcaggtcaggggtcctgccgtagctctgg

SEQ ID NO: 38806 - DNA, 2300 bp, Homo sapien
gagttaattattctactcttgttctgctgaagcacagagcttacatatcttatatcatccacactcaacacatgctactgtagttgtctgataatgggtctctgtcttcctatgactgggctccttgacctcagaggtgagtctaactcagcttggtgtctccatcacccccagcatagggccagctccatcactggcaccagataaccaccttctgagggagtagatggaagatgattcagcagatagttctgaaagtctgtggctctttatgtgtcttgactggatatgtgggtttcttgctgcatgtatagtggaaggacggtaagaggtgctgattttaattttccatatctttctccactcagcatctttggggcctacagcatggatgtgattactggcacatcatttggagtgaacatcgactctctcaacaatccacaagacccctttgtggagagcactaagaagttcctaaaatttggtttcttagatccattatttctctcaataagtatgtgggctattatttctttctctctttttaaaaataactgctttcttgacatataattcacatatcgtataattcatccacttaaaaggtacaattccattgtttttaagataatcaaaaatatgtatgaccattactattgtaaactaaaatgtttttgtcaatctagagccctcacacactttagctgtcaacaccccaccacaaaccccactgccctaagcatccaataatcaactttctgcctctatagatttgcctattctggacacttcatagaaataatatcattgatttttctctgttgttttttattctctatttcatgagtttattttagtctgttattttctttcttttgctggctttaggtttcatttgctcttcttcttttagtgttttgtggtgtaaataattataatcaatttgagatattttcttcttttaaatttagatattacagctataaatttccctctgagcactggtttggctacatcctgtgttttggtacatcatgccttctttttgttcatctcaaaacaatttcttgttgcccttttgatttctgctttgactcactggtcacttaaaactgtattgtttaacttccacaaatgtatgagtttcccaaatttctttcccttattgatttctagttttattccatggaagttgatgtacatatgctgtgttaattctatcttgactatcatttcctgaacagcatgattaagttaagcagcagattatggtctacattaatccaaaaactctagtccaatagataaaggctaagaggtcagggaatttaattctattactttggtcactccaaagactcagaaggtgccattgatctcactgctgtagtggtgtttcctatgtatagacctgcccttgctcagtcgccggcctgaaagaagggcaaacatgataaaaggaatgggttccagttgagaatcatgatgttcttattcttattactggtagagaaaattataattgctccaggtaaagtttgcattttcaatgatttccttttgtttgttttgtttttcccacagtactctttccattccttaccccagtttttgaagcattaaatgtctctctgtttccaaaagataccataaattttttaagtaaatctgtaaacagaatgaagaaaagtcgcctcaacgacaaacaaaaggtaaaatctgatggtggttaaatgacgatgtttaggttttgataaatttagattttatacacatgatagagcatgtatctgtatttttaaaaataaagacagagaacttatgtttagaacaagagaagccatttggtagaaataaagaaggagattggggaaggagatgagaatgagtcagagagatagcatttaaaacttgaaatcaggcacaacaattagtatgtcatgatataaacagtattgagataaaattttaccacttctcttccctttaataaattgtcaaaggataaagtttcctgtttgaaaatatattttactggtattgtgctttcctcatatcacagattggtaaagaatcattttaagtccaagactcttattttacatattctgcaattaaaggtcctatgaggctacctgccgactgctgacatgtagtgtgtggtaaatgtgagtgtttcacagcctggagtgaacaggggtcttctctgagaattgaggttgcaaggctggctaactcagctttgccttcacgagccctagaggccagccgaaggatgtctgcaggtcagggagaca

SEQ ID NO: 38807 - DNA, 2300 bp, Homo sapien
tacacagaaggctgaggtggcagaatcacttggacccaggaggcggaggtggcagtgagctgagatcatgacaatgcaccccagcctgggcaagagagtgagactctgtcagaaaaacaaaaaacaaaaaaacaaaaaacaaaactgaaatctgagacctcaaacgatgaaactgctacaagaaaacattgtggaaactcttcaggatattggtctgggcaaaactttctgaagaactaccccacaagcacaggcaaccaaagcaaaaatggacaaatggatcagatcaagttaaaaagcttctgtaccacaaagaaagcaatcaacaaagtgaagacacaaaccacagaatgggagaaaatattttcaaagtcacactctgacaacagattaatagccagaatacatgaagcgctcaaacaactctgtaaggaaaaatctaataatccaatcaaaaaatgggcaaaatttgaatagacatttttcaaaagaagacatacaaatgccacataggcatatgataaggtgctcaacatcactggtcattagagaaatgcaaatcaaaaccacaatgagatatcatcttaccccagctaaaatggtttttatccaaaagacaggcaacaacaaatgccagcgagaatgtggagaaaagggaacccttgtacactgttggtgtaaattagtgcaaccactatagagaacaatttggaggttcctcaaaacattaaaattaacattaaatagagctaccacaatatccagaaatccccatgctgggtatatacctggaagaaaggaaatcatatattgaagagataacatcactccaatattcacaatagccactattcacaaatgccaagatttggaagcaacctaagtgtccatcaacagatgaatggataaagaaagtactccaattatacacaatggagcacaattcagccatgaaaaaagcatgagatcctgttatctgtaataatatggatggaactggaggtcatcatgttaagtgaaataagccaggcacagaaacacagatattgcaagttctcacatacttgtgggatctacaaatcaaaacaactgagctaatgtctgggccttagtcagtgttgtacccaagtactgggagcacagcttttaaaatacatcatgaatgctttaatacaggaatgaatagatgagaggcacaaactggttgggtgttcttctgatacacagtatcttccttgacagattcagtacaactctcaacaggtaagtctcttcatgttatgttaccttatgaggaattaagtggcagaacatgatttctattattttcctttgcagaacaagaccaactttattagttgggacacagtgtggctgcatttgagtcccaagcaaccattagtctattgctatcaccacagagtcagaggggatgagacgcccagcaatctcacccaagacaactccaccaacattcctggttacccaccatgtgtacagtaccctgctaggaaccagggtcatgaaagtaaataataccagactgtgcccttgaggagctcacctctgctaagggaaacaggcatagaaacttacaatggtggtagagagaaaagaggacaataggactgtgtgagggggataggaggcacccagaggaggaaatggttacatttgtgtgaggaggttggtaaggaaaaattttagcagaaggggtctgtctggctgggcttggaaggatacgtaggagtcatctagagggcacaggtacactccaggcagagggaatttcgtgggtaaagatgtgtaggtgtggcttgtgaggatggatttcaattattctagaatgaaggcagccatggaggggcaggtgagaggagggttaatagatttcatgccaatggctccacttgagtttctgataagaacccagaacccttggactccccgataacactgattaagcttttcatgattcctcatagaacatgaactcaaaagaggtcagcaaaggggtgtgtgcgattctttgctattggctgcagctatagccctgcctccttctccagcacataaatctttcagcagcttggctgaagactgctgtgcagggcagggaagctccaggcaaacagcccagcaaacagcagcactcagctaaaaggaagactcacagaacacagttgaagaaggaaagtggcgatggacctcatcccaaatttggcggtggaaacctggcttctcctggctgtcagcctggtgctcctctatctgtgagtaactgtccaaactcctctctt

SEQ ID NO: 38808 - DNA, 2300 bp, Homo sapien
aatggcaggtgcaccagagcagcagaggacctaatatctcccttcctgttaactttttataatattttattgtgatcagtatcagttgggaagctacttgcagtcactgagcctcagtttctacatctgtaaactggggatagtagcatggccctatttaatgtgctcagcgaagccactgaaaggagacagaaatgtaccagaattccctggacttttatcctacttctcctggggattgtcacccacctacccgtgtctgtcctttgttgctttgacgctgtcacttcttttcttaggtacctctctgtagggctccattattccagggattccagagttacagcacatgcatacctccatccaagcatgtttatttgtctcctgcttcactaggctgtccccaaggaacatgtggctcccggcacatacctggcacaacactgcacatgacattcacccacttggccttgaatctgacaaggaatctggcatgatgttcacctgctgaggccaggtgccgagcagccctggaggcttaggggccagagggatgggaaaaggtgtctttctggggtgagtatcagtttctgcaggagtgctgaacctgagaaagaataaagagagaaggaagtgaacaagcacagcttaaacatcatctgtttctactgagttttaacaactctgagattttgtttgtcatggaatccatttctcaggccaagcagacacagaacttgggtgtgagtgatgataatgagctgatataattttcacaccctcatcactgagatctctcccatcaggaatgggtcacagggctcacaggtggcagcaactgttattacaggcctcatctctaccagctcctggcacctgctctcctcccattagaaaatcctccacttgtcaaaaaggaagccatttgctttgaattccaattccaccctcaagaggctgggaccacctcattggagtccttgatgctgtgtgacctgcagtgaccactgccccattgttgctggctgaggtggtttgggtcaacctggccatctgggcagctgttctcttctcttctttctcccctactgtttccagacatgcagtatttccagagagaaggggccactctttggcaaagaacctgtctaactttctatctacggcaggacttttgaaagctacagaggaagaagcacaaattgatgctattccactaagccatcagctccatctcatccatgccatgtctcttttttaggggtcctcttgccaacagaatcacagaggacaaatctgaaagtgcagagacagcagctgaggcacagccaagagctctggctgtattaatgacctaagaagatggagtggtcaccagaaagtcagaggaagtgacacacaggggcccagcaatctcagccaagtcaactccaccagcctttctggtccccactgtgtgtacagcaccctgatagggaccagagccatgagagtgagtaagaccagactatgcccttgaggagctcacctctgctaagggaaacaggcctggaaacacacaatggtggtaaagaggaaagaagacaatagaactgcatgaaggggatggaaagtgcccaggggaggaaatggttacttctgtgtgagggggttggtgaggaaagactctaagagaaggctctgtctggctgggtatgaaaggatgtgtaggagtcttctagggggcacaggcacactccaggcataggtaaagatctgtaggcatggcttgttgggatgagtttcaagtattctggaatgaggacagccatagagacaagaggagagttaatagattttatgccaatggctccacttgagtttgtgataagaacccagaacccttggactccccagtaacattgattgagttgtgtatgattctacatagaatattaactcaatggaggtcagtgagtggtgtgtgtgtgattatttgccaactgccgaggtggagaagcctcttccgactgcaggcagagcacgggggccctgctactggctgcagctccagccctgcctccttctccagcatataaacaatccaacagcctcactgaatcactgctgtgcagggcaggaaagctccacacacacagcccagcaaacagcagcacgctgctgaaaaaaagactcagaggagagagataaggaaggaaagtagtgatggatctcatcccaaacttggccgtggaaacctggcttctcctggctgtcagcctgatactcctctatctgtgagtaactgttcaggctcctct

SEQ ID NO: 38809 - DNA, 2300 bp, Homo sapien
atcactgagatctctcccatcaggaatgggtcagggagctcacaggtggcagcaactgctattacaggcctcatctctaccagctcctggggcctgccctcctcccattagaaaatcctccacttgtcaaaaaggaagccatttgctttgaactccaattccacccccaagaggctgggaccatcttattggagtccttgatgctgtgtgacctgcagtgaccactgccccatcattgctggctgaggtggttggggtccatctggctatctgggcagctgttctcttctctcctttctctcctgtttccagacatgcagtatttccagagagaaggggccactctttggcaaagaacctgtctaacttgctatctatggcaggacctttgaagggttcacaggaagcagcacaaattgatactattccaccaagccatcagctccatctcatccatgccctgtctctcctttaggggtccccttgccaacagaatcacagaggaccagcctgaaagtgcagagacagcagctgaggcacagccaagagctctggctgtattaatgacctaagaagtcaccagaaagtcagaagggatgacatgcagaggcccagcaatctcagctaagtcaactccaccagcctttctagttgcccactgtgtgtacagcaccctggtagggaccagagccatgacagggaataagactagactatgcccttgaggagctcacctctgttcagggaaacaggcgtggaaacacaatggtggtaaagaggaaagaggacaataggattgcatgaaggggatggaaagtgcccaggggaggaaatggttacatctgtgtgaggagtttggtgaggaaagactctaagagaaggctctgtctgtctgggtttggaaggatgtgtaggagtcttctagggggcacaggcacactccaggcataggtaaagatctgtaggtgtggcttgttgggatgaatttcaagtattttggaatgaggacagccatagagacaagggcaggagagaggcgatttaatagattttatgccaatggctccacttgagtttctgataagaacccagaacccttggactccccagtaacattgattgagttgtttatgatacctcatagaatatgaactcaaaggaggtcagtgagtggtgtgtgtgtgattctttgccaacttccaaggtggagaagcctcttccaactgcaggcagagcacaggtggccctgctactggctgcagctccagccctgcctccttctctagcatataaacaatccaacagcctcactgaatcactgctgtgcagggcaggaaagctccatgcacatagcccagcaaagagcaacacagagctgaaaggaagactcagaggagagagataagtaaggaaagtagtgatggctctcatcccagacttggccatggaaacctggcttctcctggctgtcagcctggtgctcctctatctgtgagtaactgtccaggctcctcttctctgtttccttggacttggggtgctaatcaggcctctctttcccttatctgttttgaagatcaaaaaagatgttcaggccgggcgtggtggcttacacctgtaatcccagcactttgggaggctaaggcaagtggactgcctgaggtcaggagttcaagaccagcctggctaacatggtgaaactctgtctctactaaaaatacaaaaattagctgggcatggtggtgcacgcctgtattcccagctacttgggaggctgaggcaggagaattgcttgaacccggcaggcggaggttgcagtgagctgagatcatgccagtgcacttcagcctgggtgacagagtgaggctgtctcaaaaaaaaaaaaaaaaaaaaaagatgttcaaggagcagtagcttaagtgttggatgctacaaacatatagaggttattgtagatcttatgcagctctataaaggaataaataagcatcttccccatccatctttagtggcaagaagggttttgggatagcattgattgaggatgatctacttgacaatagtttggacccaaggaggataaggaaggaaagtagtgacggatctcattccaaacttggctgtggaaacctggcttctccttactaaactagaatttggattttacattttcccctttatgttgcagtagaagaggatgaatcctctcactggtgggatcctgccatcctagagcaggtagagagaagagtcactccccactgtgggtagtggaggcttctcacatgtcacatttcact

SEQ ID NO: 38810 - DNA, 2300 bp, Homo sapien
tggcaggtgcaccagagcaggagaggacctaatatctcccttcctgttagctttttataaagttttattgtgatcagtagcagttgggaagctacttgcagtcactgagcctcagtttctacatctgtaaactggggatagtagcatggcccctacttaatgtgctcagcaaagccactgaaaggagacagaaatgtatctaaattccctggacttttatcctacctctcttggggattgtcaccaccttcccatgtttgtcctttttggtttgatgcttgctgtcacttctttccttaggtgcctctctgtacggctcttttatcccagggattccagagttacagcacatgcataccaccatccaagcatgtttatttgtctcctgcttcactaggctgtccccaaggaacatgtggctcccggcacacacctggcacaacactgcacatgacattcacccacttggccttgaatctgacaaggaatctggcatgatgttcacccactcaggccaggtgccgagcagccctggaggcttaggggccagagggatgggaaaaggtgtctttctggggtgagtatcagtttctgcaggagggctgaatgtgagaaagaataaagagagaaggaagcgaacaagcacagcttaaacatcgcctatttctattgagttttaagaacgctgtgattttgtttgtcatgcaatccattcatcaggccaggcagacacagaacttgggtgtgagtgacgataatgagctgatataattttcacaccctcatcactgagatctctcccatcaggaatgggtcagggagctcacaggtggcagcaactgctattacaggcctcatctctaccagctcctggggcctgccctcctcccattagaaaatcctccacttgtcaaaaaggaagccatttgctttgaactccaattccacccccaagaggctgggaccatcttattggagtccttgatgctgtgtgacctgcagtgaccactgccccatcattgctggctgaggtggttggggtccatctggctatctgggcagctgttctcttctctcctttctctcctgtttccagacatgcagtatttccagagagaaggggccactctttggcaaagaacctgtctaacttgctatctatggcaggacctttgaagggttcacaggaagcagcacaaattgatactattccaccaagccatcagctccatctcatccatgccctgtctctcctttaggggtccccttgccaacagaatcacagaggaccagcctgaaagtgcagagacagcagctgaggcacagccaagagctctggctgtattaatgacctaagaagtcaccagaaagtcagaagggatgacatgcagaggcccagcaatctcagctaagtcaactccaccagcctttctagttgcccactgtgtgtacagcaccctggtagggaccagagccatgacagggaataagactagactatgcccttgaggagctcacctctgttcagggaaacaggcgtggaaacacaatggtggtaaagaggaaagaggacaataggattgcatgaaggggatggaaagtgcccaggggaggaaatggttacatctgtgtgaggagtttggtgaggaaagactctaagagaaggctctgtctgtctgggtttggaaggatgtgtaggagtcttctagggggcacaggcacactccaggcataggtaaagatctgtaggtgtggcttgttgggatgaatttcaagtattttggaatgaggacagccatagagacaagggcaggagagaggcgatttaatagattttatgccaatggctccacttgagtttctgataagaacccagaacccttggactccccagtaacattgattgagttgtttatgatacctcatagaatatgaactcaaaggaggtcagtgagtggtgtgtgtgtgattctttgccaacttccaaggtggagaagcctcttccaactgcaggcagagcacaggtggccctgctactggctgcagctccagccctgcctccttctctagcatataaacaatccaacagcctcactgaatcactgctgtgcagggcaggaaagctccatgcacatagcccagcaaagagcaacacagagctgaaaggaagactcagaggagagagataagtaaggaaagtagtgatggctctcatcccagacttggccatggaaacctggcttctcctggctgtcagcctggtgctcctctatctgtgagtaactgtccaggctcctctt

SEQ ID NO: 38811 - DNA, 2300 bp, Homo sapien
ccacaaaggagattaatgggagaaatagcatacatattcattcatatgtttatggaggagaaatacagagtgattcccccttcttgagaaacagtaagtctcaaagaaagagactttctttcacccccttttatccaggggtaagaacaactagctgaacaaaactgacagctgtcaatcaagtgggaagtccaaaactcatgagagacccacccagttttcaatcatcatgaaggagccaggggctcaatggcccctgctggtaccaagttgccaggtccctgcaatgttccagacaaagacagtgatggtaaaaagggaaaagtggaggtagaatgcaagtgcagcagcaggaagatatgggactctccattttagggtcttcaagtttttcagattttctgagacatgggttaactcttcaggttagtctcctagtaaaacacagccaaagtcccaattgtgtttgaaactttcaaaaatgcagattgaaagaaagcctcttactgtctttgagaagtccagactcctcttatcctcattgcatgcttcggagttcaatttaggtgtatctctcacatccatttctgtcgagcctttacctttaaattttaaacttgaaaaactgccagagtacctgatagtgattgatcagagacagagccaccgaattacccgatggcaggccttagagaccatggccttaggacctaggttatgcatagccctcaccttaggaaggggtcccttcaagggcaaataaaatgcgatagtccttgcaacactgaagcatggagtatcctgtgaggcatgaacttgcttgatgcagcatgaatgcaccccaagaaacatgggcatgcccctccaagtgcaagcataccccacaagtgggtagccatagagccagaagggcaggttccctgaaaaaaataaagacctcaagacctcatcctaaatgtgagatcttggatgtaagaggatttactgatttttccacaaaacagccaggccaggaagataactgagcttagaggactcttgctggtgccaatgcattgattagtccagatgacaagggagaggatcttgagagccaattttgatcccttcctcatcaccaggaaatatgagtaaagattgtgggatctgtggaggacagagggagagcttcattttctataaaacacagtctgcagattgaggagatgcagcctcggaggtggagagctataaagtcaaaaaccacagagcaggatagaggagtcagaggagtgaagaaaagagtcttgattagacagcctttaagccccaagtcacatgtctcttaattggctgttcctaggtggtcagttagttcttaccacatgatctgttggtgagcagttggaaaattcccaggtacagattttttcagaaaatgttatttgacttggctacagaaaaataggttttgcaacacttactaagaacacagagaacatgaccatcacctaaacctgccatggcctcttgggtttgtttttgcttttgaggcacagggagtccttcttgtctgtttacctggaggcatgatttggcaacctagataacaaacagagataggctttctaaaaagaattatttttatttgggaataaagcattgcaatgggaatatgcgtgccaaggtaaactatgtgcttattcaggtaggtaaagtaagacaaagtttaaaaaaataatgagaaggattacatatttgttttggaatgattatccttggctataaagatcaataacaagactgacatcagtttgaggttggacaggcagttgctgggcagatgttcttgcagaagtatttttctttaggttcctgagaatctataacctttgggcttaccaatagcagtgactgatttgtttactgattgttcacagaataggaaatcaaaggaggccaaaataaggacagccataattatttgccaattgtcaatttgaaaagggtacccaaatccctccatatgaggagtagcataagtggcttttctactggctgccgctgtagacccacctccttctccagcacataaatatcgctgttaacattaactaaatcacctctgggcagagaaacaaagctctatatgcacagcccagcaaagagcagcacacagctgaaagaaaaactcagaagacagagctgaaaaagaaaactggtgatggatctcattccaaactttgccatggaaacatgggttcttgtggctaccagcctggtactcctctatatgtgagtaactatgcaggcatgtttgc

SEQ ID NO: 38812 - DNA, 2300 bp, Homo sapien
ctgcatatcaattctgctggagaccactggagttacaccatcagtaatgggagggggtggggctactctggaaaggatgatcagggaaggtcttcaagctaaaagctaaaaggatctaaaggatagatgtgggtagagaaagagaacagacttgaaacaaaagcaagaaagccagtatggctgaagcagagtaaggtaaagtgatttattcaaccggagcttcttaacccatgagataggacagataatccccaaattcaaatgttacaggattttcccaactgatgaaggaagctagtaacaaaacccagcctcatcattacaagctaggcttttcccaaatcatcagctgtctatgacatttacagatacagacaggcactgtccaatacagtatccatttagccatacaagcacctgaaacgtggatattccaaactgctatgtgttgtaaatgtaaaatacacaccaatttcagacctattatgaaaaaggagtataaaatatctcattgaggccgggcgtggtgactcacaccttaatcccagcactatgggaggccaagcggggcagatcacttgaggtcagcagttcgagaccagcctggccaagatggtgaaacccctctatactaaaaaacaaaaattaaccgggtgtggtggcgtgtgcctgtaatcccagctactcgggaggctgaggcaggagaactgcttgaaccccggaggaggaggttgcagtgagccaagatcacgccactgtgctccagcctgggcaataaagtgagactccatctcagaaaaaaaaaaaaaatctcattgataattttcatctcagctttgaatatttggggtaatcagattaaataaaatatattattacaattaacgtcacctcgtttccttatcttaccagaaagattttaaattacatatgtggtttctattggacagcagcggcacacaccctctcagtatgtttttctttattatgagctccccaagggccagtttattgaaaattctgcacaatgattgctgaggtttgcacctcccctcctctcattccagttttaaccctagctctgaaattcgtgttttgcttaacttctttgagtttcaggggcttttcatgcttccagtaggaatgacagccacttcgtggctcttttaggagcattaagtaaactttatcgggcaacactgacagccccgtcatagtcaccgcgacggccagctcacccggtagctctcgaaggcctcgtcgatgggtgccatggcgtgagtctggtgctcctgggactccctgcacaccaggcacactggccgctggtcgtcctcgcagaagagccgcagcggctcccagtggcggccgcacaggcccgggggcacggggcccaggcgccggcgctgcgtcttctcagtcagcctggccagggcccagttgggtcgcagcgcggcgggcgccgatgggtgccgacattcggggcaggggaacgggccgccgcccggcgcccagttgcggtgcaggcagccgcggcagaagttgtggccgcactcgatggacaccgggtcctggaaatagtccaggcagatggggcaggtcaactcctcctggatgtcctcagcttccatgctgcttccctgccgcggagacggagtccgacgtgaggcgcgggagaggccagcaagctgcgagcggccgcggggaggccagacgacttccgaaccgccgtcaccgcctcacgtaaaagggtacaacgcagtttctcttccggggttcaggacccaaaaagaacgcacggacgttgcccggcctgagcgcgcaagaccggaagctgctgggtatccgcgccggaaccgcgagggggttggttcaggcctaggcgcggggcaggacgggaccggtgagtggctcctccaaacagctatagagacccagaaatgcctgtggaaagctacagaggacttgggcaaggcgttagagccggacgttgtggtccctgggggagccaaccggggaggtgcctatgatctttctttccaagtttgagggttcaggtctgtgttcgcctgctggttagaccgatttaagttttagagtcccaggagttctgggcgagctgcagcctaggggcctggaaggccaggaagacttgaaggatctgtgttggtaggcctggagtttggctaacgtggggatgatttggattctgagatgcagatacattgcctttttggtatccaatttgaaaagtagcaaccattttgctatcccaaagaacatccatggaggctttcaac

SEQ ID NO: 38813 - DNA, 2300 bp, Homo sapien
tatggatgtcaactcgatgcagagtggacagtggtaattttgtaatatatcaactttgctaagctaaactatgtttcccagaatttcctttccttttgtttctggttagaatagcccaacagagacatggttgtgtaagtcttgaaggggagaactgaagcatccctccagttttatacttgaaacggtggtgcagggacactaggtgctactgcggctcatctactttgtcaccaatcagctggttcaccttgttgggatggggcagaagcttttccctgagtcttccttcaccttttttgattcctgagctgtgtgtgtgtctagtcctgtggcaaaaagtgtcagctcctctagcaaggatactcatatctttaaagttggagacagtgaaagaatgaccagctcgtgtcttaggttccaactcatttttgctcttccctactttatgttcatcttcccttcttaactgcttgccctgcgaacataaagaaacatagtgattccacttctctgaatgaaccttggctggtatacagacttatagacattttgtgatggagaaaaattgttaattagggagcctcacttagtaaagaaggaaggtcatctctggtatggcaggaataaagacataaggattttaagggatttacctgaaaagatttaaatgactactgtaaggggaataaatactttgcaggaatgctgaaacttctcattcaatacttaggtaaacatatagacacacagatgccataaacactcatggtaaacatcagtaactgttaagagcattccttcctgcttggtccctattaaagaaccagatcccttctccatagagtattccaatttgcaaagaaaatccattcattagttgtccaatttaaatgttttagaaatattcagtggaactttcatcaataacccccaaacagatacctcaagaacccctttttctaatcatttaatcatactacttactgagaaaaattattataggaaaggcagtatttgatattgggacataaaaagaatgaaaaatctgttaaataagcaaaagcccattagcctgaggctgtcttggtacttgagttcccatataacaaaatacaacctgacttagtatgtaaacgaactgaagcctaacttactttattttttataacagctgggtttcagccaatcacggccgagcttcagcaaataacagacagccaactgatcagaccatgccccaataaggcaaatgcctcatcatatcattgtcaaataaggcagacacctagatgttagctaatgaggtgatttctctactttgcttcctataaaagctagcaggtcatactgctggacagagctctctgaacctcttttggttctgagtgctgcccaattcatgaactgttctttgtgcaaatagcttctattaaatttgtcagtccagagttttttttgttttaaacaaatattcacaagaaaaggaagaaagtgggaagaataaaaagcaaagcacctcagaaacacaagatcgaaaatccacttaagggatatagataattccctgaaacaggtgagcatattatttgttgaaagcctccatggatgttctttgggatagcaaaatggttgctacttttcaaattggataccaaaaaggcaatgtatctgcatctcagaatccaaatcatccccacgttagccaaactccaggcctaccaacacagatccttcaagtcttcctggccttccaggcccctaggctgcagctcgcccagaactcctgggactctaaaacttaaatcggtctaaccagcaggcgaacacagacctgaaccctcaaacttggaaagaaagatcataggcacctccccggttggctcccccagggaccacaacgtccggctctaacgccttgcccaagtcctctgtagctttccacaggcatttctgggtctctatagctgtttggaggagccactcaccggtcccgtcctgccccgcgcctaggcctgaaccaaccccctcgcggttccggcgcggatacccagcagcttccggtcttgcgcgctcaggccgggcaacgtccgtgcgttctttttgggtcctgaaccccggaagagaaactgcgttgtacccttttacgtgaggcggtgacggcggttcggaagtcgtctggcctccccgcggccgctcgcagcttgctggcctctcccgcgcctcacgtcggactccgtctccgcggcagggaagcagcatggaagctgaggacatccaggaggagttgacctgcccca

SEQ ID NO: 38814 - DNA, 2300 bp, Homo sapien
gcagagctgtgagtcaaataaacctctttataaatcacccagcctcaggttctcctttgtggcaacacaaaatggactaagacacttggtaagggctccacctcttagtactatcacactgagtacagcacttccacctttccacctcttaatactatcacattgagtacagcacttccaccttatctgtgggagatatgttccaagacctccagtggatgcctgaaattgtggatagtaccaaactccatatatactatgttttttttccccatatgtacatccctatgataaagtttaattacaaattagcacagtaagagattaacaacaataactactaagaaaatagaacaattgtggctgggcatggtggctcatgcctgtaatcccagcactttgggaggccgaggcaggtggatcacaaggtcaggagactgagaccatcccggccaacatagtgaccctgtttctactaaaatacaaaaaattagcccggcgtggtggtgcgcccctatagtcccagctactcagcaggctgaggcaggggaattgcttgaacctgggaggcagagattgcagcgagccaagatcgtgccagtgcactccagcctggtgacagagcgagagtccgtctcaaaaaaaaaaaaaaaaaaaaagaaatagaacaactggaacaattgtaacaatatgctggcatcactactcttgctttttggggctattcttaagtaaaataagagttacttgaacgagtattgatagttgatctgataaccaaaatggcgattaagtcacaaaccagcaaggagcgtctacagcgttggataccctggacaaagggatgattcacatcctgggtgggatggtgtgagatttcatagtgctactcagaacagcacacaatttaaaacattaattttgtatttctggaattttccatttaatatttttggacctctgttgactgtgggtaactgaaactgtagaaagtgaaatcgcagataagaggggggactactgtattaggttctagcatatgcatcttgatcatcattcagaccataccacatggtcttctgagtgtgagggtaaccagatgagtgagaatttaggctaaatggggacggtttgaaacagctgctgggcattggggaaggcagctgattaggacaaatatagagatggtgaacttgggcttgtagcattgtggtattttggctggggaacagagggatttctgaaacttatccttgatcatggtcgcctgtcaccatgagggagataatatgcccaaggaacaatggcaagtgggggtcaaaaatctgaatttctatctagtcagttctggctctggccccaaatcctatagtatgtaattctggtaaattctgctgggttaccttccaaatgttctcttcttcctcagcttgtaaggcctaagagcatcagactaaagcaagcctcgatgcttgctctgttcatttcatccatcacatctagccccataacctaactacctctcaactttaccactgtgatgggagaagaggacatccagacacacctgtgatcatccaagggcatggaggaagagaaaagaagaccgcaagagaatgcacattccctctcagcatcagcactaatttgcttaagatgatgctgtaggagcaccaggcctggcagccatcagctggggaagcaatacctttcaaaggaaaattaacaaaacatcccagtctactctcttacgttcagcctttgggaaagagagacggagggaaggagggaaagagagagatgaagatgtatcctggtctctccaacctgagagttcctctccactccagcagtacagaaggggagggcagaagagagagccacaccacacacactcactgttattattttacatagatgatttcattaagtagtaaagaggtgcaatcagagtcttggtatttaatcagtcagatacttggagaggaataaaaaagcttgccttcagtgatccttggattaggagtgacaaggtggactggagctccctctgaaggacagtgaacaacactgatctcttgtcctctgctccaaaacaggatgtgtggcaggttcctgcggcggctgctggcggaggagagccggcgctccacccccgtggggcgcctcttgcttcccgtgctcctgggattccgccttgtgctgctggctgccagtgggcctggagtctatggtgatgagcagagtgaattcgtgtgtcacacccagcagccgggctgcaaggctgcctgcttcgatgc

SEQ ID NO: 38815 - DNA, 2300 bp, Homo sapien
atatttattataagcataaggcattatgcaataatcagaagtattccaatcactctgtaattgcatacggtgttccaaattcatatctcccagccagattacactttggcggagatcattaatttgattagctaatttttgatcaatttgagcctgagaattccaaagtctggaggagtttttctgccatgcttcaattcaacatattgaacggtttgaacagaattgtggatggcaactccagcagttgctgctgttgcagtaaccgcaattagtcctgcaatgatggcaataagagtaaaaataaatctctttgttcttttgcggatacctttaagaacttcattgactatgtgaatagagggggaagactcccatggacgatgtaaagaaactggtatccataccccctccctagcccttaccaagagagtacttgtagtgggattaaaagtagcatcaatgcacgtgaacagcttacagttatcacattctatagtttgtgtattgggaatgataattatatttccaaccaacagcatgtaagggggtttgacatagctcctgatgggtatcacccgttcagatatgagggtgatgttgaatgtgggtgttttggtattagtgtgaaggagttgataggtagtgttccatatccttattcctgtcatagctgcagctaattttcatagttgaggatgttctggggtaacaaagggatgaatcatttttggtctaggaggagtaatgcctgcatccatccatttaaataggtaaggggacacccattgtctcagcctgtatgactgccatccatcctctacataatctaacaaataattaaactctgagcatgaggtatttttgctggagcaatcttgccaataatgcccttttggagcccaatcaataacaatacctgcggctagactttggagcacaacggccttaggagcattacaattattccataaaattgaagtcactataaaaggtccctttgtaggtttctttaaccaaaagagaggctgggcacagttgctcacactagtaaacccagcactttgggagaccgaggcgggcagatcacgaggtcaggagttcaaaaccagcttggccaacatggtgaaacccctgcctcagcttcctgagtgctgggattataggcatgtgccaccacgcgcagctaattcttgtattttttcagtagagacgaggtttcatcatgttgcccaggctggtctcgagtacctgacctcaacctgaggtgatccaaccacctcagcctcccaaagtgctgggattacaagcatgagtcaccgcacccgggccccagtcactttagaatagcatgttgctttgtattcggagggtctctctgcaaatagcccatcaacactgagcgtgcctggaaagacctggttttcaaataactggcttcgtctgtgtaaaacgagtcttgttgtatgcattaaaaattatcttggctgggcgtggtggctcacgcctttaatcccagcattttgggaggctcgttctgttgccagggaggctgcaaaaggaggatgcggctatttctgcttccatcatggaaggctgggattccacaggcacagaaaggaaggagggagagatgggaatgtgactgtcctccagacacagcctctggcaggatcggatgtgggagagtgagggtcccaccccagctggggtctacccaggtccatgtcttggacatgttgagagtttttctggaaggcagggatacagtgtggtccaaaaacacacaaatgcccctactggcccaggggttgtcacaatagactggaagggtgacacatcccaggcgcttgccacccatcacacgcacctcctacccactggcatccttccaccccaggcacacacaaagcctcagtccagagatcaactctggactcagctctgaatttgcatatcctgtgtgtagattcattcttcataacctctgcccagcctagcttgtgtatcatttttttttctctattaggggaggagcccgtcctggcactcccattggcctgtagattcacctcccctgggcagggccccaggacccaggataatatctgtgcctcctgcccagaaccctccaagcagacacaatggtaagaatggtgcctgtcctgctgtctctgctgctgcttctgggtcctgctgtcccccaggagaaccaagatggtgagtggggaaagcaagggatgggtgctggagaggactggaaggaggtgaggaacaggacatgtggctgggagacaggc

SEQ ID NO: 38816 - DNA, 2300 bp, Homo sapien
aatttattattccaatattataatattataataatcctccaatattataatttattccaatattataataatcttcgctgcataatcataacctaagaaaaaccaggccatacagagataggagctgaggggacatagtgagaagtgaccagaagacaagagtgcgagccttctgttatgcccagacagggccaccagaagggctccttggtctagcagtaacgccagtgtctgggaagacgccccttgccgagcggacggtggtctagcggtagcctcagtgtcaaggaaaacacccgctacttagctgaccgggaaagggagtctccctttccttgggggagtttagagaagactctactcctccacctcttgtggagggcctgacatcagtcaggcccgcccgcagttatccagaggcctaaccgtctccctgtgatgctgtgcttcagtggtcacgctcctagtccgccttcatgttccatcctgtacacctggctctgccttttagataacaatagcaaattagtgaaagtactaagtctctgataagcagaaataatggcataagctgtctctctctcttcctctttctctctgccttggctgccaggcagggaagggccccctgtccagtggacacatgacccacgtgaccttacctatcattggagatgactcacactctttaccctgccccttttgctttgtatccaataaataacagcgcagccagacattcggggccactaccggtctccacgtcttggtggtagtggtccccggggcccagctgtcttttcttttatctctttgtcttgtgtctttatttctacactctctcgtctctgcacacggggagaaaaaccctccgaccctgtggggctggtccctacaccaatctaccataacagatacctcagccaactgttgaagttatcactgcacaccaggcctgccagaatcccccaagactcttgtgttttcactgcgcagccccaatctggcccagtaaccaacctcagcttcccagccctccatttccctgagtaaatactgcctggaaacaatccttgtaccaatctctgtatccgccaggagtatttgttattggaaacgtaatgcagttctgaccttaagcagaaaataaacgtatttattggttagctctcagaatccacagaaaggatggagaacccaggctcagaattccagaggagcccaacagtcaaaatcacacctgcaaccggcccagtaaatatacagaagctgccagcagggggcagcagaggccacagcacgggatctacaacatcccgggggactgaagctcaagacgccccccgcagctactgcagccccactgccccgggagctggcagttgcaacccctgccaagaccaccagaaaacattgtccactgtgccctcctctttgtttccctaacacttgacctgatatccaaggcagtagcttcgacttgctgagcataaaccctgtgcacacctgctcgttctattgccagggaggctgcaaaaggaggatgcggctatttctgcttccatcatggaaggctgggattccacaggcacctaaaggaaagagggagagatgggaatgggaatgtcctccagacagctctggcaggatcggatgtgggagagtgagggtcccaccccagcgggggtctacccatgtccgtgtcttggacatgttgagagtttttccagaaggcagagatgaagtgtggtctgacaacacccaagtgaccccagagggtgtcataatagactggaagggcgacacatcccaggcacctgccacccatcacacacacctcccacacactggcatccttccgccccaggcacacacaaatcctcagtccagagatcaactgtctcagctctaaatttgcatatcctgtgtgtagactcactgatcacaacctctgcccagcctggcttgtgcatacttctttcttactgtcaggggaggagcccggcctggtactcccattggcctgtagattcacctcccctgggcatggccccaggacccaggataatacctgtgcctcctgcccagaaccttccaagcagacacaatggtaagaatggtgtctgtcctgctgtctctgctgctgcttctgggtcctgctgtcctccaggagacccgagatggtgagtggggaaagcaagggatgggtgctggagaggactggaaggaggtgaggaacaggacatgtggctgggagaagggctggatgcagctgggattccctggcatatggcaggaac

SEQ ID NO: 38817 - DNA, 2300 bp, Homo sapien
ccttcctcttcctcctcagcttactcagtgtgaagacgatgagtatgaagaccttgatgatgatctatttccacttactgaatagtaaatatattttctcttccttaaaaaacagtgttcacatgatatgaatgtagcagatacttccaggataccagcctcctcttcaatacaactgcaactatggttttgaacagtgtttaaaataatatcaataaatatttatttgtatatgaaaacaggaaaaaggtaaactaaagccatggggattgtgttagggtggagagattaccggtaattatttttctccattttgcaaatttcctttaatgatactgttgttgcttcttttttggatacagagtctagctctgtccccaggctggagagcagtggcacgatctcggctcactgcagcctccgcctctggagttcaagcgattctcctgcctcagcctcccaagtagctgggactataggcgtgtgccaccacgcccagctaatttttgtatttttagtagagacggggtttcaccatatgggccaggatgatctcaatctcttgacttcgtgatccacccaccttggcctcccaaactgctgggattacaggcatgagccaccgtgcccggccctttttttcttttttgagatgggatcttgctctgtggcccagactggggtgcaatggcacaatcatagctcactgcagcctcaacctcctgggctcaatctatccttctacctcagcctcccaagcagctgggaccactggcacacactaccctgcacccagctaattttagtattttttgtagagagagggtctcattacgttgcttaggctggtctccaactcttgggctcaagaatcctcccgtcccagcctcccgaagtgctaagattacaggcttgagtcatcgtgtctggccctgtcattgctttttagttttcaaacattttttaaaaagtaaatctggccgggcacggtggctcacgcctgtaattccagcactttgggaggctgaggcgggtggatcacaaggtcagtagatcgagaccatcctggccaatatggtgaaaccctgttctctaccaaaaatacaaaaattaaccaggcatggtggtgtgcgcctgtagtcccaggtactcaggaggctaaggcaggagaatcgcttgaacctgggaggtggaggttgcagtgagccaagatggtgccactgcactgcaggctgggtgacagagcgagactccatctaaaaaaaaaaagtaaatctctccaagcagtaagagtcatgcaaccaagctactgagtttctcccatgaacttgtctcggaacatagtggaaagtcacaaccattaaagcctgtagtcccccccacccttgcacaacgtggccccctcttatgcgtgccttaccctgcaaggcaaagatgaaggctgtaactgtggtaggttgtgaaagcactttgaaggtaaaagtgtctgttgttactctgaaaactccttttaaacggctataatagcatatgccacatgagcaaagcacagaaccttataactatgcttgcttgtggaaagacatcccttgtccacgggccaagtatttgaaaataccactccatatagctccagggccctgagagaagctaccgtggcagctttgggaaaccagccacccttggcttcactttgatcttcctcagtctacatccttgtttcagttcctttgccacagacatacaattaccaagtactatattgcttgataataactataattactacaaggactgcctgagatgaaaaagacaggtgaaatcgaactttcacatggactggtgtctgagctggagagtctgtttgagtttgagtaggggaaagcctgaaaccccccaccacctgctcccgttagtccctgcattaactaggggcggactgggacctgatcctccaagctggaggcttgaaaactcaagggcaggcgcctggtccagcgattcggaaaccgagatgcaaagtcctcccgcgctcctagagaggacccggaagcgcggcgcggtcccggaagacgaggtggtgacacgcttccggcctttgtgactcattgtgtctgtgtcgaggcgtcgggagggcctaagtccgtgtgcggtgcccttcggccggcctgagccccagagtcagctcccctttctcgcccagcgcccccaggccgctcccggggctcacggtgagacttggggccggcctctggggtgggagggcggggccgcaagggtgtgtgcgcgagggtgggctc

SEQ ID NO: 38818 - DNA, 2300 bp, Homo sapien
aaaatgtcagggaaaaatgatattgagtatctatgaattcatgacgcgtatggacagggaattccacgtgcaggcagccatattggtgttcctcaacacatgtgagttttgcaggaccagacaaaagcaaactcacagggggcccgatggagtagtgctgaggtggaaaatacagactcttcagtctggaaacctgcagctgagccagagcagcaggaggaaaaggcaggcaaagacatcttcatcgagtcctgcagcattggaaggagttcagcccctaggtcttctgctcaggaagtttaggacccacagaagggcaaggctacttctgattgatgtcaccatgaccctggtctgcaaagttgaggactaaactctgactgttttcttcttttgcccaaattactatctaaggggcctggagagtcacccccttcaaaccataaagcctcatcagacaggttttatttaactttatataacctggctgacttttcaaccaggctctggcataacatcacatggcagataaagaaggaaacgaaaatatttccaccccaaatatgtttttttgccatatcttgaaataaccctaccaagctgtcttctcgtggggaaaatctacacttggtagagaatccccttccctttccaggcctttttcctgatccaggagagaatcaactgggcgtctggcactttttaaagtctgataagaaatatttgcagtctgttctttctgaagccggctgcctggaggctccatctgcataatgggaaccctggtctccacaaccccttagttcagcggtccccaaccttttttggcaccaggaaccagttttgtggaagacagttttttccatggatggcaggagggggatggatggtttcgtggtttcaggatgattcaagcacattacatttattgtgtactttatttctattattattacattgtaatatatcatgaaataattgtacaactcatcataacatagaattagtgggagccctgagtttgttttcctgtaattagagggttccattggggaattatgggagacagcgacagatcatcaggtattagattctcataaagagtgcacaacctagatccctcgcatgcactgtccacaatagggtttgtgctcctgtaagaatctaatgctatggctgatctgacaggaggcggagctcaggcagtaattagagcaatggggagtggctgtagatacaggtgaagctttgctcctgcagctcacctcctgcagtaacggcccagttcctaacaggccatggactggtatctgtctgtgccccaagggttggggacccctgccttagtcatcccagacattcctttctattgattataggtctttagacaataactttcagccagttgcccattagaagatccttgagttcacctatgacttggaacatccccgcttggaattgtcctgcctttcccacagaaccaatgttcatcttacatgtcttgattggtgtcttatgtctccctaaattgtataaacccaagctgtagcccgaccatcataggtacatgttcttaggacctcttgagactgtaccttgggccattggtcactcatatttgtctcaaaataaatgtcttcaaatattttacagtttgattgttttcatcaacgaagtattaactcaatctctggcttcacgggccaagcacagcgttccatgtccataaacctggaccgaggagctgggcccaagggtatccagtgacctcgatccaggtttatggacaaggaaccctgtgcttatcccaagggtactcagggaccttgggctctgaagtccacgagggtgaccgaggtggctgcctcagcccatgccctccctgccccagggcgtcggggttgggtgagagaaccgccgcagccttcatctggtctgaccgtcttcggtaaaaacagaaagagtccctggcttttcattttcggggtggactcaactcctccctgatgtcccaagggccagagacacagagaggacctcccgaatttctagaggggccgctacggccccgcactacttttccgcgggggcggggctatgacgcacttccgggtgcgcggtcccgaggtacgcggtgcggtctcccggtacccggagcggctctgattcatggtgagcctgctggtcgcgggttagcgaggcggacaggagagggagccgtggctgaatggtctggggagggaggagtgggtttagcagctgtggcttccgaggaccccacctagaccggtcctagc

SEQ ID NO: 38819 - DNA, 2300 bp, Homo sapien
cttgttcttactgccaggccatctatctcggtccccacgggcagcaccagggagtgaggctggcaacagagcaggggaagggccctgtctggacctgaagccatgggggcacaatggagagttttctttctgtgagaaacgctgtttactgatctggacactgggtgcttgttctcaacaatatgcctttgagttccagcttcacttaacccagctgtgagagggagctgttgcctttttctctggagtcagacctttgacctgcctttctaggagtttgtactgaaagctgacttgttgagggcgtcagctcataaatagctccggagattgtaaaggtggttgataagaggatatgatggttggctctgagacaccattgaagggaccctgctaggagggcgatggtggcaagaaggtgtgtcaccttgattgccagtggcctggcttgtgcctgagtcagtgctttccactgtgtaagggctctggtattggacattctatatcccctgctacccgaagaccagagttgcccaaacttgcgactgactttcaaacaggacccctcttcctttgttctttttttttcttttattctctcaaacattctcttatccattcctcttcctttgatgccttatgtgagtgtaacagtctgtaattatgaagcacatactttttgcattcccgatttttttactccttgcagttgtgagtggcaatagagttagccctcagcaaacatttgctatgtgagcaaatgagtaaagagataatgagaggtagatcaaatccagggttggttggtttgttttgttttgttttgttttgtttgagacagagtctcactgttgcccaggctggagtacaatggtgcgatcttgggtcactgccacctctgcctcccgggttcaagcgattctcctgcctcagcctcccaagtagctgggattacaggcgcatgtaacaccatgcccagctaatttttgtattttttcttttctttttctttttttttttttttgaggcagagtctctgtctattgcccagactggagtgcagtggcgtgatctcggctcactgcaacctccacctcctgggatcaagtgattctcctgcttcagcttcctgagtagctgggattacaggcacacaccaccatgcccagctaattttttgtatttttagtagagatggggtttcatcatcctggccaggctggtctcgaactcctgacctcgtgatttgcctgcctcagcctcccaaagtgctgggattacaggcatgagccaccgtgcccagcctgggagtagtctttttatgccagtgaatgtatatacccgctcctgcattttgttataaatattactcaaagtgatgggggcagccaaaggcgggatattgttgaggaacttgggccctttttgtggtccttgtgatagtctcatttcagggagtatatttaccaggatctaaaagactagtctgaggctgggcatggtggctcacacctgtaatcctagcacttggggaggctggggtgggcggatcacctgagatcaggagtttgagaccagcctggctgacatggtgaaatcccacctctactaaaaatacaaaaattagccaggcatggtggtgcgtgcctgtaatcccagctacttgggaggctaaggcaggagaatcgcttgaacccgggaggcagaggtggcagtgagatgagattgcgccattgcactccagcctgggtgacaagagtgaaattccgtcttaaaaaaaataaagaaaatttaaaaataccgggcgcggtggctcacgcctgtaatcccagctctcagggaggcaacaggtgggaggatagcttgagcccaggagttccagacctgcctgggcaatatagcgagaccctgttctccacaaaaaggaaaaaaaaaattaaaaaataaaagaaaataaaagactagtcccagttgccacatttcttctcactgttcctgggtactcactgaaatactagctcccatctttctgtattcaggaggtttttttgaattatctttgaaccttgaacttttgcttctgcagtgcttcctcattctcttttaaaacccgcttcccgctgagtctgcacccaggagaccagagagcaccttgcccttccatggaaactcaggctgatctcgtatctcaggaacctcaggccctgcttgacagtggtgaggaataaggactcattcattcttttactcagtcattctgcaatcatccattgaaatcgctcacttaccaggtactaggc

SEQ ID NO: 38820 - DNA, 2300 bp, Homo sapien
acagttattcgcgcccgtggcaggagaggaagtttatttttacgcagctgggtccaaggatcagagaaattctgctaagcgtacgcagttagcacgagggctgggagtgggtgcagacgccgattccaggggtaatcctgctggagcccagtgcatcgcgtgatacacctggctcaggctccgttttcagttgtattagattcctggtttgatcctctctccggaagtgggattgaatccacatcggtgtttacactctgaagggcttttgtaaactccaggagaagatagcagagtgatgaacctgaaaccgatgggctaattagaggaacgagcgtattattttctccagaaaagacatctgtggagagtgggcatcatttgattatacgtgtttgatggacagtcgggtggaaggagaagattctgttattgaagctctttttttaaaaaaattaatttttatttatttttgagactgtctctggagtgcagtggcgcgatctcggctcactgcaacctccgcctcccggttcaagcgcttctcctgcttcagcctcccgagtggttgggactacaggcgcccgccaccacctccggcgaattttttgtatttttagtagagacggggttccgcccttttggccaggctggtctgcaactcctggcctcaagtgatccacctgccttggcctcccaaagtgttgggattacaggcgttagccaccgcgcccggccttttttttttttttccttttaaaatgtttgtgtgtgtattaaggtcttgctctgttgcccccggctggagtgccgtggtgccatcatggctcaccatagcctggaactcctgggctcaagtaatcctcccacctcagcctcctaaagtgctggggttacaggcgtgagccactgcaggtcgccagtcattgaatttctgtgatgcactaggtctctgtgcggtgaaggtccaaggagatagattttcagcgaatcacctgaagacttctaatggctcagctgtgcaatgtggatcccctgctgaagtagttcggagcacagtgtctagcaagttagctgacagaacgttagaactttcttaccctgggtggaggtggacctgagaacctaccattccctttcatctctccacgggtgcaacgcaaatactagttgtggtggtggtcttaattggtatttattagcatataataagtattctcttttttttccttttctttaaatgtcttgattagaaatgaagtttaggctggactcggtggctcatgcctgtaatcccagcactttgggaggctgaggtgggagaatcacttgaggccaggagattgagaccagcctgagcaacacagtgaggctgcatttctacaaaaagaattttaaaaaactcagccagatgtggcagtgcacacctttagtcccagctccttgggaggctgagctgggaggatcacttgaacttaggagtttgagtctggagtgagctcaaactcactgcactccagcctgagcagcagagtcagaccctgtctcatggaaaaaaaaagacgtttgcatgaatattttaaattcctttttttccccttaatcacacagcattggcatcaacaaaagtcagaattcccgggaacttgaacagaggctgctaaattcccagtaattgctcctttggccttctagggactgacttcaaagaaggaaggaaagaatcaggcaggtaaagctttccgtgtcttgttcttactgccaggccatctatctcggtccccacgggcagcaccagggagtgaggctggcaacagagcaggggaagggccctgtctggacctgaagccatgggggcacaatggagagttttctttctgtgagaaacgctgtttactgatctggacactgggtgcttgttctcaacaatatgcctttgagttccagcttcacttaacccagctgtgagagggagctgttgcctttttctctggagtcagacctttgacctgcctttctaggagtttgtactgaaagctgacttgttgagggcgtcagctcataaatagctccggagattgtaaaggtggttgataagaggatatgatggttggctctgagacaccattgaagggaccctgctaggagggcgatggtggcaagaaggtgtgtcaccttgattgccagtggcctggcttgtgcctgagtcagtgctttccactgtgtaagggctctggtattggacattctatatcccctgctacccgaagaccagagttgcccaaacttgcgactgactt

SEQ ID NO: 38821 - DNA, 2300 bp, Homo sapien
gaacatgatgaggtgctttccttctattgatggctattgtgatacctcatttcttatcttcttagtttaaaaggatttaaggctgggtgcagtggctcacacctgtaatcccaacactttgggaggctgaggtgggcggatcccttgagctcaggagtttgagaccagtctgggcaacatggtgaaaaccctctgtctctacaaaaaagtagccgggcgtggtggcatgcatctggggttccagctacttgggaggctgaggtgggaggatcacttgaccttgtgaggtggaggttgcagtgagccgaaatcacaacactgcactccagcctgggtgacagagtaagacccccgtctcaaaagaaaaaaaaaatttaaacaagaaacacacaggaggccgggcgcggtggctcacacctgtaaccccagcactttgggagattgaggcggcagatcatttgaggtaaggagttcgagacaagcctgaccaacatggtgaaaccttgtctctactaaaaatacacacaaattagccgggtatggtatcacacgcctgtagtcccagctacttgggaggctgaggcacgagaatcagcctgggtgacaagagtgagactccctctcaacaacaacaacaacaaaaaaaaaaaaaaaaaaaggaaaaagaataaaagaaacacatgtcaaaggaaatccagcatagagtaatttattgcaaaaggaaaatagtattttgaaagttaagtgcagagtagacagtacaccctgggagagagagagatagagagagagttagttcagggagggctgctcctaaggatgaaacagcaaaggctggctctagagagaccccctttgtaaggggtcttacacgattattcataagggggtgggagaagtgttactagtaagtatgttctgggtggtcctctaggtgcacatgcgcagtgggtgtacaggcttgttcatacattgcatgtttcattagcatcttaaatttccacccaggggcgtgttttttaccaagataatgagcaaagggtcagtttgaggacaggtgaaatcaaaatgcgcatgctccctacaggggaaagtccctactggagagcgctcagcttgaatgagctcaattacaatgcgaatgctggggcttactgtgttgactgcggtcaccacggttgccgcgtctccaggacacggtcacttccttgactatccccgcctcgcttccacctgtagcttccttttttttttttttgagacagtctcactctgtggccagcctggagtacagtggtgcgatgtcggctcactgcaacctccgcctcctgggttcaagcgattctcctgtctcagcctccagagtagctgggattacaggcgtctgccaccacgcccgggtaatttttttgtatttttagtcgagacggggtttcgccatgttggccaggctggtctcgaactcctgacctcaggtgatccgcccgcctcggcctcctaaagtgctgggattacaggcgtgagcctccgcgcccggccggtaagcttcctcttctctgctctcatcacctgtacacgggttttttcctcatgtcaactctgtgatggactggaatgttttcttcagatgtgggtaatttaaagggggcatttttacaagaaacaaaaaaaactcggtttgttcggaggcaagttttaaatcagggttcattttttaatattgatgaatccttcaataattgtatgtttactgctgcccttcgcgagccagcctgagaagcgcgggctcgacatccccgcgcgcccccgccgcccgcccccaaggccggcgacgctggagcacatgtcctgaggcccaggaccgtggtcggccgctttcgcacattcgtggccagcagagggcgcagccggccagcccccgcagcgaaagatccccgagtgccgcgtcagcgatcgcgctccttgccctcgccgcctgccagccgccctgagtcagcaaaccacagagaggcgaggacctcccattttcctagacagaacaagtgggcgttgggggtacgggtgagtggcaagaacaaccgacccggaagcgaaacgagggggaacttccgttctttgttctgtccccggtgtgtgggtctgtgacagggtccaacagggcctggtccgtgtccggtcccccaaatctgtcgtccctgcccccagggtgagtccacgcgtccccgggtctcgcggtgagacggaggctgtggtcgccggggaagggggtggtgtctgtgccactgcggcccgcagggtcc

SEQ ID NO: 38822 - DNA, 2300 bp, Homo sapien
tggccaggctggtcttgaactcctggcctcaagtgatccactcgcttcccaaagtgctgcgattacaggcatgagccactgcacaccctgctgcacattgttacttttttgtgagtttctcattagtgttcagtaaatctacattttatgtaagatacaataaacatttgaaaagagggagtggaggaaaaagtcagttatgcatctgtctcaggataggtggagggatgattcctggtctcttccttgttctataattgggaagataagcttgtaatcaacattgtcagtatgagatttcacagaactcggattagggctggtttatagggggaatgtttatgctgaaagattcagaggctaatgaggaatttcctggcaagcaatttgtgaggaagaccatctggggaggtatatgccttttgccattgtaggagcctggcttatgtatgaggctatgacacagggttgtggaattacagctatctgggaacaaaaaggaagggagttttgactcacttcccaagcataaatttcctcggcatgcctctaccatacccagcgaattttgtttccatgttttgttgaaacaaggtgtcaccatgttgccaaggctggtctcaaactcctgggttcaagtgatcctccaaccttggcctcccaaagtgctaggattacaggcgtgagtcaccatgcctggccttgtggagttatcttctttctttctttctttctttcttttttttttttttttgagatggagtctcactttgtcttgcccgggctggagtgcagtggcgcgatcgcagctcactgcagcttccacctcccgggttcaagcaattctcctgcctcaggctcctgagtagctgggattacaggcgcctgccaccacgcctggctaatttttgtatttttagtagagatggggtttcaccatgttggctaggctcgtctcaaactgctgacctcaagtgattgtctggcctcggtctcccaaaatgctggtattacaggtgtgagccaccatgcctggccttgtggggttattttcgaaagtccttgagataattcctatctcagacatgcaagcatgagaccttctccttggtgttctcatggctccaatttgtttggacctgacaatgtgattttgtcctggtatctgcaactttcacaagatggagcaactaactcaacaccagattccacccctaattattccttcattcactcaaaaagtatctaggctccaatgtgtcaggcaccgtgttggtcacaggggataccatgatgaacaagagaaggaaccacaggcttttgaatgggaaactaaagcatgtgaaaaacacacggagagctgggtgcggtggctcatgcctgtaatcccagtgctttgggaggctgaggatggaggatctcttctgcccgggagttggagaccagcctggacaacctagtgagacccccgtctctatcaaaataaaaacaaataataaaattagctgggtgcggtggggtgcgcctgtagtcccagctactcgggaggctgaactgggaggatcacttgagcccaggagtttgagggtgcagtgagctgacatcaggccactgcactccagcctgggcgacagagcgagaccctgtctcaaacaaaacaaaacaaaccaccaccaccaccagacatgagggccagtgcagctgaagcctgaagatcaagggctagaagaggccaggccggggccagatcaggcagggccttgcaggttgtggttagttgtttggattttattgtgagggaaataacacgacatgtcattccttctgcaacagccttaagaactaggcgttcttatcccaatttcacagacgaggacgatcaagtcgttaatttgtcaaaggtcacccgcaggcgacaggcggggacagggtctgggaaaacccgctaggcaccgaggcccagagggcgtcgggcgtccccgcaccgagtgccgcccgccgcgacccgggaactgcctgctccccggacgccaggcccgccgcacgccgcggggacaccgaacatgcgccgctcgccttacggaagccgggaaggaagggggcggggccgaggctggcgggcgcggggaaaatggcggcggcggcggcggcggctgcagctacgaacgggaccggaggaagcagcgggatggaggtggatgcagcaggtaacgggccgtgcgggggtggcttccggagacctccttcaggggttcgttgaggcctccctgtgctcccgggagaagggaggagggcggagc

SEQ ID NO: 38823 - DNA, 2300 bp, Homo sapien
aaggagaagaacaaaaaaaaaaaaaaaaaagagcaacaggatggggaaaggagagcacagagaacaccaggcagaagtgcccctcctttctgcctgctcagaaaacatcagtatctgagcagcctctctacagaagcttaaacgcctcgccctttgtttgccattgttctctaaccactcacttccctctccttgtactgaggcagcagctcttgtacggcatcagcaaagagcttcgcgtagcgcctggcattctcacaaattgagtccaccaactcggggtcatcctcggctacgtcgtccaggtccacatacagagccacctgttcccgatgagccagccgaacctcaagtggggaagagacagaaacacctcagagccacattcactttgctcaccagtgttcatatgtgaaaatgcatcactgagaactcagcacaggctctgggcatccacaggggagaacgcagcgccacacagagcgatactcgcttttcagccctcaaaccctctaattgttatgtctttaataaaacaagccaagctgctgcttatggctccttaagcaccccgctccccattccctttacccaatcttagacttaccaactggttcccatacttgaactgcttcttcccgagttcatcatcctggtagaactcttgtaagaacttcttaaccttttctgtaacatgaaatgtaaaaccgtaagacacaaactttaagacaaatcttagatacccattttcgcttaaaacacgacctatgaactaattaataatatgagcatttaaataaacctaccgaagtctccccaaagtgggcataactctttttcacaagtctgtttctaaccagcgaagaataaagagcccgtggcagtgcacagggccatccaacatctccccaggggaattccggtccctactttagtttaaaattctagcgcccttccccgttggcccctcacactccggtctcaaggttctcagctttctttccacccctatgatcccccgccttctttgggtccccttagcccctgatttcaccgggacctccgccaccgcaccccgccaccgcaccccacccccgctcccgccatcgcttccgctcttagtaaacaaagaagcacatgggcccggattccagccgcttcacagctcgggattcctccgcccagggcgggagccagtccagccattggccatcacacccagagacaccgcgatcccagcccactgccgcctttcccgggcccgagcgaagctccggatcccaggcacgcccccccgggccgcagctctctccgcggccgccgcgcggaaggacactgtttacacgacactccctccagcctcctcgcgccacttccgcccggctccacttccgctcggagggcggcctcaaacggccaatcccggcgcgcagcggccccggcctgcccgcccccggggcctacgcgcgcctggggagggcgcgggaacctgggaatgcccaaaagcgcgaaggaaagcgggcacgggagcccagagcccttaagactctcctgaggtcctgggcgcgacttttccctgtgcagcccccagccgggttagcgcgcccccaagcccccaaccccacgaccctaacacctttaccaggtgggattactagcttttcttcaacatcgatggccccccgcacgcttcccaggccccgtgggccttagccaggccgcagctcgaccctgcctctggcctcgcgcaccccagaacccgccgaccccggtcccccaagaccccagctcacaccaacaggtgttccccgggaggctccccgcgcaggacgccctcccgggctcgtagacccgtacccttctctagcgcgtagtccttcagtgccatcgctgccgagggccgtgcggccgcgcttggcgggctcagaggtcttgctcctggggaagctgagaatctccgcgcggtggactgtggccggccaaccgaaattggcgcgaaacgtcgccccccacgtgaccggcgccactgcgtgcgggccaatcggacaaggcggccttcttcacctcccgctagccgcaagccaatcaccgtgcgggcctagaatgagtgacggggaggcggtgcgggcgtcggaagggaatctccgggcggggtagtgcaggcgccgggtttcccgcggtccgagctggcgcgggcggaggagaatcgctcttaaagggccagcgcacacgcgttcttttgttccggggccgcagggcggggcaggcccgactttcgccgtcttcttgtctactctcca

SEQ ID NO: 38824 - DNA, 2300 bp, Homo sapien
atggctccttaagcaccccgctccccattccctttacccaatcttagacttaccaactggttcccatacttgaactgcttcttcccgagttcatcatcctggtagaactcttgtaagaacttcttaaccttttctgtaacatgaaatgtaaaaccgtaagacacaaactttaagacaaatcttagatacccattttcgcttaaaacacgacctatgaactaattaataatatgagcatttaaataaacctaccgaagtctccccaaagtgggcataactctttttcacaagtctgtttctaaccagcgaagaataaagagcccgtggcagtgcacagggccatccaacatctccccaggggaattccggtccctactttagtttaaaattctagcgcccttccccgttggcccctcacactccggtctcaaggttctcagctttctttccacccctatgatcccccgccttctttgggtccccttagcccctgatttcaccgggacctccgccaccgcaccccgccaccgcaccccacccccgctcccgccatcgcttccgctcttagtaaacaaagaagcacatgggcccggattccagccgcttcacagctcgggattcctccgcccagggcgggagccagtccagccattggccatcacacccagagacaccgcgatcccagcccactgccgcctttcccgggcccgagcgaagctccggatcccaggcacgcccccccgggccgcagctctctccgcggccgccgcgcggaaggacactgtttacacgacactccctccagcctcctcgcgccacttccgcccggctccacttccgctcggagggcggcctcaaacggccaatcccggcgcgcagcggccccggcctgcccgcccccggggcctacgcgcgcctggggagggcgcgggaacctgggaatgcccaaaagcgcgaaggaaagcgggcacgggagcccagagcccttaagactctcctgaggtcctgggcgcgacttttccctgtgcagcccccagccgggttagcgcgcccccaagcccccaaccccacgaccctaacacctttaccaggtgggattactagcttttcttcaacatcgatggccccccgcacgcttcccaggccccgtgggccttagccaggccgcagctcgaccctgcctctggcctcgcgcaccccagaacccgccgaccccggtcccccaagaccccagctcacaccaacaggtgttccccgggaggctccccgcgcaggacgccctcccgggctcgtagacccgtacccttctctagcgcgtagtccttcagtgccatcgctgccgagggccgtgcggccgcgcttggcgggctcagaggtcttgctcctggggaagctgagaatctccgcgcggtggactgtggccggccaaccgaaattggcgcgaaacgtcgccccccacgtgaccggcgccactgcgtgcgggccaatcggacaaggcggccttcttcacctcccgctagccgcaagccaatcaccgtgcgggcctagaatgagtgacggggaggcggtgcgggcgtcggaagggaatctccgggcggggtagtgcaggcgccgggtttcccgcggtccgagctggcgcgggcggaggagaatcgctcttaaagggccagcgcacacgcgttcttttgttccggggccgcagggcggggcaggcccgactttcgccgtcttcttgtctactctccagaacggccatgatttcccaattcttcattctgtcctccaagggggacccgctcatctacaaagactgtatcctagacccttggggctgggaaggggcggaggggccgggcgggaggggcgcccagggccagcctgtgtcgcaggatccttcactgagtccttccacccgccagtccgcggggacagtggcggccgggatgtggccgagctcttctaccggaagctgacgggactgccaggagacgagtccccggttgtcatggtaaccagtggcgggaggcgggtgaggagcggggtcccgtcgggccgggtgggcgccagctccctcccaggactggttcattggtagattccacttggggggtgcattccgccaaataaagctaacgtgaggcccggcgcggtggctcacgcctgtaatcccagcactttgggagaccgaggcgggcggatcacctgaggtcaggagttcgaaatcagcctggccaacatggtgaaactccgcctctactaaaaatacaaaaaaaaaaaaaacatagctgggcgtggtggcg

SEQ ID NO: 38825 - DNA, 2300 bp, Homo sapien
aaacacttggagcgtgtattttctcctcctctcagacccctcctagctaccaggtgcccagcccaaccctcctcacctggagagcagttctaggaggctgaagggagaaacgttttctgaagttgtgaccaccaaatagaggccgctgtgtctgatgtgaatgaaatgacggccatggtgatgctgagacacaggcagggagaagagaggcgttaaaaaaagggaggtggagtgatcagaacccaggagacctgagctcggatcccgatgcctcttactagtcacaacagcagtgcctttgggagatacatgacatatgcctgggcccagcttcccaatgtggaaagggggttaattacactaactaccccgagttgctgaggatggagtcacgcagggagctgggcctggtgtgttgctggcgcccattgactctttttttttttttccccacccccacctaccccgagagggagtctcgctctgtctcccaggctggagtgcggtgtccggatctcggctcactgcaacctctgcctcttggattcaagcgattctcaagcctcagcttcccgagtagatgggattacaggcgcccgccaccacgcccagctatgttttttttttttttgtatttttagtagaggcggagtttcaccatgttggccaggctgatttcgaactcctgacctcaggtgatccgcccgcctcggtctcccaaagtgctgggattacaggcgtgagccaccgcgccgggcctcacgttagctttatttggcggaatgcaccccccaagtggaatctaccaatgaaccagtcctgggagggagctggcgcccacccggcccgacgggaccccgctcctcacccgcctcccgccactggttaccatgacaaccggggactcgtctcctggcagtcccgtcagcttccggtagaagagctcggccacatcccggccgccactgtccccgcggactggcgggtggaaggactcagtgaaggatcctgcgacacaggctggccctgggcgcccctcccgcccggcccctccgccccttcccagccccaagggtctaggatacagtctttgtagatgagcgggtcccccttggaggacagaatgaagaattgggaaatcatggccgttctggagagtagacaagaagacggcgaaagtcgggcctgccccgccctgcggccccggaacaaaagaacgcgtgtgcgctggccctttaagagcgattctcctccgcccgcgccagctcggaccgcgggaaacccggcgcctgcactaccccgcccggagattcccttccgacgcccgcaccgcctccccgtcactcattctaggcccgcacggtgattggcttgcggctagcgggaggtgaagaaggccgccttgtccgattggcccgcacgcagtggcgccggtcacgtggggggcgacgtttcgcgccaatttcggttggccggccacagtccaccgcgcggagattctcagcttccccaggagcaagacctctgagcccgccaagcgcggccgcacggccctcggcagcgatggcactgaaggactacgcgctagagaagggtacgggtctacgagcccgggagggcgtcctgcgcggggagcctcccggggaacacctgttggtgtgagctggggtcttgggggaccggggtcggcgggttctggggtgcgcgaggccagaggcagggtcgagctgcggcctggctaaggcccacggggcctgggaagcgtgcggggggccatcgatgttgaagaaaagctagtaatcccacctggtaaaggtgttagggtcgtggggttgggggcttgggggcgcgctaacccggctgggggctgcacagggaaaagtcgcgcccaggacctcaggagagtcttaagggctctgggctcccgtgcccgctttccttcgcgcttttgggcattcccaggttcccgcgccctccccaggcgcgcgtaggccccgggggcgggcaggccggggccgctgcgcgccgggattggccgtttgaggccgccctccgagcggaagtggagccgggcggaagtggcgcgaggaggctggagggagtgtcgtgtaaacagtgtccttccgcgcggcggccgcggagagagctgcggcccgggggggcgtgcctgggatccggagcttcgctcgggcccgggaaaggcggcagtgggctgggatcgcggtgtctctgggtgtgatggccaatggctggactggctcccgccctgggcggaggaatcccgagctgtgaagcggctg

SEQ ID NO: 38826 - DNA, 2300 bp, Homo sapien
tttttttttttttttttgcatttttagtagagacaggttttcaccatgttggccaggctgctctgaaactcctggcatcaggtgatctgcccacctcggcctcccaaagtgctgggactacaggcgtgagccgctgtgcccgacctaagatcttggactcccggatcccagagcaaaaccagagcgtctgaccccatggatccttccctcacctggtcagagcgactggacaggacggggcggctggctgcactgctgggggccactttgctctgttgtgtctcagccccaaactgtaaagcatccaaagcaatcaatcatcaggtctgacaaccccagccaacccctcttctctttcctcaccctcctctttccctctactgaccaagccaacgctgctgaggtcaaagaggctgaagggcttgctgaccacagcttccgtctggatgaaattcctcagcatctccgtggatgtggtctgtacatagccatagtcctagtggtaaaggaaggacagtctgagtgatcagtggagggaaggggtaaagagggggagtggggccaggcatggtgactcactcctgtactctcagcgctttggaaggccgagacgtaggagaatggcttgaggccatgagttcaagaccagcctgggcaacacagtgagactctagtctctacaaaaaataaacaattagctaggcacaggggaggctggggcaggaggacggcttgagcccaggagttccaggctgcagtgagctataactgcaccactgcagtccagcctgggcaacagagcaagaccctgtctctaaaagcaaaaaaaaaaaaaaaaaaaaaggtagacttggcctcctaaccacggcatcccacagtagaagagcagatgtatcttcaggggaattgggtaggggccacagaaggggattgttgattctcaccagcacttcatccaggagttcgtataccagagccacattgcgggagatggtcccctcgcccagggagccacagtaatcgcccagaagggtggccaacctgaggaaacacttggagcgtgtattttctcctcctctcagacccctcctagctaccaggtgcccagcccaaccctcctcacctggagagcagttctaggaggctgaagggagaaacgttttctgaagttgtgaccaccaaatagaggccgctgtgtctgatgtgaatgaaatgacggccatggtgatgctgagacacaggcagggagaagagaggcgttaaaaaaagggaggtggagtgatcagaacccaggagacctgagctcggatcccgatgcctcttactagtcacaacagcagtgcctttgggagatacatgacatatgcctgggcccagcttcccaatgtggaaagggggttaattacactaactaccccgagttgctgaggatggagtcacgcagggagctgggcctggtgtgttgctggcgcccattgactctttttttttttttccccacccccacctaccccgagagggagtctcgctctgtctcccaggctggagtgcggtgtccggatctcggctcactgcaacctctgcctcttggattcaagcgattctcaagcctcagcttcccgagtagatgggattacaggcgcccgccaccacgcccagctatgttttttttttttttgtatttttagtagaggcggagtttcaccatgttggccaggctgatttcgaactcctgacctcaggtgatccgcccgcctcggtctcccaaagtgctgggattacaggcgtgagccaccgcgccgggcctcacgttagctttatttggcggaatgcaccccccaagtggaatctaccaatgaaccagtcctgggagggagctggcgcccacccggcccgacgggaccccgctcctcacccgcctcccgccactggttaccatgacaaccggggactcgtctcctggcagtcccgtcagcttccggtagaagagctcggccacatcccggccgccactgtccccgcggactggcgggtggaaggactcagtgaaggatcctgcgacacaggctggccctgggcgcccctcccgcccggcccctccgccccttcccagccccaagggtctaggatacagtctttgtagatgagcgggtcccccttggaggacagaatgaagaattgggaaatcatggccgttctggagagtagacaagaagacggcgaaagtcgggcctgccccgccctgcggccccggaacaaaagaacgcgtgtgcgctggccctttaagagcgattctcctc

SEQ ID NO: 38827 - DNA, 2300 bp, Homo sapien
ctgggattacaggcgtgagccactgtgcccggccgacagagctctttattatgttcactgatgtattccaggagcccagcctgggacatcataaatatttgtgaagtaaatgaattagttgtaaggcttagagatattggtgctcagtaaatacttggtatcactattattaataggtcataggcccaagctttgagcctacactgtagttaaaagcaaactgggccggccgtggtggctcacgcctgtaatcccagcactttgggaggccgaggcgggcggatcactaggtcaggagattgagaccatcctggctaacaaggtgaaacctcgtctctactaaaaaatagaaaaaattagccaggcatggtggcaggcacctatagtccctgctactcgggaggctgctgaggcaggagaatggcgtgagcccgggaggcggagcttgcagtgagccgagatcgcaccactgcactccagcctgggcaacagagccagactctgtctcaaaaaaaaaaaaaaaacaaaaaaagcaaagtggagccaggtgcagtggctcacgcctgtaatttgggaggccaaggcgggaagatcacctgaggttaggagttcgagaccaccctggccaacatggtgaaaccctgtctttttgtaaaaacacaaaaattaaccagacatggtggcgggcgcctgtagtcccagctatctgggaggctgaggtgggagaaccgcttgaaccaggaagcggaggttgcagtgaaccgagatcgtgccactgcactccagcctgggcgatagagagagactccatctcaaaaaaaaaaaaaaagcaaattggagccaagagaggtaactcaccccagtaatcccagcactttggaaggcagaggtggggggattgtttgaggccaggagtttgagacagcctggtcaacatagtgagacccccatttctgcaaaaattaaaaaattagacggacctggtggtgtgaacctgtcatcccagctacttaggaggctgaggcaggaggatcgcttgaactgaggagttggaggctgcagtgagccaagatggtgccactgcacaacagcctgggtaacagacggaaaccctgtctcaaaaaaaaaacaaaaaaaaattaaagtggcacacttgcagttggacattaggaagattaacatatcaatactgcttaggagtagtacaggtagggtggggccgtgctggaaggatgggaagagggaggccgaaaaacaaattggttcttttcaaaccatccctgatctcctccccgacttttataagtcttatctatagggaacacaactattcgagacatactctgtgcctggcgccgggtttacaagagggggtcgtgtcccacttccctggcgaactcctacgaatccttcaatacccggcggtaccctctgccagtaaaggctcataaaacacgctacagtcacaggatctcctcagatcagtggaggcggcaggaaggcgtcccagggaagggttaacttaagcgagatcccagcagagaagcaggtcgaagatccccgggcagcgcgaaaggaggttcagagagcccaccccatctcctgcaacatctctccaatgcaggcacacacacggggtccccacgagcacagacacacaaccaaccgtcctctttccagtccccacaagggaccttcaaagggtctcctccggggtaccactcagacccgcccccgccacccgagcgcggggagcaggaaaactctagcggcagccgagacgctgctcacccggcgctcggcgccatcttggccccgccccctcgtgggagcaggtcctggcagagcctaagagcaagtcactgccccttccccgtaccagaataagtcctctaggctcgcagaatgaaattatattttaaaagtttgtttctacatctatatataaggagcactccctcttggtgtaattactgcaatttattccttcactacccggctgccaggaccttcaagaggcgccacaaaacggaggcagggaaacccgtagcaacgaggccccacccttgttgggctgatcctgcgcatgcgccgaccttcctcggctggatttaaggttgccgctagccgcctgggaatttaagggacccacactaccttcccgaagttgaaggcaagcggtgattgtttgtagacggcgctttgtcatgggacctgtgcggttgggaatattgcttttcctttttttggccgtgcacgaggcttgggctgggatgttgaaggaggaggacgatgacaca

SEQ ID NO: 38828 - DNA, 2300 bp, Homo sapien
agtaaaatacattaaaaataaataggccagcacagtgactcatgcctgtaatcccaacactttgggaggctgaggtgggtggatcacgaggtcaagagattgagaccatcctggccaacatagtgaaaccttgtctctactaaaaatacaaaaattagctgggcatggtggcgggcgcctgtaatcccagctacttgggaggctgaggcaggagaatcgcttgaacccgggaggcggaggttgcagtgagcgagattgcaccactgcactccagcctgggcaacggcatgagacgctgtctgaaaagagaaaaaaaaaaaaaaaaaaaaaaaaaaaaaaaaaatatatatatatatatatatatatataaaattaatacaattggataataatagtatgtccctcataggagtgtgatgaagattaaataaatcaacatatataaaggctggcacatagtgagcactgtataagtattcactgttatcctgcagttatttattgagctccttctgtatgcatactaacaatatagacagcaataagacctattatctctatctacaggtctctgtcagtgtagttgggacagataaaccaaggatgacaagctgtggtgaagctgggcctgaactcatgggctcaagtgatcctcccaccttggccttccaaagtgctgggattacagatgtgagccactgtgcccaggcccgttggctgtattctgatagaaggcctgcagaggtgttaaagcaaggactgatacaattaggtgattaagtctgtttaaaaagattgacaggtcaggggagaagagcggcacacggaggtgaaaggagacagagatgaggaccaagtcatgagactgtcatgactgcctttcatgatactggaatacagttgagggggtgaagcgaagagaaaaggaatccagggaagaaacgtaaagtcaggagggcagcaaactagggcatcagggccagccccctttctcaactgggccccacgctagtgcagctatggaaggcgctgcttgctgaaaaatccatatagtacgcaccgtctgcaaagtctcaccggatggggacactctcctagttgtgtggcttccttttgtttatgagcttcaaaggctgaattactcaccctcaaaccccctcagcggggtgtggggcctgtaatttgggagcgtctatgctagggtagggcagcggatgtccacaaggcctgagcctcacacccggctcctgcagcctctgcagattaaggtctggtgacatgaggtaaacactcactgaagatgctctaaaagttggcagtcccgggccgatggtccctgaactacaattcccacaatccattggcgggcggggggttccaagccagccaaaaaaatgcaggctctctctggatgcagtttgaggtggcactacacgttcgcttccttgaccccatccaaattcagccaagctccaccagaacctccctcaagccttcaaggaggtcgggtgacccacccaatacaggctaggatgtccggcctagaagaaggaggtgtggccgggcgatgcctataggggctacccccttcaaataccttcgcatttgctgggcaagcgttctgtgtcatcgtcctcctccttcaacatcccagcccaagcctcgtgcacggccaaaaaaaggaaaagcaatattcccaaccgcacaggtcccatgacaaagcgccgtctacaaacaatcaccgcttgccttcaacttcgggaaggtagtgtgggtcccttaaattcccaggcggctagcggcaaccttaaatccagccgaggaaggtcggcgcatgcgcaggatcagcccaacaagggtggggcctcgttgctacgggtttccctgcctccgttttgtggcgcctcttgaaggtcctggcagccgggtagtgaaggaataaattgcagtaattacaccaagagggagtgctccttatatatagatgtagaaacaaacttttaaaatataatttcattctgcgagcctagaggacttattctggtacggggaaggggcagtgacttgctcttaggctctgccaggacctgctcccacgagggggcggggccaagatggcgccgagcgccgggtgagcagcgtctcggctgccgctagagttttcctgctccccgcgctcgggtggcgggggcgggtctgagtggtaccccggaggagaccctttgaaggtcccttgtggggactggaaagaggacggttggttgtgtgtctgtgctcgtggggaccccgtgtgtgtgcct

SEQ ID NO: 38829 - DNA, 2300 bp, Homo sapien
ctgtgaaggtcatgtgctcccagctgctgaaactggtaagcgtaagggttgaactcctctcctgccaagccatagcctcccctgcctccaggactaatatctaaattgttttctgtcatccgatctagcatgtctacaggaaacttggactggaaaggagatcacagatggggaagagaaaacagaaggggaggaagagcaggaggaggaggaggaagaggaggaagaggaagggggagacaagatgaccaagacaggaagccaccccaaacttgaccgagaagatctttgacccttgcctttgagcccccaggaggggaagggatcatggagagccctctaaagcctgcactctccctgctccacagctttcagggtgtgtttatgagtgactccacccaagcttgtagctgttctctcccatctaacctcaggcaagatcctggtgaaacagcatgacatggcttctggggtggagggtgggggtggaggtcctgctcctagagatgaactctatccagccccttaattggcaggtgtatgtgctgacagtactgaaagctttcctctttaactgatcccacccccacccaaaagtcagcagtggcactggagctgtgggctttggggaagtcacttagctccttaaggtctgtttttagacccttccaaggaagaggccagaacggacattctctgcgatctatatacattgcctgtatccaggaggctacacaccagcaaaccgtgaaggagaatgggacactgggtcatggcctggagttgctgataatttaggtgggatagatacttggtctacttaagctcaatgtaacccagagcccaccatatagttttataggtgctcaattttctatatcgctattaaacttttttctttttttctaaaaactagctgggcccaaagtttcaaacaacagccgggcacacatagctagctggtcgatgaggcagcacccagaatggccgctgtcttgttaagctcaagctccagcctgagcaacatagtgaaaccccaattctacacacacacacacacacaaagaagactgcagggctggtggtgcagcgcctgtagtcccagttactgcagaggtggagatgggaggatcacttgagtccaaaaggtcaagaccagcctggaggctgggcgcagtgactcacacctgtaatcctagcactttgggaggccgaggcaggcggatcacctgagtgtaggagttcgagagcagcctggccaacatggagaaacctcgtctctaccaaaaatacaaaaattagccgggcggctgggcgcggtgactcacgcctgtaatcccagcactttgggaggccaaggcgggtggataacaagattaggagatcgagaccatcctggctaatacggtgaaagcccgtctctactaaaaatacaaaaaattagccgggtgtggtggcaggcgcctgcagtcccagctactcgggaggctgaggcagaagaatggcgggaacccgggaggcggagctggcagtgagccaagatcgtgccactgcactccagcctgggtgatagagcgagactccgtctcaaaaaaaaaagccacgcatggtggtgggcgcctgtaatcccagttactcgggaggctgagacaggagaatcgcttgaacccaggaggcggaggttgcagtgagctgagatcacgccactgcactctagcctgggcgacagaacaagactccgtctcaaaaaaaaccaaaaaaaatttagaggggcgtgcacgcctgtattcccagcactccaggaggctgaagcaggaggatcgctagaaccaggggttcaagactggggcgagctatgatggtgcccctgcactctagcctgggcgacagggcgagactgtctcaaaagaaaaaaagaccaggcgcggtggctcacacctgtaatcctagcacttcaggagaccaagactggaggatcgctggagcccaggagttccagaccagtcctggcaacagaactagaccgtgtctccaaaaaaaaagagaaagaaaaaatagaaaccttagctgggcttggtggtgcgcatctgtggtcccagatactcgggacgctgaggcgggaggatcacatgagcccaggaggttgaggctgcagtgaggtatgatcgcgccactgcactcctgcctgggcaactgagcatgaaccctcctcaaagctaatggcgcttcaaaattctgcagtgcaaagaagttgctggggttgcggagcggagaaccgccaggaggctggagcccagcca

SEQ ID NO: 38830 - DNA, 2300 bp, Homo sapien
atgggtagtataatttgttccagcagattttattccagaaacacaaagatggttaaatatcaagaatactgccaccataatttattacatcaaaatcttttttttttcttttgagacggagtttcattcttgttgcccaggttggagtgcaatggcacaatctcagctcattgcaaccttcgcctcctggattcaaggattctcctgcctcagcctccccagtagctgggattacaggcatgcaccaccacacccacctagttttttttttttttgtttgtttgttttgtatttttagtagtgatgaggtttcaccatgttggccaggcaggtctcgaactcctgacttcaggtgatccacccgccttggtctcccaaagtgctgggattacaggtgtgagctaccacgcccagccttgaaattgctgtttctaacaagtcttaaaagacacccagactttaacaattgttattatattcagatttttttgttgctttttgagacaatcttgctcttttacccagtcttgagtgcagtagcatgatcatggctcactgcagcctcaacctcctgggctcaagcgattctcccacctcagcctcccgggtagctgggactacatgtgcagtatcatgcctggttaatttttaaatttttagagatggggtcttgctatgttgcccaggcttctagaatcattcttcatattatttcactaacacagcctccaccacattaatatggcaacaggtttagaaattatttaaaacaaaaatttctaatgtttacatatattgtgtgatgtgtgtgtgtgtgtgtgtgtgtgtgtgtgtgtgtatcattccaaggtactgtttctaattttttcctgtagggaatgaatattcagtattgcagctgcattggctagctggggattctatttaccaccacattgtcccggactgaatctggggacaaaaaaaccacttcgggaacaaattcttgtcttcaacaaagagctgtcttgagtaggcacaaaagtagcatttgagggccggacgcggtggctcaagcctgtaatcccagcactttgggaggccgaggcgggcggatcacgaggtcaggagtttgagaccagcctggccaatatggtgaaaccctatctctactaaaaacacaaaaatagccgggcgtggtggtgggcgcctgtaatcccagctactcgcgaggctgaggcaggagaattgcttgaacacgggaggcggaagttgtattgagccagagatcgcgccattgcactgcaacctgggcgaccgagtgagactccgactcaaaaaaaaaaaaaagtagcatttgagtaccttttttttccttttcttttcttttttttttagaggaagggcacccaggctggagtgcagtggcaccataatagctcactgcactctgcaactgctgagctcaagagattctcctccatcagcctccctagtagctggaattactggcgtgaggcaccatgcccggcttattttcttatttttttgtagaggtggttggagcggggggactggggagggtctcgctatgttgctcaggctcgtctcgaactcttgccctgaaatgatccgtcctcggcctcgcaaagcgctgagattacaggcgtgagccacggcgcccagccttgaatagtttttcacatgcattgcacgttatttccttttattctctagtttttgggtccagtcttaaacctgggaagggattcatttgggggggtcacaccagcgggcatcctggctcaggcggaactctggctccagacagtgcgcccaggaccaaacggtcaaccccggcctactcccgcccctcccagatcctcccctcctcggacgctcccgcgtcttcctctcgctcaggcactgaggggcggggagatgggtgttaaagaggggatatcaccaatcaacgtgcgcctccgggaaacagcgcttcgcactggctggttgggtctgacgacgtggccactgtccaatcctcatgctagaggcggggctaaaggccagtggcgcaagcagaaggaggagcgcagcggctgcaagcacgtgaccggggcctgaagccggaagctacctatctggtagggagctcccccagcaccgaagactgcgatggtgagtgaggacgcatgcgcgagaggacccgccgggggttcagcgtctctgctccccagtctgtgtggtttccccctggtgggcctgcgctccaccctcacctcctatccgctcggggaggaagaggggatggaaatgggagg

SEQ ID NO: 38831 - DNA, 2300 bp, Homo sapien
tgatttatggagggtggaaaggggagggatggagaatcttcctgggagaagtggggttggaagggttgtttttttttttttttccgagacaagatctcactctgtcacctaggctgcagtccagtgtcccaatcatagctcacttcagcctcaaactcctgggctcaaaggatcctcctgcctaggccttctaagtagctgggaatacaggcgcgcgccaccgcgcccggataatttttaaattttttgcagagaggagttcttgctatgttggccagggtggtcttgaactcctggcctcaagcgatcctgccgcctcggcctcccacagtgctgggattactggcgtgagccaacccgcctggccgacgaggtcttccatttcttttccaagaagcctggccgcagcccccgcctgcattctcgcagcctcagagcagcgggaccccgccccctcctccacggtccgggcacccgcagattccggggcctcggcggccacgccccctcccttccgcttcctgtttctctccagtcattcggctcagtaccccggttccggcgctgccgggtctcggttcgggttcgttgccccggtgccgggaccgggccggtctctccggccgccccagccgggcgcagcagccggaggtgtcgggaccctctggacccaccctagcgggccccgccggcggtcggcctccggtccgggctcccagtcgcgccgtcctcgccgccccatggagtcccagtgcgactactcgatgtacttcccggccgtgccgctgccgccgcgcgcggagctggcaggggatccgggccggtaccgggcgctgccccggcgcaaccatctgtacttgggggagactgtccgttttctgctggtgttgcgctgccggggcggtgcggggtccggcaccgggggcggcccgggcttgggctccagaggagcctgggcagaactggcaaccgccctggccgccctggcctcggtcagcgccggaggcgggatgccggggggcggcggcgccggcgaccaggattcggagcccccagggggaggggatcctgggggtgggggtttgttccgaggctgcagcccccttctcacccacggcccgggccctgctacctcagggggagcgaccacggtgaggagctttgggggacctggcacaggacggaggggcggtttgctgggggcctgaggcaggaggcagatgaactgccggtcttaaagggaaaggctgcaggctgcctctgacttgctcctgacctcttcacccctttcccaaccccagctgcctgtggaggaaccgattgtgtccacagatgaggtcatcttcccactcaccgtttcactggatagactgcccccagggacacctaaggccaaggtaagatgagcaagagtggagctattgtcctaattcagacaccttttccgggctcagccatctgtctttcctcttgacagattgtagtgactgtgtggaagcgggagattgaggcaccagaggtcagagatcaaggctacctgcgattgctgcagacccgatctcctggggagacattccggggcgagcagagcgctttcaaggcccaaggtgggcagggcagcgcagaggcaaagggctagagtctgggaattgggggacagaggggaggggtcacactggaaagtggctaatgggctctgagaagaggaaggtgagaattctgggttggaggtgaggtcagcctccagaccatcacttcttgcccccaccccctcccgcagtgagcacgctgctgactctgctgccccctccggttctgagatgccggcagttcactgtggctggaaaacacttgaccgtgctcaagggtaagcagggctgccggctccagcctccgggagcaacaagggaactgattggatgcagttcctctgggcaggctggtggggtaggtccggttttttctgggtaaaggtggggcctgaggggtccagctattctgagccaagctggtcctctcccacagtgctgaacagctcctctcaggaggaaatctccatctgggatatccgaatcctccccaacttcaacgccagttatctacctgtcatgcccgatggctctgtgctgctggtggacaatgtctggtgaggtcctgggaggggcgaggctgtgaagtggtggggatggcttcaggggctgagctctggcatggggagaccatgccttgtcctcttttctgagctagtcaccagtctggggaagtctccatgggctccttctgccgcctacccgggacct

SEQ ID NO: 38832 - DNA, 2300 bp, Homo sapien
cagacagctgtggccgagctccgggctcgccgagaggccctagcgaaacattgtctggtagggggtgaggcttctgaccccaaatacatcactgatcgccggttccgccccttccagtttgggtcagctaaggttttgggctatatacttcggagtggattgagcccccaagaccaagaggaatgtgagcgcctagctacccctgagctccagtacaaggacaagctggatgccaagcagttcccccctaccgtctcactgcccctcaagacttcaaggccactctccccataaacatcagactacagatttaggtggaagagcagccatgtttgaagggcacatgtgatgagtggggggcagcaagatgccatttctgcatctcccagaagggatgagtctttgtcccgatgcaagccccctcttcgctgggctcccagcagtgcttccctcctccaccctccactcattttgttctttccccccaactttttttttttttgaaacggagtcttgctctgtcccccaggctggagtgcagtggcatgatctcggctcactgcaacctctgcctcccaggttcaagcgattctcctgcctcagcctccagagtagctaggattacagatacgtgccaccatacccggctaatttttatatttttagagacagggattcaacatgttggttaggctggtcttgaactcctcacctcaggtgatccacatgactctgcctcccaaagtgctgccattacaggcgtgagccactaggcctgacctccccttcccctttcctgccccaaggcagatccacatcaccgaagctccctagaggggcaaaagatggagtgagccacaggaagtttggggcgtggtgagttggaatgatacgtccatttctctatgaaatatttgctactagactgttcatttctctctgacatgtttgttgaatgaataaataatttgaaacttctacttgatttatggagggtggaaaggggagggatggagaatcttcctgggagaagtggggttggaagggttgtttttttttttttttccgagacaagatctcactctgtcacctaggctgcagtccagtgtcccaatcatagctcacttcagcctcaaactcctgggctcaaaggatcctcctgcctaggccttctaagtagctgggaatacaggcgcgcgccaccgcgcccggataatttttaaattttttgcagagaggagttcttgctatgttggccagggtggtcttgaactcctggcctcaagcgatcctgccgcctcggcctcccacagtgctgggattactggcgtgagccaacccgcctggccgacgaggtcttccatttcttttccaagaagcctggccgcagcccccgcctgcattctcgcagcctcagagcagcgggaccccgccccctcctccacggtccgggcacccgcagattccggggcctcggcggccacgccccctcccttccgcttcctgtttctctccagtcattcggctcagtaccccggttccggcgctgccgggtctcggttcgggttcgttgccccggtgccgggaccgggccggtctctccggccgccccagccgggcgcagcagccggaggtgtcgggaccctctggacccaccctagcgggccccgccggcggtcggcctccggtccgggctcccagtcgcgccgtcctcgccgccccatggagtcccagtgcgactactcgatgtacttcccggccgtgccgctgccgccgcgcgcggagctggcaggggatccgggccggtaccgggcgctgccccggcgcaaccatctgtacttgggggagactgtccgttttctgctggtgttgcgctgccggggcggtgcggggtccggcaccgggggcggcccgggcttgggctccagaggagcctgggcagaactggcaaccgccctggccgccctggcctcggtcagcgccggaggcgggatgccggggggcggcggcgccggcgaccaggattcggagcccccagggggaggggatcctgggggtgggggtttgttccgaggctgcagcccccttctcacccacggcccgggccctgctacctcagggggagcgaccacggtgaggagctttgggggacctggcacaggacggaggggcggtttgctgggggcctgaggcaggaggcagatgaactgccggtcttaaagggaaaggctgcaggctgcctctgacttgctcctgacctcttcacccctttcccaaccccagctgcctgtggaggaacc

SEQ ID NO: 38833 - DNA, 2300 bp, Homo sapien
cctcgaggcttctacaggcctggggcccgtggggaccactacgctcgcaacttactatggtttgactttggcctgccctttcccccagagaagagggccaagagagggaatattcatccccccagagaccccaaccccccacagctgcaggtcttgccttctggtgctggccctcgagcccaaaccctcaatcccaatgccctcatccatcctgtttccactgttactgatcatcgcagccagatatcaagccctgcctctttcgatttggggtcttcatccttcatccagtggggtctggcatggctggactctgtctttgacctggtcatggtggctgagtacttcgatgagtcattggttctgctggcagatgccctgtgctggggtctagatgacgtggtgggcttcatgcacaatgcccaggctggacataagcagggcctcagcactgtcagcaacagtggactgactgcggaggaccggcagctgactgcacgggcccgagcctggaacaacctggactgggctctctatgtccacttcaaccgcagtctctgggcacggatagagaaatacggccagggccggctgcagacagctgtggccgagctccgggctcgccgagaggccctagcgaaacattgtctggtagggggtgaggcttctgaccccaaatacatcactgatcgccggttccgccccttccagtttgggtcagctaaggttttgggctatatacttcggagtggattgagcccccaagaccaagaggaatgtgagcgcctagctacccctgagctccagtacaaggacaagctggatgccaagcagttcccccctaccgtctcactgcccctcaagacttcaaggccactctccccataaacatcagactacagatttaggtggaagagcagccatgtttgaagggcacatgtgatgagtggggggcagcaagatgccatttctgcatctcccagaagggatgagtctttgtcccgatgcaagccccctcttcgctgggctcccagcagtgcttccctcctccaccctccactcattttgttctttccccccaactttttttttttttgaaacggagtcttgctctgtcccccaggctggagtgcagtggcatgatctcggctcactgcaacctctgcctcccaggttcaagcgattctcctgcctcagcctccagagtagctaggattacagatacgtgccaccatacccggctaatttttatatttttagagacagggattcaacatgttggttaggctggtcttgaactcctcacctcaggtgatccacatgactctgcctcccaaagtgctgccattacaggcgtgagccactaggcctgacctccccttcccctttcctgccccaaggcagatccacatcaccgaagctccctagaggggcaaaagatggagtgagccacaggaagtttggggcgtggtgagttggaatgatacgtccatttctctatgaaatatttgctactagactgttcatttctctctgacatgtttgttgaatgaataaataatttgaaacttctacttgatttatggagggtggaaaggggagggatggagaatcttcctgggagaagtggggttggaagggttgtttttttttttttttccgagacaagatctcactctgtcacctaggctgcagtccagtgtcccaatcatagctcacttcagcctcaaactcctgggctcaaaggatcctcctgcctaggccttctaagtagctgggaatacaggcgcgcgccaccgcgcccggataatttttaaattttttgcagagaggagttcttgctatgttggccagggtggtcttgaactcctggcctcaagcgatcctgccgcctcggcctcccacagtgctgggattactggcgtgagccaacccgcctggccgacgaggtcttccatttcttttccaagaagcctggccgcagcccccgcctgcattctcgcagcctcagagcagcgggaccccgccccctcctccacggtccgggcacccgcagattccggggcctcggcggccacgccccctcccttccgcttcctgtttctctccagtcattcggctcagtaccccggttccggcgctgccgggtctcggttcgggttcgttgccccggtgccgggaccgggccggtctctccggccgccccagccgggcgcagcagccggaggtgtcgggaccctctggacccaccctagcgggccccgccggcggtcggcctccggtccgggctcccagtcgcg

SEQ ID NO: 38834 - DNA, 2300 bp, Homo sapien
gttcaaatgattctcctgcctcagcctcctgagtagctgggattacaggcgcctgccaccacagtcagctaatttttgtatttttagtagagacggggtttcaccatgttggccaggctgatcgcaaactcctgacctcaagcgatccaccagccttagcctcccaaagtgctgggattacaggcgtgagccaccgcacccggccacgaagcattattaaggtgaccacaccactgccccctgccttcaggatgggaggccttgttctctgagtgtcagtctctggctaccttgccacgtccttgacaatgtctgctttcaaatatcactttctccttccttccttctttctttccaccgcctgaatgaatcttttgttctgcggcaagccaagagaaaatggtaggattgattcccaagtgtgaaagcgggggcggaagtggtgtcttccaagaggagtctgggtgccctgccgaagaggggaagatgcagcgagggagagacctagaaccgcgatcaaagctgcagcagctgctggggctggcggcacaaagggaggagggaggagcctgggcgctgagaaagttcttggggaaagttgagctgagccaagagtcgggcggtggctgggatgggcgggagggcccggcccgatttcccttgctgctccccttgtggcctggtgagtgggaagtgaaaccaaggataggaccagtggagggaccctctaatttatgggaggagacatgaggggttcatggaaccccagcgggggcaactgggcagtcaccaaagctggaggggacagagggctgggatctccaatcatgggaagggagagatggatggaaggaaatgaagaactctggataggggagacgcggctagaccccaggggctgtgatcagggagggaattggggagtgatgccagagagggcaggtctccgggagtaaaagtgtggcttctctctgcttggggttacccctggctcatcggagcagggagctgtcggggcttgttggaggggccgtggtccctgatcgcgagttgtaatctgaaggggcggggctggactcccggttgattaggaagctcgggcttcagaaggaactctgcagttagtgtttgcgcctttctccttatctttgtgtcatagtctctctgtccctctgtctctctctctctgtttctctgtgtgtgtgtgtgtgtgtgtgtgtgtctctctctctttctgtctccctctccagccccaccctttcagtctcctccgggtgcactgataaggttggaaagtggaatggtgggtaagtccagggatctgggctttataagtagccacacgtctcccccagcccctgtcatacatgggggtctgccccgtgctgagacagagaaaaaagaggcgcgggaatttataacccaatggctcttacccattgcaatgccactcctggaagtccaacctcccttcctcctgcctgggttcatacacctgtgtcctgtctgatcctcattcccactgtatggcttcccttcctggtcctgggatagggctctttatccccatctgtgacagccagaggggctctggaggaaaccaggttcccgaccatggtctgacctgactgtgttaatgagctgattgatctgatctctctctctcttgctggctgtttcattcacgagctggggctttttctctccttcccttataaatccccaaggctcagggacaactgtaggtggggagcgggaggaactggagataagaaagtgatagagcagagacagtagttgtggggccacctaggagagtctgggtatagacaacatccccagccactccccttccctgaaggaggtctcagctgcagcaggagagaaggctgcctctgcctctctccttagacttcccttcttcccccctcatttcccttctagacgctgacagaggcaaaaatctgctaactcagggggcagactcaaccaagactgtgagcaggcctggggaatgaccccccgatctccaaccagtgccttccgcagctgcacggctgtctccagctgtctctgcccctcttcctggccctggctccatctctctgtcacctcacccttccctgtgccacatgggccctctctctcctgccaggacgctgcggctctggggacctcggagcctgggggtggctctgggagtcttcatgaccattggctttgcactccagctcttgggagggcccttccagaggaggtgagttcccactttgccccaactccttctagacgccccgtac

SEQ ID NO: 38835 - DNA, 2300 bp, Homo sapien
tctccccccatgtctgctgtcggatctctctccttccttctctccctgccttcctgtcactcatggtctttctcccttccccaacccggcatccacctgtgtctccctccctttcctctctctttctgtttttatctcaatttcttttcctccctctgtctccctctgcttctccctcccatcctgctctgtccctcttcttccttgcagatgaggatgccagcggctctggagggggacagcagtatgcagatgactggatggctggggctgtggctcccccagcccggcctcctcggcctccataccctcctagaagggatggttctgggggcaaaggaggaggtggcagtgcccgctacaaccagggccggagcaggagtgggggggcatctattggttttcacacccaaaccatcctcattctctccctctcagccctggccctgcttggacctcgataacgggggaggggtgccctagcatcagaagggttcatggccctttcccctcctcccccctcagctgggcctggggaggagtcgaagggggctgcagagagggtagagaagggactttgcaggtgaatggctggggccccaaatccaggagattttcatcagaggtgggtgggtgttcacaatatttattttttcatttggtaatgggaggggggcctgggggtatttatttaggagggagtgtggtttccttagaaggtatagtctctagccctctaaggctggggctggtgatcagccccaacagagaaaatgaggagtttagagttgcagctggggaaggggtttgaaggaagttggaagtggggaggggtgggggcatctggtctcagaaatggaccagctggatgcagggcaggggactgagggtgcttgagtaggatgtgagacttcatgggcctgggttctgttgagttttttcagtatcaatttcttaaaccaaattttaaaaaaaacaaggtgggggggtgctcatctcgtgacctctgccacccacatccttcacaaactccatgtttcagtgtttgagtccatgtttattctgcaaataaatggtaatgtattggaccccatgtgtggcttctgtgctgtcaccatcagtgcctgagccctggctcctagcagaggtctcagagcctctgtgactggctcattttctgccggcttttcacttcccttggcacctgtcccccaggaggcgggcctagacaataacctctgatctccaaattgcccaccctctgggcctctgagcatcttcgtttgtacaacagggagaattgtggggaccaaatagaatctgtgtgaaaaagcaccttgtcacctgcaaaatgctctttgaacatgaggcttttttttttttttttttgagatagagtctcgctgttgtcgcgaggctggagtgcaatggcgcgatctcagttcactgcaacctccgcctccccagttcaaatgattctcctgcctcagcctcctgagtagctgggattacaggcgcctgccaccacagtcagctaatttttgtatttttagtagagacggggtttcaccatgttggccaggctgatcgcaaactcctgacctcaagcgatccaccagccttagcctcccaaagtgctgggattacaggcgtgagccaccgcacccggccacgaagcattattaaggtgaccacaccactgccccctgccttcaggatgggaggccttgttctctgagtgtcagtctctggctaccttgccacgtccttgacaatgtctgctttcaaatatcactttctccttccttccttctttctttccaccgcctgaatgaatcttttgttctgcggcaagccaagagaaaatggtaggattgattcccaagtgtgaaagcgggggcggaagtggtgtcttccaagaggagtctgggtgccctgccgaagaggggaagatgcagcgagggagagacctagaaccgcgatcaaagctgcagcagctgctggggctggcggcacaaagggaggagggaggagcctgggcgctgagaaagttcttggggaaagttgagctgagccaagagtcgggcggtggctgggatgggcgggagggcccggcccgatttcccttgctgctccccttgtggcctggtgagtgggaagtgaaaccaaggataggaccagtggagggaccctctaatttatgggaggagacatgaggggttcatggaaccccagcgggggcaactgggcagtcaccaaagctggaggggacagagggctgggatctccaatcatgggaa

SEQ ID NO: 38836 - DNA, 2300 bp, Homo sapien
gtagatgaggccaagcgtgagaggcagagcaggtagtcaggggggaagctgtactgtgggtgcagcagcgggaacactctctccaggagctgtgcccagaaatccgccagggtgtcatccaacccctcaccagattccccatagaagtctcgcagccgagagaacaggccattgaatatgagggcgtgctgggcatacaggcggccgtaggagtgggagaagagctgggtcagagagtgctgggctactgagagcatctccagaaaaaactctgcagcaaatgcagggaacaggtggaaggcaggtcaggccaaagaatggggagaaaagtgaacaggcagaggcaggaggagatgggagagaagagaaaagacaagtgaatcagaaactgagtaactctcagagatggggcagacagggaatgggggagggcagggccctggagacagagtctggggggtgggcgggctgggaggggatggagtcttcacagatggagtaaggagtggggacaggagccttgctggggtcctaagcaccgagaggagctgtgaagctgagtttggggaccccaggtcctcaccatcaaattttctgtgcctggcagccagtgtgtgaaccagaaaggagccgctgtcctccaccaggcctcggaaggtggcctcagtctccctgatcagcctctgctctgtctcactggaacagcaggtgtactcctggggacagacccggaggtgctcacctggacagaggagacgtgaaggaatggtgggaagtgatatcctaaaatcccttccatttcccgcctatctctggggactatgccttctcttctacctgcctggtctcttttctattgtctgcaccctcttccctacctgaacctatcccctaccttattgtctcctgacccatcccaagttcactcccattagccacgggatcatctatttaacagctgccctgagggccaagtcagtggtcagagtgtcctcaggtgaccctccccaatgtccacaccccagacctcgagggacttggagaacagcttctaggggatgaagaatggggcttggaagggtggggttacttggtgagcaataaagtattctcatagaaggggctaatagaaacagcgaggagaacatggctgtgaagaaagaaacacatagggggtgttaattaggaggaggggattcctggggtggggatggagtaagagcgctattctttgcataggagggttattgtgatcccggtaaggaagttacaggaggagaacagacattactgtgggatgaaaagattagtataacggtcactctgaaaaggaagagagttattgtgagatgaggaggccccgcccccgccccccacccccaattctctagtcttcctctttctcctcacctgagatcagggcgggagggattaggtttaagctatatccccgggcccccagcacctgccgggtctctgcacaactccgggtgacctttgcctcgctcccgggtccgggaccaggaccgggacacagaggcagcagcagaagcaggagaggtcgcagcgcggacataactgcagccaccccaggacggcaaagtgggtcctaaggaggaaagcagagcctcccaaactcgggaatccggtactcggccgcgggaccgctccgcgggccagagaaagagcgctgctccggaaaactgaataccgagcacgatagctggaccaggcggcatctgccgagacaatgggagcggggagccggacagggggcggggcccgaggcggggccccgccaataatggctcggagccggcttcaggggcgggggcaaggaagaaattaagccaatgtagcgcggaagctcggcaggggggcgggacccggctggcactcaggaggttggtgaaataggggcgtggtctccctcgggggcgtggcgatccggctcaaaaggcggggcctgggtggaacctagcctatggcaattgagaagccagattaaaggggttactagcagtctggtccaaaacccgcccaatggagtaggagattgagggtagcgggggtgggacctgggtgggggcggggctaaagcgggccgcccgcgtgcccaagcccacgtgagagggcaggacgcctgagagcttgaggccacacgaggctgtggagcggcgtgactcaaacgtggcgcgcatcagctcgcacacttccaaacctcgcgatagctactggccctgggcgagccgttgggattgcgcttgcgcacagcgtgtcttgtacgttcccgcgctttt

SEQ ID NO: 38837 - DNA, 2300 bp, Homo sapien
ggcatacaggcggccgtaggagtgggagaagagctgggtcagagagtgctgggctactgagagcatctccagaaaaaactctgcagcaaatgcagggaacaggtggaaggcaggtcaggccaaagaatggggagaaaagtgaacaggcagaggcaggaggagatgggagagaagagaaaagacaagtgaatcagaaactgagtaactctcagagatggggcagacagggaatgggggagggcagggccctggagacagagtctggggggtgggcgggctgggaggggatggagtcttcacagatggagtaaggagtggggacaggagccttgctggggtcctaagcaccgagaggagctgtgaagctgagtttggggaccccaggtcctcaccatcaaattttctgtgcctggcagccagtgtgtgaaccagaaaggagccgctgtcctccaccaggcctcggaaggtggcctcagtctccctgatcagcctctgctctgtctcactggaacagcaggtgtactcctggggacagacccggaggtgctcacctggacagaggagacgtgaaggaatggtgggaagtgatatcctaaaatcccttccatttcccgcctatctctggggactatgccttctcttctacctgcctggtctcttttctattgtctgcaccctcttccctacctgaacctatcccctaccttattgtctcctgacccatcccaagttcactcccattagccacgggatcatctatttaacagctgccctgagggccaagtcagtggtcagagtgtcctcaggtgaccctccccaatgtccacaccccagacctcgagggacttggagaacagcttctaggggatgaagaatggggcttggaagggtggggttacttggtgagcaataaagtattctcatagaaggggctaatagaaacagcgaggagaacatggctgtgaagaaagaaacacatagggggtgttaattaggaggaggggattcctggggtggggatggagtaagagcgctattctttgcataggagggttattgtgatcccggtaaggaagttacaggaggagaacagacattactgtgggatgaaaagattagtataacggtcactctgaaaaggaagagagttattgtgagatgaggaggccccgcccccgccccccacccccaattctctagtcttcctctttctcctcacctgagatcagggcgggagggattaggtttaagctatatccccgggcccccagcacctgccgggtctctgcacaactccgggtgacctttgcctcgctcccgggtccgggaccaggaccgggacacagaggcagcagcagaagcaggagaggtcgcagcgcggacataactgcagccaccccaggacggcaaagtgggtcctaaggaggaaagcagagcctcccaaactcgggaatccggtactcggccgcgggaccgctccgcgggccagagaaagagcgctgctccggaaaactgaataccgagcacgatagctggaccaggcggcatctgccgagacaatgggagcggggagccggacagggggcggggcccgaggcggggccccgccaataatggctcggagccggcttcaggggcgggggcaaggaagaaattaagccaatgtagcgcggaagctcggcaggggggcgggacccggctggcactcaggaggttggtgaaataggggcgtggtctccctcgggggcgtggcgatccggctcaaaaggcggggcctgggtggaacctagcctatggcaattgagaagccagattaaaggggttactagcagtctggtccaaaacccgcccaatggagtaggagattgagggtagcgggggtgggacctgggtgggggcggggctaaagcgggccgcccgcgtgcccaagcccacgtgagagggcaggacgcctgagagcttgaggccacacgaggctgtggagcggcgtgactcaaacgtggcgcgcatcagctcgcacacttccaaacctcgcgatagctactggccctgggcgagccgttgggattgcgcttgcgcacagcgtgtcttgtacgttcccgcgcttttctggaatctttcgcccccggaagggcagcggcgggcgcctgtgtggaaggtggggtggccagagacacccgagggacctgaggtggggaccttccctgaaccctgctcggccagaagtcactcttccaggctctgacaggtttctccttgacccaagaataggccctctcgcgaccctcccggccctgaca

SEQ ID NO: 38838 - DNA, 2300 bp, Homo sapien
cgggaggactgcttgagcccagtagttcaagaccaatctgggcaacatagcaagaccccatctctacaaaaaataagcaaaaactagctaggtgttgttgcgcacacctgtggtcccagctactcaggaggctgagacaggaggactgcttgagcccagcagtttgagaccagccttggcaacatgagacacacccaaaaaaaaaaaaacaaaacccaagcaaggtacacaccagggcagcttcagacacagccctctctagaggcttcagaagtgtaaactgcctgctgcaagggaatttaactcataattaaaaaaaaaaaaaaaaaggcaaggtgcccagggtggctcaaacctggaatcccagcactttgagcagctgaagcaggaggactgcctaaccctacgagttcaaaatcagtctgggcaatatagcaagatcctgtctctacgaaaaaaccaaaccaaaaccaaaaaaactagccaggtgtggtggtgcacctgtagtcccagctactcggcagaatgaagcgggacgatcgcctgagcccaggaggtcgaggctgcagcgagctatgactgcaccactgcactccagcctgggaaacagagcgagactctgtctcaaaaaaaaaaaaaagtaatgacaaataaataaaataaggcaaagagtggacctaaagcaccaagggattacagacaccagaaactgggcagtgggtttggaattgctctccaaaagccgaggcgtggtgcacagtgctcccgcctataatcccagtactttgggagggcgaagcgggagcatcgcttgggtccaggaattcaagatcagcctgggccacatagcaacgccctgtctctaaaaaaaaaaaattaaatggaaaaaaaaaaaaaagccaagcaaggcagacagcagggcagcttcagacgcacccctctctggaggcttcggaagtataaaccgccctctgcaagggaacttacaggttttttaaaatgaaataaaaaaaataaagaaagaaataagaaaaaaaatacaagaagaccccaggctttcgtttccagaggactagcacctgattccacctggaatggaacaggaggctcttaaggatttgggggtggaggcgccatgagaatagggctggaaacgcaaaaggaggaaaggcaggtgcgcgtttcctatttttccagaaggtaaaaatatctacgactgcccctggggtaagcggctccaggataaagagccttccaagcgcttaagagaatggactctcagtctatggaggcctggggagaggattctccagctctgtggcggaggccattggggcacggcccgggaaggctcctagtgtcagggccgggagggtcgcgagagggcctattcttgggtcaaggagaaacctgtcagagcctggaagagtgacttctggccgagcagggttcagggaaggtccccacctcaggtccctcgggtgtctctggccaccccaccttccacacaggcgcccgccgctgcccttccgggggcgaaagattccagaaaagcgcgggaacgtacaagacacgctgtgcgcaagcgcaatcccaacggctcgcccagggccagtagctatcgcgaggtttggaagtgtgcgagctgatgcgcgccacgtttgagtcacgccgctccacagcctcgtgtggcctcaagctctcaggcgtcctgccctctcacgtgggcttgggcacgcgggcggcccgctttagccccgcccccacccaggtcccacccccgctaccctcaatctcctactccattgggcgggttttggaccagactgctagtaacccctttaatctggcttctcaattgccataggctaggttccacccaggccccgccttttgagccggatcgccacgcccccgagggagaccacgcccctatttcaccaacctcctgagtgccagccgggtcccgcccccctgccgagcttccgcgctacattggcttaatttcttccttgcccccgcccctgaagccggctccgagccattattggcggggccccgcctcgggccccgccccctgtccggctccccgctcccattgtctcggcagatgccgcctggtccagctatcgtgctcggtattcagttttccggagcagcgctctttctctggcccgcggagcggtcccgcggccgagtaccggattcccgagtttgggaggctctgctttcctccttaggacccactttgccgtcctggggtggctgcagttatgtccgcgctgcgacctctcctgctt

SEQ ID NO: 38839 - DNA, 2300 bp, Homo sapien
ggggagggagaatgaaaggggcgaggtggtcttggatgagtgacctgattgcagggagtcacggctttttctgcacacatcactagctggatggctgtgtctgacctaggagaccacagtgagaacctgtcactaaagcaggtgcccatgatgggaagaactggaaattttatctaaagagagaggctgaagcattccttaaaccacagaagaaaacagtgaaagtacaaaatgacaacagccgtcttcaaatactgcttgtcagagggacaagagagaacagaggtgctgtgctgctccacaaggcaaaacaagagcaaacaagtctgtctgagtttcaagaggctggccctgaggctgcactgtggcagtctaggtgagagacgatggtgacaatgtgtggaggacataggccagagaattttcttcaccaagtcttgacagaatttggtgaagaactagctggagaaggcaagagtgaaggtgacattgtcacttggattttagggttggacatttagagtaactccttagtttccttttaactctcagatactgtgatttgatcaaattccaaattatgacaggtatctttgggatgaggataaaatttcctttggaaagaacccgtgggtgaaggctgccaggacacatggcctggcctggctcacatgggtgagacaggtagcttcacaaggtcctgctccactctgccacctgtcagcacaacttttactactgcagaggctgtggccactagataaactactcacaggcagtcaaactctccccatctctactgcctcaccccacctctcagttactaagcaatacttcctggagagcctgtagacaaagcacctgcagggtgtggggacatctatatgctgggccatgggacaaggcggaccaagaacctgacctccatcagtttaacgatctcaagccacaccttgggaacgtgtggattcaaacatgtttattgagcgaatcattaggacacaaaataggctgagaaagatgttccaaaaatccaggagactatgggctatttccattaaacacagaggtgctgcccttctccactccaaacagaacaggaaaaaggcaaggggactgggccacagtgcattagggaggacagggtctctcggcttctctaccccagagggaaaggttaggttagaaaaacaatgcccaactctttcccctcagagcccagggctgaagcctgggggaatgcttcattttgctccttttctctttgccttttccaaatggtcacattcttgaggtagggagtggagctggggaggggcccagagtcctgtcagaaatcctataatgagaaagatgaaaggaatacacaggacacagcaacgggccaatgggcagaccatcctcccctgggttaccctcaaagccccagagacagcccagagggccacccccaggctatggcctgtcaatttgatgagtgcacgggttgcctgccagcatttccgaaggatacataactcctgctctggggacactcacctcaatatccagctctgtagaatctaagaggtccagcccgcgctcactggtggaagagtagctacttgcttgctagagagaatgaggttaaaagtcaaaaaggcctttacacactcctgtcacttcgcaaataaaaaaaccagttcctttcccagcctcataagaacaaatatgggcacagcaggcccctatggcacctcctgggagggaagtcagtgtgggcaccaggatcaggcctgactgcagagcgcttcttggcctgctgactgagccccttaaatgactttgttttggaaaccagaaaacggattttttctgagatgttaggaaataatattttaacagaggccttgctctctagtctctggtttgaaggtatcattgtttggtttctccttctgagcacaagactcccctgttctgttctattctgttctttttccttccctgcagagaagagaacagaagaataacagcagaagatacgcagcctgtaatggactgaatatctgtgtccccctaaacccacatattgaaatccttcccccagtgtgatgctgtttggaagtggggcctttgggaggtgattgggtcataggggtgcagccctcatggatggatgaatgcccttctaagcccaggccagagggctagcttgctgtttctcctccaggtgaggatacaactagaagccagcagtctacaggctggaagaaggccctcaccagaacccaacccttggacttcagcctccagaactg

SEQ ID NO: 38840 - DNA, 2300 bp, Homo sapien
aagcgatactgtctttttgtcttaaaaggttagaatgtttctttatttctactgcacaacatctgtggatacttttttgtgcacgccctcaccctgacaggctcagctgtgaagggttcatgccagcaagccccctgctggccgtccaggacagcccagggctctggcttctcagcagcacctcccactggccaggcccaggccaggctggacgagctgaggccagcttaggtagcaggcatggaggcctttgcccagcctggtaagtgatgcagagcagtgcttttcaggggtggcactgtagatgtccagccctactaggtctgtgggtttttctcctcctgtgcggagatgagagatggtagaaatgaagacacaagacaaagagatagaagaaaagacagctgggcccgggggaccactaccacctagacgcggagaccagtagtggccctgaatgcctgaccgcgctgctatttatggtattcaaggcaaagggggcagggtaaggagtgcgagtcatctctatcgatagataaggtcacatgagtcacgtgtccaccagacaggggtctttaccttttaggtagccgaggcggagagagagaggacagcttacatcattacttcttctatgctcttctcagaaagatcaaagactaatactttcactaattctgctactgccatctagaaggtggagccaggtgtacagagcggaacatgaaagtgaaacaggagggtgactgctgaagcacagcatcacagggagacggttaggcctccggatggctgtgggcgggcctgactgatgtcaggccttccacaagaggtggtggagcagcgtcttctctaactcccccagggaaagggagtctccctttcccggtctgctaagtaacagttatcttcccaggcactggcaccactgctagaccaaggtctgctaagtaacgggtgccttcccaggcactggcattaccactagaccagggagccctctagtggccctgtccgggcatgacagagggttcacactcctgccttctggtcacttctcagcatgtcccttcagctcctatctctgtatggcctggtttttcctaggttataattgtagaacaaagattattataatattggaataaagagttatgctataaactaatgattagtaatatatataatcatagctataatctatttctagtataactattcttattctatgtattttctttattatactggaacagcttgtgccctcggtctcttgccttggcagctgggtggcttgcctcccacatggcactgctgggcattgtctgttaatattgaataattgttttaagattattttcaataaggctttaccttttttaacttgcactgtggccatgagctctgctggaagtgacttgttggtgttatctcctcagttataaagtgaagggatttttctttttcagattactgagagtcttccgttactaggtaagtcaccgcatccttataactccaggtgacactgactggggtttatgggatgaaagaggagtgtgtgcttggatgatggggtgtgatagtgaaggggtgaaaggtttcttctcacacatagacatcgtgaggtcttccttgagctctttagagccttccctcgggataggatgaaatactgagatcctagaaaggattcacaaaacgtgtcactcatcagcgcagattcaccgattcacccctagatgtgtgtgggatttggatggcagagagaaacaggcactgaagatttttggtcaggacagggcagagaaataagaagagttgaaaattcaccaaaggatagataaacccagggcgtttagagaaaacctgtagtgtgcaaaggagcccagaatcctggggcaacttggagggaaatatacttaatttgattcactaagttaggcccagtgaagggattgggtggcataggtagaagccgaaaaataaagtatcttgtattgctggagtagcctctgtttctgaggtcacatccaaacttagcgaggcagcttaacctggtgagagacatgggttcaactcctggcttctgcactgctagggcagaggactgctgtttgctgacacaatcttggtgcgttggaagtgaaagggaagaggcactggtggctgtgctttgggcccgagcagccagaagccagttgccatcacctatgacgaggagacagcgcctggggcagagcccagtatggggtgcgttcagggtagatcaggaggtatgagtgggtagtgggcgagcc

SEQ ID NO: 38841 - DNA, 2300 bp, Homo sapien
tcattacttcttctatgctcttctcagaaagatcaaagactaatactttcactaattctgctactgccatctagaaggtggagccaggtgtacagagcggaacatgaaagtgaaacaggagggtgactgctgaagcacagcatcacagggagacggttaggcctccggatggctgtgggcgggcctgactgatgtcaggccttccacaagaggtggtggagcagcgtcttctctaactcccccagggaaagggagtctccctttcccggtctgctaagtaacagttatcttcccaggcactggcaccactgctagaccaaggtctgctaagtaacgggtgccttcccaggcactggcattaccactagaccagggagccctctagtggccctgtccgggcatgacagagggttcacactcctgccttctggtcacttctcagcatgtcccttcagctcctatctctgtatggcctggtttttcctaggttataattgtagaacaaagattattataatattggaataaagagttatgctataaactaatgattagtaatatatataatcatagctataatctatttctagtataactattcttattctatgtattttctttattatactggaacagcttgtgccctcggtctcttgccttggcagctgggtggcttgcctcccacatggcactgctgggcattgtctgttaatattgaataattgttttaagattattttcaataaggctttaccttttttaacttgcactgtggccatgagctctgctggaagtgacttgttggtgttatctcctcagttataaagtgaagggatttttctttttcagattactgagagtcttccgttactaggtaagtcaccgcatccttataactccaggtgacactgactggggtttatgggatgaaagaggagtgtgtgcttggatgatggggtgtgatagtgaaggggtgaaaggtttcttctcacacatagacatcgtgaggtcttccttgagctctttagagccttccctcgggataggatgaaatactgagatcctagaaaggattcacaaaacgtgtcactcatcagcgcagattcaccgattcacccctagatgtgtgtgggatttggatggcagagagaaacaggcactgaagatttttggtcaggacagggcagagaaataagaagagttgaaaattcaccaaaggatagataaacccagggcgtttagagaaaacctgtagtgtgcaaaggagcccagaatcctggggcaacttggagggaaatatacttaatttgattcactaagttaggcccagtgaagggattgggtggcataggtagaagccgaaaaataaagtatcttgtattgctggagtagcctctgtttctgaggtcacatccaaacttagcgaggcagcttaacctggtgagagacatgggttcaactcctggcttctgcactgctagggcagaggactgctgtttgctgacacaatcttggtgcgttggaagtgaaagggaagaggcactggtggctgtgctttgggcccgagcagccagaagccagttgccatcacctatgacgaggagacagcgcctggggcagagcccagtatggggtgcgttcagggtagatcaggaggtatgagtgggtagtgggcgagccaggctgggggttgtgggggaggcctgcattgcaggtgtaagcgtgggacccacatcagattggtagtgggtcatgcatgctgggctggctctcaggtcctccctgctggcttcccactcccaggggctttctcctccgattccttagctgggtgaggggcgggacagagccctttcttagggaagcccggcaccccttgctgtccagggaaggggagtccttctagcccctgacagcttctctgcccctcccctggcctccccaggcctagccagggctgggttctcacccacctgtgccgccctgccttgttacctggaagcacagccttggggactgagcaggccctcactgtcactttaagaagggaatcagccactttgtgctcaccacctctggggaaggtgtgagaggagagaaggaagtggctgtttggctgctgacaacatgaagacttcctgcgatgagaacagaggcacaggtgccggccctgcagcccccagaacctggactggagggggccatggggcaccggaccctggtcctgccctgggtgctgctgaccttgtgtgtcactgcgggtgagtgccggcaccagagaggggcaggggctgcaggga

SEQ ID NO: 38842 - DNA, 2300 bp, Homo sapien
agccagacccacactggaatcctggctctgttatttcctaagtgatcttcggcaaatcactgagccttccaggtccagagtttctggaccgttgagtgtacagtgagcaaaataaccctgccttggccaggcgcggtggctcacgcttgtaatcccagccctttgggagaccaaggtgggtggatcacttgaggccaggagtttgagaccagccaggccaacgtggtgaaaccccatctttaccaaaaatacaaaaattagccaggcatggtggtgggtgcctctaatcccagctactcgagaggccgaggcaggataattgcttgaaccaggaggcagaggttgcagtgagccaagatcatgccaatgcactccagcctgggtgacagagtgaggctccatctcaaaaaaaaaaaaatcctgcctccttgtgggatgcagtgtcagagttcacctccctgtgccgtgccccctccccactcagggcctggcactaggtgggtttatgcaggtgcctggtgatgtatgaagagccccaaatgcagcctgggctcgagtctgcggctgggtgtggtcacacatagtgtgtgcctgtgtcccacgttcagggctactcagggactctgtctgtaggacagggtggaagggatggctccagcgtttggattctgggttttcatgagctaggtaaggaggcttagcagttgctgctgctgtggactcccccgcctgccaaagccattgccagcccctgggacttccaggctctcaggagggacatgggtgacagtcactgccccccatgatgcagcctcttcaggggccctcctggagttgcctgttcttccagagaagcccaatgtgcagggctggctgaagggggaagagaaaccccaaagccccacccagccttttcctggcctcccctccacccagagccttcctgggaggtctccaggaacccagtttgaaagccagttgcacgcgagacaatgggcgtgatgacagcatcagacccacaaaagggttgtaagaactaaagataagggcattacccactactgatgccatcgttttacggctgaggaaactgaggcttggcgcagatcaaccacttgcccacatggctcctactctgctaagctgctggggatgtcctgtgtcatctgagggccttccctgcccagtcctcccaggaagcagcctttgattcaaatcccattctgttgaaggccgagcgcagtggctcacgcctgtaatcctagcgctttgggaggccaaggcaggaggaccccttgagatcaggagttcgagaccagccagaccaacatgggaaaatgccatctctactaaaaatacaaaaattagctgggtgtgatggtgcatacctgtaatctccactactcaagaatcacttgaacccaggaggtggaggttgcaatgagccgagattgcaccactgcactccagcctgggcgacagagcaagactctctcaaaaaacaatcccatccagccaggtgcggtggctcacgcctctaatcccagcactttgggaggctgacgcaggcggatcacgaggtcaagagattgagaccatcctggccaacatggtgaaaccccgtctctattaaaaatacaaaaattagccaggcatggtggcacgtgcctgtaatcccagctacttgggaggccgaggcaggagaatcacttgaaccaggaagtcagaggttgcagtgagccgagatcgcaccactccaggcactccagcctggtgacagagcaagactgtctcaaaaaaaaaaaaaaaaaaaaaatcctgttggaaagtgaggcaaggcacagggtagagctggccccagagcctcactctccacctctctggcctaccttgccctgcccttgggacagctggaacctcagcagtcacagggctgccttctgtgtctccctccagagctgccctcctcggagcacctgagtgtggcggatgccacctggctggccctgaacgtggtgtccggcggtggcagcttctccagctcccagcctattggcatgaccaagatcgccaagtcagtcatcgccccactggctgaccagaacatatccgtgttcatgctgtccacgtatcagacagacttcatcctggtgagctgaccatcacagacacgccttgcacacttgggcccgcctctgacacactcactcccatctcccaccccttgcagccttgcccttccacgctattccagggtgggggcagagtctcagggtgagaggttggtgccccagggccac

SEQ ID NO: 38843 - DNA, 2300 bp, Homo sapien
cgagaccagcctggccaacatggagaaaccttgtcttcactaaaaatacaaaaattagccagatgtggtggcgggcgcctgtaagcccagctactggggaagctgaggcaggagaatcacttgaacctgggaggtggaggttgcagtgagctgagatgccactgcactctagcctgggtgacagggtgagagactctgtctcaaaaaaaaaaaaaaaaatttagctggacatggtattgtgtgcctgtagttccagctactcaggagactgaggcaggggaattgcttgagcccaggcattcaaggcctccatgagctgtgattgcatcactgcacgccagactgggtgacagagcaagaccctatctctaaaaagaagaaagaaactgccaaatgaatgtttgaagggctgggccattttgtactcccaccagcagcataagagagttccagtggctccatatccttgtgaaaattttcaggaataagttttaaaaaggagctggagaggttctgtagatgagggggctgcagggcaggtggcaggagaggaggccagggaggagggcgacccatggatacaccagccacccccatcccctgcaacactgtccactcaaagatcccttttccatttgcatatttgagagagtgatacttgccctttgcctggtgatatggtttggctgtgtgcccacccaaatctcaccttgaattgtaataatccccacgtgtcaagggtgggggcaggtggagataattgaatcatgggggtggtctccctcatactgttctcgtggcagtgaataagtctcaggagatctgatggttttataaaggtagttcccctgcacatgctctcttgcctgttgccatgtaagacgtgccttggctccttctttgccttctgtcatgattgtgagcacccccgcccccgcaaccctgccaaccaccaaccagccacgtggaactatgagtccattaaaccttttccctttataaattacccagtctcgggtatgtgtttattagcagcatgagaacagacaaatacacctgggttacttgtgggcttctttctgtcctggctcccctcaatgggtggggatgcagagcccatgcctggctttgtgcttgagagccggaacaccagataagcggccaggggtcagtttcctgcaagcctctgcctgtgcacgcttggacttgccatctctgcttgcaatactctctagggtgcagtgggggtgcggttctggctaaatggggaacagggacacgggggttgagggggtgatgacccccatcacccaaggaccaaaagccttgaagcccagcctgagagcggcctggacacagacttgggcaccaaaaccatgcccaggactgaggccagcagggtcacagttctggtccctgtttttggggaacagatggtctcgttttgggggtagatgagcaacatacctccccggctgagcggtgctatcagaggtgatgtgaggtggggcagagatccatgtcccaaaaatgtcacggatggccgcattcctctctctttagggatggaaagttaaccaagggctgggctgtcagtcagctggtgggaattaggcatttttgtgacttggagctccagagttgctgaggaggagcccaagacaatgggaggggagatgggaacagacacctagaggttacagtggcagggccatggaaaagacggctcctctgcctgacccacactggagccaccctttggccacttcttccctccaagaaaacttgggatctcgggccctcaggcctggacacaatcataggggctgactggctcagaggtccccaaagattgcgggggtacagtggggacaatcagcatctctgtgcctctcctgagtgagaactgagtagggggacatgaagggagagataaacaacttacccgcggtcacccagcagcctggggctggaactctgggtaaactgagacatcatccccggggcacgggtgggcagctgccccaggggacctgcctggactaatgagatattctgtgtctgtctgtccatccatccaggtgcaagttcttcagtctgactgagacaccagaggattacactatcattgtcgatgaggaaggattcctaggtaagtgcttctctccctaggggctcggctggaccatgccccgaagtcagggctggctacccacctccttatttctgtccccaacccacctccttatttctgcccccacctaccttcttatttctgcccccatctgctggtcagctag

SEQ ID NO: 38844 - DNA, 2300 bp, Homo sapien
acgaaggcacagaggtatgtagggaacaataagggaaattgtgtatttgctgggggagggctaaagatgaggattcaaggccaggagcagtaatcccaggactttgggaggtcgaggtgggaggactgcttgagcccaggagttggaggctgtattgatctatgatggcgccactgtactccagcctgtacgacagagcaagactctgtctctaaaagagaaaaataaaaaacaaaaaaataaagatgaggattcaggatctagatcccaaagggcctcgaatgccatgtcaacgatttgatgctatagagtgactgacaaaactgtaaccgggccgggagtggtggctcacgcctggaatcccagcactttgggaggtggaggccagtggatcacctgaggtcgggagttcaagaccagcctgaccaacatggagaagccccgtctccacacaaaattagccaggcgtggttgtgcatgcctgtaatcccagctactcggcaggctgaggtaggagaatcgcttgaacctgggagatggaggctgcagtgagctgagatggcaccactgcactccagcccggacaagagcaaaactccatctcaaaaaaaaaaaaaagaaaagtaaacaggtggcacagggaccctcagggcatgctgtcctagtctgggctaaacgtaggttttggagagggaggtgacagagctatgggtcaccacctgggggcaggtattacaggaagaatctaaggggttctacctggatggctgattattgaaaacagtttaaatgctatgttcgcaggctgcgacccattaacacttgctaaaaagccatttcccacaatcgtcccacaccatccacacagcagttctgtgtccatgagggggccaagtagtgctatctctattttacagacggacaaagtgtgagccagaggagagactttgcctcagccacgcaggcagcgggctctggtcacacatgacctgaagccacgatccgggctcagagtgcttggggtggcaggtcctcaggcatttgacgaatgttccgcaccttctgaggccggaccatggaaacagagatggcctttggcctctgagtcatcttgaaactggactagtcagctgggtcacctgggcctgggacaggacaggctgctttctgcaggagggaggaagggggacccactgagggacaggttttcttgtgttcccagaggccagcaggggggcttgaccccagagacacgcctatccatgagtacccaaaggggaccctgagttgggggctggaagaaggccagtctctccaccaagggaaaggggctgagggaccctgccctttgctgcctttctaagaagcccccaaatgccccctccttccagcacccaggccctgtgcacagccgcagcctgagtcatcatcctcatttgaatggtggccgagaaatcagccagggggctgcccagggctgagggccaagacttggaaaaacaaggctgttctgttacctccaagccttggaacgtccagcccggctagggagtggggggcagagggcaggcagaagcaggatctgaaggtgtcaacagccagagggggctttgtgtgaggggtgggggcgcggttcagaatccgagctgttggcttttgttttcaaatgacctgtttaatcattaccctttgcaatcaacggggagcacaggctccgtggcagaggcttggcgactatttcaaatctccatcccctactgagcagccggagaagaaagtaaacaagatgccaccggcaggtctggctccatctcgcaaacaatagccggactgagcacccggctcagacacacacatcaaagtgagatttccaagccagaacttttcacaggcagataacaggctgggatggaattatttccctgtgtcccttgagctcagtgccaaagggggcagcctacaggggctgtcattttcacgctaaccttgacccgaaacgtattcattcattttgcagtgagggagagccaccaccgccccaaaccgcgaaaaaccaaccagtaacaactttatcattcctttttaacagtcacaatcgtgggcaaatgagacttaagttacagcagctagctggcactcacactcccctcggctcagggtccttaaacaacaacaacaaaaccctaatgcaagcacccaccggggctcacaatgtcaaacccttacctggcatagggaaaatccaagtgagagagagagtgagtgtctgtgtgtgtgtgtgtgtgattccatctgttacc

SEQ ID NO: 38845 - DNA, 2300 bp, Homo sapien
aggaaggcaagtttgatcaggcccgtaggtgaacagcgggatactctccttggcgacgctggcaacttgcagccggtgctccaggatgtggagttccatcgtccgcccgcgccccgtccgcggcagctcatccgctgggggacgagccgcggcccccgccccctccgcgccctgccggcaccgacagccggcccggggacccgggagctcggcgccaggcgcggggggcggcggcggccggaccgggccggacaaaagggaggaggcccgccaagttgcgagggggagccacgggtcgagggaggcagcgccggcggagcagcggcgcgcgggtgccggcgcggggagcagctggtgttcgctgtaacaaacaacttgccactcaaacgccggtccccactgcgcatgcgcggtccgcgcgcggcctgccaggacttgtagtccgcctgcggggctctcccggtgctgctgctgctgctgccgccgccgggcggccggagctaccggcagcccgatgcacgggaaatgcaggagagcgggcaccctcaggaccacggggaaggccgaggggaggcacggggcgggtggagccagcctgagcctaggcgcgccctctggcacccactcaggctcggtactaggcgcttggagtgtaaagcgagcaaaccagacgactccggtgctggagaaggcccgagtctgggagcgccaagatgtagggcaatcggtcatgagagtgcagagaagccaaaccaaaaagcttgctggggacccggagggaggggattgacaggtcaaagggggtgacctggggggagggggacactcaggctgggttttgaaggatgaatgggagttcgtagcaagggagtgagggcgcgcggttgaaggacagaagccttcgggaggctgaggcaggtggatcgcctgatgtcagaaatttgagaccagcctggtcaacgtggtgaaaccctgcctctactaaaaatacaaaagttagcagggcatgctggtgagtgactgtaatctcagctactcaggaggctgaggcaggagaatcgcttgaacctgggaggcggaggttgcagtgagctgagattgcaccactgactccagcctaggcaatagagtgagagttcatctcgaagaaacaaaacaaacacagtacaaaccaaaaaacaaaacccagctgggtgcagtggctcacgcctatcatcccagcatgttgagaggcttgagttgggcagatcacttgaggtcaagagttcaagactaacctggtcaacatggtgagatcccgtctctactaaaattacaaaaaaattagctgggaacggtcgcatgtgcctgtaatcccagctactagggaggctgaggcaggagaatcacctcaacctgggagatggcagttgcagtaagccaagatggcgacactgcactccagcctgggcgacagagtgagtgagactatgtctcaaagaaacaaaaaaaaaaaagaaagaaaaatctccaagtatgtttggaagaggttgaccaactgccctgattttcctgggaccaaggagaatttcaagatgtaagactttcattttcgaaaccaggacactctccaggaagacaagttggtcacaggactttgaaacgatttacttatgtaaatctatgaactctaaatacagatcgagtattgtgaatgaaaattgagcatccaaactgagatgtgctatcgtgtaaaatgaaccctggattgcaaagattattatgaaaaaactttattttattaataatttaaaaatattgattatatgttgaaacacttttttttttttctgagatggagtctcactgtgtcacccaggctggagtacagtggcgcaatcttggctcactgcaacctctgcctcctgtgttcaagtgattctcctgcctcagcctcctgagtagctgagattacaggcatgcgctaccacgcccagctaatttttttatagcagagacagggtttcactgtgttggccaggctagtctggaacccctgacctcaagtgatctgcccgcctcggcctccaaagtgttgggattacaggcatgagcccccacaccggccttttttttttttttttgaaatggagtcttgctccctcgcccaggctggagtgcagcagcacgatcttggctcattgcaacctctgcctcccggattcaagcgattctcctgcctcagcctcctgagtacaagtgcgcatcatcatgcccagctaatttttgtatttttggtagagacggggtttcaccatgtt

SEQ ID NO: 38846 - DNA, 2300 bp, Homo sapien
aaactcctgaactcaagtgatccgcctgcctcgacctcccaaagtgctgccaaaatattagcattttggccaggcacagtggttcacatctgtaatcccagcactctgtgaggctgaggcaggcagatcacctgaggtcaggagttcgagacaagcctggtcaacatggtgaaaccccgtctctaccaaaaatacaaaaattagctgggcatgatgatgcgcacttgtactcaggaggctgaggcaggagaatcgcttgaatccgggaggcagaggttgcaatgagccaagatcgtgctgctgcactccagcctgggcgagggagcaagactccatttcaaaaaaaaaaaaaaaaggccggtgtgggggctcatgcctgtaatcccaacactttggaggccgaggcgggcagatcacttgaggtcaggggttccagactagcctggccaacacagtgaaaccctgtctctgctataaaaaaattagctgggcgtggtagcgcatgcctgtaatctcagctactcaggaggctgaggcaggagaatcacttgaacacaggaggcagaggttgcagtgagccaagattgcgccactgtactccagcctgggtgacacagtgagactccatctcagaaaaaaaaaaaagtgtttcaacatataatcaatatttttaaattattaataaaataaagttttttcataataatctttgcaatccagggttcattttacacgatagcacatctcagtttggatgctcaattttcattcacaatactcgatctgtatttagagttcatagatttacataagtaaatcgtttcaaagtcctgtgaccaacttgtcttcctggagagtgtcctggtttcgaaaatgaaagtcttacatcttgaaattctccttggtcccaggaaaatcagggcagttggtcaacctcttccaaacatacttggagatttttctttcttttttttttttgtttctttgagacatagtctcactcactctgtcgcccaggctggagtgcagtgtcgccatcttggcttactgcaactgccatctcccaggttgaggtgattctcctgcctcagcctccctagtagctgggattacaggcacatgcgaccgttcccagctaatttttttgtaattttagtagagacgggatctcaccatgttgaccaggttagtcttgaactcttgacctcaagtgatctgcccaactcaagcctctcaacatgctgggatgataggcgtgagccactgcacccagctgggttttgttttttggtttgtactgtgtttgttttgtttcttcgagatgaactctcactctattgcctaggctggagtcagtggtgcaatctcagctcactgcaacctccgcctcccaggttcaagcgattctcctgcctcagcctcctgagtagctgagattacagtcactcaccagcatgccctgctaacttttgtatttttagtagaggcagggtttcaccacgttgaccaggctggtctcaaatttctgacatcaggcgatccacctgcctcagcctcccgaaggcttctgtccttcaaccgcgcgccctcactcccttgctacgaactcccattcatccttcaaaacccagcctgagtgtccccctccccccaggtcaccccctttgacctgtcaatcccctccctccgggtccccagcaagctttttggtttggcttctctgcactctcatgaccgattgccctacatcttggcgctcccagactcgggccttctccagcaccggagtcgtctggtttgctcgctttacactccaagcgcctagtaccgagcctgagtgggtgccagagggcgcgcctaggctcaggctggctccacccgccccgtgcctcccctcggccttccccgtggtcctgagggtgcccgctctcctgcatttcccgtgcatcgggctgccggtagctccggccgcccggcggcggcagcagcagcagcagcaccgggagagccccgcaggcggactacaagtcctggcaggccgcgcgcggaccgcgcatgcgcagtggggaccggcgtttgagtggcaagttgtttgttacagcgaacaccagctgctccccgcgccggcacccgcgcgccgctgctccgccggcgctgcctccctcgacccgtggctccccctcgcaacttggcgggcctcctcccttttgtccggcccggtccggccgccgccgccccccgcgcctggcgccgagctcccgggtccccgggccggctgtcggtgccggcagggcgcggag

SEQ ID NO: 38847 - DNA, 2300 bp, Homo sapien
gtgcactcccacacccagctcattgtttctgtatttttacagaaaaacagacaggtttcaccatgttggccaggctgatctcaacctcctcacctctggttatctgtcggcatcggcttccaaaagtgctgggattacaagtgtgagccaccgcgcctggtttgcccattttttgacaatgtatcaacatcatctaagatgggcactgcctcagtgtagtgtgtctagacaaggtggccggaacagagaggaatatgcataccaggcttaaagacgggttaaatcagagcttttcattccacaaaagagcaattttaatgaggtcagaacatggatgttctaatatttgaaagcctgttaactaggagagagagagagtaaagtgatttgttgtaggaggacacacccagctctgacggtttaaagcgtcatgaatgcaaatttgaactccagaaaagcagagcttcctaacaatgggacttccacagcaatgggatttccttccacattcagtttgtgcctttcccatgagcgagagactcctaggagagccgcagcccgttaggaagccatgtgggaactcatccacaggttctttttgtttgttttttttttttttttgagatgtagttttgctcttgttgcccaggctggagtgcaatggtgcgaccttggctcactgcaacctccgcctcccaagtttaagccattctgctgcccccgcctcctgagtggctgggattacaggcacccaccaccatgcctgactaattttttgtatttttagaagagatggggtttcaccatgttggccaggctgctcttaaactcctgacctcaagcgatccacctgctatggcctcccaaagcgctgggattacaggcgtgagccactgtgcctggccggaacccacaggttctttggatggtctctgaatgtcatgaaactcttttatatttaattaaaaaaatttttttgacacaaggtcttgctgtgttgcccagactggagtgcggtgtcacgatcacagctcactgcagcccctaactcctaggctcaagcaatcctcctgccacctcagtctctcaagttgttggaacacaggtgccagccacgacacctggctaattttgttctgttttgttttgttttgtttgagatggggtcttgctatgttgcctacactggtcttgaactgctggcctcaggcagtcttcctcccttggccacccaaagagatgggattgcaagcatgagccactgtgcacagctgagatttttcgacttagtctttttgtacacccagtatcttatagaatatccataatatagattcataaataaaccatttccttcaatagtataaataaataaaccactgctataaatggtggaatttctgagttaagagcaatacatatgatacaaaacttgatatatagagtttcttagccaaactggaggggctggctttaggtgatccgtggactccctgaaactggggacaccattggaaatatgtgtgagctcatgggcagtttccgatgatttccagtcctcaaaatatctcttggactcaaagatgccttagggcagaggacacgttacacccagtacagaatctcggacagtgaatatcagtaaacattcggcagaaaagctctgccaaattgagtgctctgatgtgactttttcatcaagtcaatgttcctgggatctcttgtacatgatactctcactcttataaggtttcatcgtttctgcttaccctagttttctttcccatcctgatccctctcccaccagactggactctgaaacgggcatgtacagagaagaggagaccccaacacgcttcaagctttgagtggagaggacacagcctctgctgggacagggaacagagggatgcggagaccctgaagatgcttttggacagtggtctgaggttgggacagtggcaggagataccattcacccaggatctccaggacaagagatcagcctggcagttacatgtgtttttgttcaaactggttgccaggttggaatgacctatgacatcagagattccgaccttcctgattggaaggaccggactctgtcggcgcctggcagttcaggtgaacaacagtaacttctcagagctgttctccactcctgacttctcccagcctcgagaattgataacacactcttctggatcccagcagtgtccagaagaagaccaaggacagaacagagactagcttcggtgagattggacagattttgggaaagatcatgacgagccatcaac

SEQ ID NO: 38848 - DNA, 2300 bp, Homo sapien
ctagagtgcaatggcatgatctcggctcactgcaacctccacctcccaagttcaagtgattctcctgtctcagcctcccaagttgctgggattataggcacccaccattacactcagctaatttttgtgtttttaatagagatggggtttcaccatgttggccaggctggtttctaactcctgacctcaggtgatctgcccgccttggccttccaaagcactaggattacaggtgtgagccaccgcaactggccgtcccctatattgcagcacagtgaacaactgtttcctgaacatcacaagctcttttaaacactacagtgtataagcaggtctctgtctaaactgctctcctcttgctcctctgcccaaccaatgtctgctcatccaaagaatgtatcccgtgtgttcactaacttagcaagttccagtaaacagtttaattgatcactcgttaagagaaggcaggaaacctccatgaaaagagaaatcagtgggtatttcctacagcatttaacacattgtaggccttaaataaacccttgtgaaataaacaaacctctttactcttcattctatgttgctaagaatctcaccaaagtctgtctaccatgtgaaactgcagatgacctcacagaaaatggaaagaagtatctctaaaaataagtttatttggcaacacactacaggctacaggtccagttctgattttttttcttttttttttttgagatggagtcttgctgtgtcacccaggctagactgcagtggtgcaatctcagctcactgcaacctctgtctcctgggttccagcgattctcctgcctcagcctcccaagtagctaggattacaggcgcctgccaccacgcccagctaatttttgtatttttagtagaaatgggatttcaccatgttggccaggctggtcgtgaactcctgacctcatgatccacttgccttggcctcccaaagtgatgggattataggtgtgagccaccgcacctggtccacttcagatatttagatacagacggcaaatttatttaaatgtctcaatacatttaaatgtagttacctaaatatatctaatatatttaaatgcagagagcaaatttgcgtttacaaatctgacatggaattcaactgtgctagccaagattcggtgtagcttactagccagaaatcacataccctaacaggtaaaaatgcattgcattttttaaaactgcgcagctatgcaaattaggatgtgtctggacgctctactgtccccaaaataacctcaatttttttttaaaggccaggcacagtgcattacgcctgtaattccagcgctttggggggccaaggcgggcggactgcttgagctccggagttccagaccagcttgggcaacatagctaaatccccgtctctacaaaaaaataaagtaaaaattaaaaataaaataatataaaaataaaaataaaaggggagagagaacaggtaggaaggaaatgcattcagtctatagggatttcacgttccggcttcaagtccacggccctgtgatgggatgtgggcagggcctgagacaggccgaacccaactcttcacagggccgaattctttgcccgcagcccagcaccccgaaggagcttgcctcggcttcaaggcgcacctaatgggcaccggatcgctggggcgctgaggatgccgctccggggcctccacgaggcggcctcgccacgcgcctcggccatgttccccccatttccagggaggttggacgccgtggttcttaaagagggcgcgcgagaggggcgaccgcgagcccagctcacctcgagctctcagctcgctccaaggatgcaacaccggatccgcctcggggactgggaaagttccctccacggctcccacaggcgccccgcctcctgggctcccaacggctgctttcgacgttgtgctccaccctttccgggcggggcggaaaaaatacttcccgtctctccttttcgcctagtggctctgtcaaaggtcgagtccgtgacgtcaaagagcctggaccaatcagagcacaccggactgcgttttttccgaacgccagcagcagggtcagaagggaggtagtcgccctccgtcgtggcctggcgtggattccgagcgttggtgtctggcggtttccgaccgttggtgtctggcacgcgccaccccgatgtaccaggtaaagccctatcacggggtcggcgcccctctccgtgtggagcccacctgcatgtactggctccccaacatgcacggcaggagcggcggccca

SEQ ID NO: 38849 - DNA, 2300 bp, Homo sapien
gtcgcccaggctggcgtgcagtggcgtgatctcggctcactgccagctctgcccccggggttcgtgccattctcctgtctcagcctcccgaatagctgggctgcttccctgacaagattcaaaaacaaaactggctgactcaccggcattgttttcagtggtcgttttgttgctttcttcttcacaccgcgattgaagctgtcctcaaatcattttcttgtcttcttgtctatttgtatgaattactgagttacattctcattgctacttatttaagcaaagtattcttagtttgttaacaacaaagaactacaaattgtgttcattttctgtcctttcctgttcttagactaaattacctgaaatacatcaaaatatatgctgtatgcttacctatatcaaaactatgttgtttaggtgccgggcacggtggctcacacctgtaatcccagcactttgggagttcaaggcgggcggatcgcctgaggtcaggagttcaagaccagcctggtcaacatggcaaaaccccgtctctactaaaaatacaaaaattagccaggtgcagtggacagcgcctgtaatctcagctactcatgaggctgaggcctgagaattccttgaacccaggaggccaaggtggcagtgagccgagatcatgccactgcactccagcctgggtgacagagtgaaactccgtctgaaaaaaacaaacaaacaaaaacaaacaaaaaaccagaccatattgtttagggatacttagctgacaaaataatagagacaagcaggacataattaccataaaaatcgggccctgggatgttggtggggaaggtttaagtggaaagaatggagcggtcacaatgtgtgtcaacctgggaggtggtgaccctggggttcgctttgtaattcctcaaaatgagcatttatgtgctactcacttttcagaggatagaattctgaactaaaatgtttaagcagccatacgcaaaaaaaaagaaaaaatatggatagatttttattttaattaaaacatttaaaaaatagagacaaggcagctgggcgtggtggctcacgcctgtaatcccagcaatttgggaggccgaggcaggcgaatcacgaggtcaggagatcgagaccatcctggctaacacggtgaaaccatgtctctactaaaaatacaaaaaaaagttagccaggcatggtggcgggcgcctgtagtcccatctactggggaggctgaggcaggagaatggcgtgaacccgggaggtggagcttgcagtgagccgagatcaggccactgcattccagcctgggcgacagagcaagactccaactcaaaaaaaaaaaaaaacatagagacaagggtcttgctatgttgctcagggtggtctcaaactctccgggctcaagcaatcctcccgcttcggtctcccaaagcgctgagattccaggcgtgaaccaccgcgctcgaccaggaaagatatatatatatataatatatattttataatatatcatgttatatattacacataatatacaatatgtataatacgcataataaaggtatatttaacatatataaaaatatatatatatataataattttttttttgagacggagtttcactcttgctgcccaggctcgagtgcaatggctcgatctcagctcactgcaagctccgcctccagggttcaaaccattctcctgcctcagcctcccgagtagctgggattacaggcgcccgacacatgcccggctaatttttgcatttttagtagagacgaggtttcaccatgttggccagactggtctcgaactcttgatctcaggtgatccgcccgcctcggcctcccaaagtgccgggattacaggcgtgagccacggcgcccggcctgaataaatcttttaaaacataaaaatctgggtgaccccctggccggccggcacagatgccggggtggggccgcgaatcggttgggacgcactctatccggcctaggggcacctgggccagcaacgggccgccgcgcgtgcgcagtgggcgggggggccccgcgctcctacctgcaagtggccagtgccgagtgctgggccgccgctcctgccgtgcatgttggggagccagtacatgcaggtgggctccacacggagaggggcgccgaccccgtgatagggctttacctggtacatcggggtggcgcgtgccagacaccaacggtcggaaaccgccagacaccaacgctcggaatccacgccaggccacgacggagggcgactacctcccttctgaccct

SEQ ID NO: 38850 - DNA, 2300 bp, Homo sapien
acacacttcaggttttgtgctcccagacaatgcctgtcctcatgagagcactgttgtctgcgccgggaaatcatcctctgacctgttcacaagtcttctagatgaagattttcagcaggtttggatctatttaaaaagtggtaactgcaaagaggcacctaatccacttggatttgcctgtttttgagaggtactcctggcagttatgaaggtcattaaaattaagtatcagaataaattgaactttttttttttttttttgaaacagagtctcgtccagttgccaggctggagtgcagtggtgcaatctcggttcactgcaacctccgtctcccgggttcaagcgattctcctgtctgagcctcctgagtagctgggactacaggcgcatgccaccaattttgttgtatttttagtagagacagggtttcaccatgttggccaggatggtctcaatctcttgacctcctgatctgcccaccctggcctcccaaagtgctgggattacaggcctgagccaccgcacccagcactaaactgaactttcaactgaacttcagaaaatgttgaaccatgatttaaaaaaatgtttctcactttgttctcactaaacccttttttgaaagtaaagggtggccgggcgcggtggctcacgcctataatctcagcactttgggaggccgaggcgggcggatcatgaggtcaggaaatcgagaccatcctgactaacacagtgaaacctcgtctctactaaaaatacaaaaggtagctgggcatggtggcgggcgcccgtagtcccagctactcgggaggctaaggcaggagaatggcgtgaacccaggaggtggagcttgcagtgagctgagatcgtgccactgcaattccagcctgggtgacagaccgagactccgtctcaaaaaaaaaaaaaaaaaaaaaaaaaaaaaagagcaaaaaggtattttgcagtgctaaccaatgaaatattttaaaacacttatttcaactcatgtgttacatttttaatgtgtataatatagaagaattagtatatgtttatataacttacaatttttaaaaaaaccttgatataaatgtcctaacattgggagtcttatgactctaaggcccagttccagttgctttggctacgtaacaaacccctccagactgagtgctgtcaaccaccatcttattatgctcatggactccacagtcaggaatttgcaaagtgcacagaaaagatgggctgtctctgctccctgatgtctggacctcagctgggaaaactgaaaaacaggggaggttggaatcatctgactcccgtcttgactgagtctggcagccaacatggatgttggctgggacctcggtgaggactgctggcaagaacacctacacacggccttttcctttgactgctggccttgctcacagaatggtgaccgggttcccagtgtgaacccaggtacaggaagagacaggaaacggaaactgccagtttccttaaaatctgggcccactaactagcatggcatcatttccaccatcttctattagtcaagcatcacgaagcccatattcaagaggagacaacctagacccagcctctcaataaacagtgtcaaaggctttagagagcatggtgtcaagctcccagattctaaggctgtgactcaacccagtgcactgggctgcctggctgtacacaggtgtccatattgatgcaaagcccccaagctgctcttatcctcttgtgaagcacccttagcttggttggtatttaaataactcaggaatcgttcccctcctggattcttaaagacctccgcatcttctcctcagttctcccactctgttccctcatcccacaaaacaggctcctttccccagaactattctacctgaatacaggctaaagatcgccgaatgagttagccttcccccacaccccagctcggactcccccagggctacctttccaaaaggagactcacaactcaatttcttctagctttcatctgggaggggcaggtgggggaggggagggagaatggaaggggcgaggcggtcttggctgagtgacctgatcgcaggaagtcacggctccttctgcacagatcactagctggatggctgtgtctggcctaggagaccacagtgagaacctgtcactaaagcaggtgcccatgatgggaagaactagaaattatatctaaagagaaaggctgaagcattccttaaaccacaaaagaaaacagtgaaagtacaaaatgacaacatctgtcttcaaatactgcttg

SEQ ID NO: 38851 - DNA, 2300 bp, Homo sapien
agcagtaaaagcaggtctgaggcaggtgtggagattagtacaggtggcctgggcgaagggcaaagggtgaagagaatgttgggagccatgggtgactggctgcgggcataggcaccatgaaggctactatgggctgcagggtgtggatgaggggacagagtttgccccagagaccaagttggtttgtgtcaaacaccacaggatttttattttgtatttttttttaatttttaatttttaaatttttttttgagatagggtctcacttttacccatgctggagtgtagtggcgtgatcttgggtcactgcagcctccacctcccaggctcaagtgatccttccgcctcaacctcccgagtaactgggactacaggcgaaagccaccacacccggctaatgtttattttttgtaaaggcagggtctcactatgttgcccaggctggtctcaaactcctgggctcaagtgatccacccacctcagcctccggaagtactgggattatagtcatgagccaccacatccagccagcaccacaggattaagcagacatgatgagtctttgacacaggggcaaaccaggacccagagaggtgacttgggacagggctgtctcttcagtccttaccacaccgtggacgagatcaaccttaagacagcaccctgggctctcactggaccctggattctggctcacagcacacaaagcaaactgatccctggaaagggtcacttgttgctgcctagcagcattctggtaggttggcatcctcaaagtgacataagcagtgaagcaattcagagcaacatttatttatcaagacagggtctcactctgtcacccagactggagtgcagtggtgtaatcacagttcactgcaacttctgcctcctgggcttaagcgatccttcaacctcagcctcccaaatagttgaaactacaggtgcccaccaccactcctggctaattctttctttcttgcttgcttgcttgcttgcttgcttgcttgcttgcttgcttgcttgctttctttctttctttctttctttctttctttctttctttctctttctttttctttctttctttcttcttctttctttctctctctttttctctgtctctctctctctccctccctccctctctctctctttttctttctttctttcttttttttttttttttgtagcgatagggtctcaccatgttgcccaggctggtcttgaactcctggactcatcctaaagtgctggcctctcattccctgtctgtgcacacctcacggcaagggccagcctgtttcctcccggtcacctccaaatcttgctgcttttaattcaactcagaggtatgcacttgaggtaggagggcaggggaagtggggatggcaggacatggatggcccttgaggcattggctctgggtgtcatgggctgtgagagtcaagaagggcagtggcctgcctgacttgggttcgaaagggtcactctggccactgcggtgagaactgaaactagccaggccaattctccattgttcctgctcttccaggtaggagaatattagattaggtctggagtcagaaggtagcaggggctgggggttgcagggggatgttgagaagaagtggtcctttggtcagggtgggaagccaacaggatttcctggtgcattggaggtgaaagggaagaggcgctggtggttgtgctttgggcctgagcagccagaagccgttgccatcacctatgacaagggagacagcgcctggggcagagcccagtatggggtgcattcagggtagatcaggaggtatgagtgggcagtgggcgagccaggctgggggttgtgggggaggcctgggttgcaggtttaagcgtgggacccacgtcagattggtggtgggtcatgcatgctggggtggctctcaggtcctccctgctggcttcccactcccaggggctttctcctcccagattccttagctgggtgaggggcaggacagagccctttcctagggaagcccggcaccccctgctgtccagggaaggggagtccttctagcccctgacagcttctctgcccctcccctggcctccccaggcctagccagggttgagttctcacccacctgtgccgccctgccttgttacctggaagcacagccttggggactgagcaggccctcactgtcactttaagaagggaatcagccactttgtgctcaccacctctggggaaggtgtgagaggagagaaggaagtggctgtttggctgctgacaacatgaagacttcctg

SEQ ID NO: 38852 - DNA, 2300 bp, Homo sapien
ggcagtgggcgagccaggctgggggttgtgggggaggcctgggttgcaggtttaagcgtgggacccacgtcagattggtggtgggtcatgcatgctggggtggctctcaggtcctccctgctggcttcccactcccaggggctttctcctcccagattccttagctgggtgaggggcaggacagagccctttcctagggaagcccggcaccccctgctgtccagggaaggggagtccttctagcccctgacagcttctctgcccctcccctggcctccccaggcctagccagggttgagttctcacccacctgtgccgccctgccttgttacctggaagcacagccttggggactgagcaggccctcactgtcactttaagaagggaatcagccactttgtgctcaccacctctggggaaggtgtgagaggagagaaggaagtggctgtttggctgctgacaacatgaagacttcctgcgatgagaacagaggcacaggtgccggccctgcagcccccagaacccggactggagggggccatggggcgccggaccctggccctgccctgggtgctgctgaccctgcgtgtcactgcaggtgagtgccggcaccagagaggggcaggggctgcagggagggtgatgtaggacgacagcccacccaccttgctgctgttccacagggaccccggaggtgtgagtacaagttcggatggaggccaccgagctctcgtccttcaccatccgttgtgggttcctggagtctggctccatctccctggtgactgtgagcagggggggccccgatggtgctggggggaccacgctggctgtgttgcacccggaacttggcatccagcaatgggcccctgctcgccaggcccgctgggaaacccagagcagcatctctctcatcctggaaggctctggggccagcagcccctgcgccaacaccaccttctgctgcaagtttgcgtccttccctgagggctcctgggaggcctgtgggagcctcccgcccagctcagacccaggtggggccggggtgaggggtccaggagggcagggaggggctcgggaactggccatccatctgattcttgcctctgtgcccagggctctctgtcccgccgactcctgcccccattctgcgggcagacctggccgggatcttgggggtctcaggagtccttctctttgactgtggctacctccttcatctgctgtgccgacagaagcaccggtgagacctgggccctgtccacgtccccctgacactgggctggccacatgccgtgcagagctctgaccatccttgctctctcccagccctgcccctaggctccagccatcccacaccagctcctaggcactgagagcacgagcatgggtgaggaggggggctgctttggggatgaggtggcaggggtagggggggccagggctgggcccaagctgtacagactcacttgatcctccttcccccgcgcaggcacccagccaggcctcccaggctgctctccacgtcccttatgccactatcaacaccagctgctgcccagctactttggacacagctcacccccgacagggggccgtcctggtgggcatcactccccacccacaccgcacactggccccagggccctgctgcctgggcctccacatccatccctgcacatggcagctttgtctctgttgagaatggactctacgcttaggctgggcagaggcctccctgcactggtcctggcctcactcttttccctgacccttggggcccagggccatggagggacccttaggagttcaatgagagagaccatgaggccactgggctttccccttcccaggcctcctgggtgccacccccttacgttattcttgggcctctaataagtgtcccacaggtgcctggccaggcccacctgctgcagatgtggtctgtgtgtgtgcatgtgtgggtgtgtgtgggcacaggtgtgagtgtgtgagcaacagtaccccattccagtcgtttcctgctgtgactaagtcagcaacacagttcctctgacatgggccttggctgtgcttctttgggggtgaagagattggggaggaagtctccacccctgggaggcagaagccaggtgagaaccagagtgggttggggcctccttgcagggctgggtttggcccagggagagggcagtgtcccagtcttagagatctgtcctggcttcttggggtggcggggggttgggggagcttcctgagggacacctgtggcttcctagacagaattgggggatcccagc

SEQ ID NO: 38853 - DNA, 2300 bp, Homo sapien
ctataatcccagcactttgggaggctgaggtgggcagatcacttgaggccaggagtttgagaccagcctggccaacatggtgaaaccctgtctctactaaaaatataaaaattagctgggtgtggtggcacacacctgtaattcccagctacttggaaggctgaggcaggagaattacttgaacccaggaagcagaggttaccgtgagccaagatcacaccattgcactccagcctgggcaacacagcgagaatccatctcaaaaaaaaaaaacaaaaagtcctcaggcagggtgggccaccctcttgaggccttgcccaaacagccagggggtcccttgtcctcttttcggcccacctttgcaggtgggaccagttcagtccaaagccccggtgcctcagtttccctgtgggttgaacaaggagaatgaggtgtatagggcctggctcagacggaggggtttcctgagcatggggagcctgtttcctcagacctgtgaagggaaggagggtggatcggcctgactggccctgggaagcacagaggagcctactgggaccagggaagagactgacaagagaagggaggcctgtccctgcctgcttctgtctcaagaagattgttatcacttcctctggtgaaatcctgccttcctgtccccacggcccctcagctgatgccaccttactctggagaggatgggcagagcctcctatggagggagccctgtgggtcaccaaagctccagtgaccacccccgggcaaagacctgcagatcccctgttagagacgggcccaggactttgtgcggggtgcccactgttgctctgagccttcacttcctcagggaggcttcctcaggatctcgaacctgcggaaggaggaccagtctgtgtacttctgccaagtccagctggacatacagatcagggaggctgtcgtggcagtccatcaaggggacccacctcaccatcacccagggtgagtccagctgccctggcaccaaggaaccttcctggttcagccataggctcaggtgtgtggagggaatgacctgaggggctgtatgagggaacaacctcctggggctcccctatgcctgagttcctgcaactcagaagttgaggcccagagatccaggtagagggggctccagtcctgggactgccctgcaagtcatgtggcctgggacagggcttctccaagctctgtcccctcctgtgtagggcagggaggtcagaggggaccctgcagatccagtctcatgtctgggggtcaaggggtggcctcgagagggaccagtctctgtgtaggggaccgtcagccccctcaccccttgagcaagactgtggtccctgcaccaagggagcaggcctggggtgggaagaggccagctgggctgtggtggtgcctggggactgcatgggagcccctgccagggagggagagggacagaggacaagctgggggctctggtgcttgggctgggggctgagcgcctgtgacctccactggcttcctccttctcctctctgaggactgaatctggggtgcagcagagcacagactcaggcccgcctttcctctccctgaaagagcctgcgctggccttggacagagaaagggatgagaagtgaggctgagtgcggtggggtctgcagggatccaggtgggaggggcccagccagccaaggtgaggcccagcccctcagcaggaagatgggcactggggcccttgggcagggctgacttgacacttttgtgtgacttgagccactgtgcccagcctgaacaccctttcctggtaaaacactccacaaaccaggaagagaaggaatgtactgcaacaaaataaaggccagtcatgcaaggcccatggctgaaagtctttcagtcattttagatgaaagactgaaatctttgcctccaagatcaggaacaagagaaggatgcccgctctcactacttctattcaacacaggatttgaagtcaggccgggcacagtggctcacgcctgtaatcccagcacttttggaggctgaggcgggcagattacttgagcctatgagtgtgagaccaccctggccaacatggcaaaaccccatctctactaaaaaaaaaaaaaaaaaaaggatttgaagtcctggccggagcaattaggcaagggataaaaaggcacctaaggcccttttgcaataagaagccagatggataaaggaagtgctggtcaccctggaggtgtactggtttggggaaggtccccggcccccacagccctctggggagcctcaccctggct

SEQ ID NO: 38854 - DNA, 2300 bp, Homo sapien
tgtaaaggccttttggctattctaggtcctttgaattactgtgagaatattacagttggcttgtgaactccacaaagcctatgggatgtcgattgggatcagaggaaagcaggaacggtgggtgccaaggagaggtgaggggctgggggcagggacggatgtggccagtgaggacagtaggatacttgttgggggaatgtggggacatccaagcagtggttctcataatgcggtgcagggtacttaccccctccctgcccctgctccccacacacgacttcccacgcctctcccatgagcacctgcactaaggggctgcatttaggctctgcccacattggaatcatgccctcctccaggccctcctcctcctctcagaagccctgtctgtgagagagccacagccccaggctcagtcccaggttctgtcactgctgttgggggagggaggatgaacaaatccaggagacctcacaccatcccagagcagaaatcctgacacagaaggaatctcccatgggggttcagctggatccagggcctgaaagtgacataaacatgcatgttgcatctaaggagactgcacgtggcagcattgggcagcatgtgccctccagagctacccagaggctgttggctataagttctatgtggcccccacattggacagcctggtaagcaggtgacctttcagccaggtcctcaggtggggcgggccaccctctcgaggccctgcccagacagccagggggtcccttgtcctctctgcagcccatctttccagctgtgaccagttcagcccaaagcccccgtccctcagtttccctgtgggttgaatggagataatgtgtcacctcagaatgttgtgaagcagagaatgaggtgtttagggcctggctcagacggaggggtttcctgagcatggggaacctgtttcctcaggcctgtaaagggagggagggcgggccggcctggctggccctgggaagcacagaggagcctactaggaccagggaagagactaagagaagggaggcccgtccctgcctgcttctgtctcaagaaggctgatgtcacttcctctgatgaaatcctgtcttcccccacggcccctcaactgatgccacctcaccctggagagggtgggcagagcctcctacggagggagccctgtgcaccaccaaagctccctgctccagtgaccacccccgggcaaaggccggcagatccccgttagagatgggcccaggactgtgtgtggggtgggtgttgctctgagccttcactttcttctgtgtccaaggaagcttctggatcagccaagggctcaggtgtgtggagggaatgacctgaggggctgtatgaagggacagcctcctgtcctgcactcagaagttgaggcccagagattccacccttcagccaggcccagacatctgggttgagggggctccagtcctgtacccactactgcaagtcacgtggcctggggcagggcttctcagagccctgtcccctcctgtgtagggcgggacgtcagaggggagcctgcagacccagtctcatgtcttgggggtcaaggggtggcttccagaaggaccagtctctgtgtaggggaccattagccccctcaccccttgagcaaggtcgtggtgcctgcaccgagagagggcctggggcaggaagaggccagctgggtcgtggtggtgcctggggactgcatgggagcccctgccagggagggagagggacagaggacaagctgggggctcttctgcttgggctgggggctgagcacctgtgacctccaccggcttccttctcctcctctctgaggactgaatctggggcgcagaaggacagagattcaggcctgcctttcctctccctgaaagagcctgcgctggccctgggcagagagaaggatgagaagtgaggctgagtgaggtggggtctgcagggatccaggtgggaggggcccagccagccaaggtcaggcccagccccccaaggtcaggcccagcccctcggcaggaggacggggaccgcggcctttgggcagggctgacttggcactgaccacaagggaggcccttttgcaataggggaaaataagccagatggataaaggaagtgctggtcaccctggaggtgcactggtttggggaaggctcctggcccccacagccctcttcggagcctgagcccggctctcctcactcacctcaacccccaggcggcccctccacagggcccctctcctgcctggacggctctgctggtctccccgtcccctggag

SEQ ID NO: 38855 - DNA, 2300 bp, Homo sapien
gaagtagacagagacattatacacttttctctttcctttgactcctttattcccaggagatctgggatatagttcatggcctccttaggtatgctgactgcatgccttccgtcttataaacttactgcctcatctgaaggaggcttccctgactgttcagaggggaaaactatggaaagataagtggttttcctcccctacccttgtctctgcaggaaaaatcaagtcttaccaatgcagaatttgaggagattgtccagattgttctgcagaagtcccttcaggagtgcttgggtatggcatgtagtaagagaaaaagggtttcagttaagcagtgactgttacctgagagggagagttaagtctgacagcttctctctttctctcccatcttctaaataaggtaatattagatgagacttcaacatattttaaaaatacttcatcatctgtcaacaggactatagctaaaccaccttagataaagggtacatatttttagaaaaagtggattacattgacttcagaatttatatatagtcttaactaaattttcaagccattatgggatttttgttgttatttatttacttatttattatttttttttttttgagatggaatcttgttctgtcacccaggctggagggcagtgatatgatctcagctcacttcagcatctgcctcccaggttcaagtgattcccctgcctcagcctcctgagtagctgggattacaggcgcccaccaccacgcctggctaatttttgtatttttagtagaggcaaggtttcaccaggctggccaggctggtctcgaactcttgacctcaagtgatctgcccacctcagcctctcagtgctgggattacatgtgtaagccactgcacccagcctgttgttttaatttttactttttgtagagatgaggtcttgctatgttgcccaggctggtcttgaactcatggctgcaaacgattctcccatttcagcctcccaaagtgttgggattgtagacgtgagctacagtgcctggccctaaatttttaaaatgcagttaaaattcgtttccatgtatttacaaacaacttcaaataagataaaattgttttccctagatttgaaaaacttagggtacatacccttgcaaatttcagtttctaataccgattttgcatgtggttagagatttagtttttggaataaagaacgcagtgagggaggccaggtgcagtggctcatgcctgtaatcccagcactttgggaggccaaggcgggtggatcacttgaggtcaggagttcaagaccagcctgcccaacatggtgaaaccccgtctctactaaaaatataaaaattagccaggcgtggtggcgtgcacctctagtcccagctactcaggaggctgaggcacgagaatcgcttgaacctgggaggcggaagttgcagtgagccgagatttcgccacctcactccagcctgggcgacagagcaagactctgtctcaaaaaaaaaccaaaaaacaaaaaccaaaaaccaaaaaaccaaaaacctctatgaaggcttttccataagttcatgaggctgaagagaacagtctgacatttcagccattcttaggtatacttctattcctaggcgtttgagcaacaaatgatataaaatacagtacatataattttttttttttttagatggagtctcactctgttgcccaggctagagtgcagtggcatgatcttggctcactgcaacttccgcctcccaggttcaagaaattctcctgcctcagcctcccgagaagctgggactacaggtgcatgccaccgtgcctggcaaattttttgtattttagtagagacagggtttcaccatgttgcccaggctggtcttgaactcctgaggtttggcattccacccacctcggcctcccaaagtgttaggattacaggcgtgagccaccatgcctggcctataatttttttatgtacacaaaattatcattacctggccatcctggaatgaggcagatcgatctggaaaggcttgcagaaagatacatatttgtagtttttcctgaaaatttaaatatttaaagttctgtgatatgacaggtaggctctttcaggctacagggagaagacactttagagaaaatgttagggagtaatagagtggctttttcgtttttttgcttctctgcttatagtattttgttttgggagggatgggatctggccttgattttgcagagacttcttgtgcccagcccgtagtatctacccaatcagacaaggagccagg

SEQ ID NO: 38856 - DNA, 2300 bp, Homo sapien
ctgtaatcccagcactttgggaggctgaggcaggcagatcacctgaggtggggagttcaagaccagcctgaccaatatggagaaactccgtctctactaaaaatacaaaattagtcggcggtggtggcgcatgcctgtaatcccagctactcgggaggctgaggcaggagaatcgcttgaacccgggaggcggaggttgcggtgcaccgagatcgcaccattgcactccagcctgggcaacaagagcaaaattccatctcaaaaaaaaaagaaacacattgatgtcgtgtggaacatctgtgagtagattgctgaagatgaactatgaatatcaaggcactaatttaatttctcattattaggtgctaaggtagaataaggaaaaagatactaaattttctgggaacctctactggttatcaaatacttctgagctatgactagagattggtagaatctagtacatttgaaaattgattggactgaggatctaagaaagggaaaataaacattataatgatgttaaaagtggggcttctctatgcacagagacctctgaggtcagagaattaccaaattatatgtgtgttctaagtgtttaggagaggcttatgaaatgaggctatccctctgaagaaaactcttaactgccaggattgttcataccctaccatcactgctctactaccacctatgcttctggtactactaccatttctgctgcctgccttaggttggacatggttctaggctggacatggttctaggcacataaaacactaaggattgctgctaatatttatttgttatttaaatttttgagtcagggtctcactctgtcacctaggctggggtgctggggcacaattttggctcactgcagcctccgcctcctgggctcaagtgatcctctcacctcagcctccagagtagctgggactacaggcgcatgccaccacactggctaatttgttttattttttgtagaaatgaggttttgccgtgttgcccaggctggtcttgaactcctgggctgaagtgatctgcctgccatggcctcccaaagtgccaggattacaggtgtgagccaccacacccagcactgattgttgccaatctttaaaacagtaactcattattccctggtgtgtaattggcaccacagaggaggtcaagaatgcagaaacctagttcagaggtctgaaacaaagagtttctgaacccaagtagacagaaagtttaaaatcttgtttaatcagagtcatagcagttaatttcttttttctaacagaggcacacaaagcgtagtttctaagctgaatgatgacaacgttgcagaataaagaaggtgagtcaagagtgagggaggttcgcttcatacatttctctcatttttctccttttggacatcctttccaccaaaggatggtacgggtccctatattctgtgcccactcaggtcaaattactgctctgctagatgctttgagtgaaataaatatgacttaaaaacagtcctgctcgaggaacatataaactcagggagagaaaaggcatttaaatacctatcataaagttgaatgtggtaaatgccaccagttatgtgcagagtattaaggaagctcaaagaaagatatacctgggaggatcattataatttttattgaggaggtggcataagagctgtgaataatttatagattttgactagtttttaaaaatttgctctaattttccataacattttatctaaagtaaaaatgagcaaattatacagtttcacatttggataactcagcttcctgcatgcttatatttatcacctttgacttagtggttcccaaacctggcagtatatcagaatcaactagccttgtaaaattacagattgctaggcctctcatgtctaactacctcatcagcatctcagggctgaggagtggagtaagcagtgagagacccaggaatctgaatttgttaaaagctctctccatatcattctgttatggctagtcaaagggtaatgtttggcaatctctgttagactgtatgtttcataaattccacttgatcacatttctttcagaatgtggaaagggaccaaagagaatctttgccccacctgcacaaaaatcttacagcctgttaccttgtagccctaactcccctaaggaggagaccccggggatcagttccccagagacagaggccaggataagcctgccaaaggccagtttaaagaagaaagaggaaaaagcaaccatgaagaatgttccaagcagggaacaggagaaaaaaag

SEQ ID NO: 38857 - DNA, 2300 bp, Homo sapien
ctttgtccctccatcccttcctccccctccttctctccctccccctccttccttgccctcctccctttctctctccctcttccctccctcctccccctctcctttctccccctcctccttccctttcctccccctctccttcctacccccctccccctcctcccttccctgcttcccctccttcttccttcctctccctccctcccttctccctccccctcctccctcccctttcctccccctcctcccttccccctttcctccctccctctcttctccttccctccctcccgtttcctccccctcctccctccctcccctttcctccctccctctcttatccttccctccctctctcttctccttccctccctctctctcttctccttccctccctcccctttcctccccctcctccctccctcctccctttcctccctccctctctctcttctccttccctccctccttccttcctcccccttccctccctccttccttcctcccccttccctccctccttccttcctcccccttccctcccttgctttcttccttcgtgtttgtgcacaagctcagcaagcccgatttaaaacttttaacaagaaagaagaggcgggtggatcaccttaagtcaggagttcgggaccagcctggccaatacggtgaaaccccgtctctactaaaaatacaaaaaaatcagccgagcacggtggcgcgtgcctgtaatcccagcattttgggaggccaaggtgggcggatcacctaaggtcaggagttcgagaccagcctggccaacatggagaaaccccgtctctactaaaaatacaaaattagccgggcacagtggcgggcgcctgtagtcccagctcctcgggaggctgaggcaggggaatcgcttgaacccaggaggtgggggttgcagtgagccgagactgcgccactgcactccagcctgggcgacagagcgagacagtctttaaaaaaaaaaaaaaaaaagccccaattccaaatccacctgcaatccaaagggaagaagttttgcagagaagttcttcccatttgtggggcgctcccatttttcctctcttccctcaccccttattctctctcagggatagcggttcaagtcggtgtccctgagccacacgtccccctctctcttccccgtcccctcccttccttcctcccaccatgagggaatctcccctccacccccactcctgccgaggccccgtgatccttattctcactcatatcgttggtgcccgccaggagactgggctattttttttttgtctgtttcttgggggcgacagattctgaggaaaaagggcgaagggctggttgtcgccctgagaaagtttctcctcaggcaacgggtgccaggactggcagcgcctagcaccttcacctacaaccagaaactagctggctaccttcaggagcaaggaggacctaaaggcgatgggcggaaccagctgccgcagcgactccgcaagcccctcacacctcaacccaggtttcccgccaccaagaaaaggcacgaggacgccctgagcactagctccacccgagggcggtgcgctcgcggggccgaggcgcatgcgcaactggaaacagcgtctgcgtttccgcagctgaggtaaatccgccatcttccacccgaacgtcccgggaaaactacaaatcccagaatcctctttggtgtcacatatttttaggcggcggccgcggcgcctgattgttcctgaagcacatctactaacttttctgtttcagactgccttttcctccctctttccgttctctaattcctcctcttcctgctggtctccttcacgccctcaccttaggattttgagactctcctggaccccactgtcacccctgccgccctgtcctcggcccagcactccgctggcagggagaccgggcggcgcatctccccgggaaaacggcgtagactcgcttcttcctcattggcagaagctgggggggcccagcgcggaccgaacccccgtccccgcccacactcgctggtatataagtcggcgtggcgccgcggtgggtgttgagaggcccgcgaactgacgggccagtgagcgggcgtcgggagtgggcggatgcgttggggttcgggtcgtgggtgttgaggcggagaggaaggcgtggtgtggcgtctccaggtgattgcgattgggggaaggtagaggagccagagaacgactcagccgtttcgggggaagaggaagttggacaacatcggctgttttagtgctttttatttttccccaatt

SEQ ID NO: 38858 - DNA, 2300 bp, Homo sapien
ctctactaaaaatacaaaattagccgggcacagtggcgggcgcctgtagtcccagctcctcgggaggctgaggcaggggaatcgcttgaacccaggaggtgggggttgcagtgagccgagactgcgccactgcactccagcctgggcgacagagcgagacagtctttaaaaaaaaaaaaaaaaaagccccaattccaaatccacctgcaatccaaagggaagaagttttgcagagaagttcttcccatttgtggggcgctcccatttttcctctcttccctcaccccttattctctctcagggatagcggttcaagtcggtgtccctgagccacacgtccccctctctcttccccgtcccctcccttccttcctcccaccatgagggaatctcccctccacccccactcctgccgaggccccgtgatccttattctcactcatatcgttggtgcccgccaggagactgggctattttttttttgtctgtttcttgggggcgacagattctgaggaaaaagggcgaagggctggttgtcgccctgagaaagtttctcctcaggcaacgggtgccaggactggcagcgcctagcaccttcacctacaaccagaaactagctggctaccttcaggagcaaggaggacctaaaggcgatgggcggaaccagctgccgcagcgactccgcaagcccctcacacctcaacccaggtttcccgccaccaagaaaaggcacgaggacgccctgagcactagctccacccgagggcggtgcgctcgcggggccgaggcgcatgcgcaactggaaacagcgtctgcgtttccgcagctgaggtaaatccgccatcttccacccgaacgtcccgggaaaactacaaatcccagaatcctctttggtgtcacatatttttaggcggcggccgcggcgcctgattgttcctgaagcacatctactaacttttctgtttcagactgccttttcctccctctttccgttctctaattcctcctcttcctgctggtctccttcacgccctcaccttaggattttgagactctcctggaccccactgtcacccctgccgccctgtcctcggcccagcactccgctggcagggagaccgggcggcgcatctccccgggaaaacggcgtagactcgcttcttcctcattggcagaagctgggggggcccagcgcggaccgaacccccgtccccgcccacactcgctggtatataagtcggcgtggcgccgcggtgggtgttgagaggcccgcgaactgacgggccagtgagcgggcgtcgggagtgggcggatgcgttggggttcgggtcgtgggtgttgaggcggagaggaaggcgtggtgtggcgtctccaggtgattgcgattgggggaaggtagaggagccagagaacgactcagccgtttcgggggaagaggaagttggacaacatcggctgttttagtgctttttatttttccccaattcagcagagaatattttcaaggggggtgagttataatgacctatcgcgttttactgagcccagttccactcccgcccttccttggctttgtagggtctcccctccgctccctcggaagcgcttctaagaaggtgggcagagggggggaggtttgctaccaacagctcatgaataattcatgagccccgcccttcgtcaggaagccccgcccctccggatcgcgctgacgcacgctgcgtttaccaaacttaaggaagcgacgtcacaggcccaacccctaagacggggggcggggcgccagtttcagcacgtgctgcctctacccgcgcaagcccaaaagggtgtgcgcaggcgctgcccactaggggggaggaaggaggcggggtggggaggttgttggatttagagccgggcggagaccgctgagactcattcctcaggaacaagggtcgggtgtcaaggagaccttttcacaccagctcccgtcccccgcctacggtgggtgggatcgcgcggcagagacaaaggagatcagtagggccggacatagctgcgcagggaagtagggtgtcagtttggggtggtgggcttttgcgggggctgtgggggggttatatttaaactcccagagccgttaagttggttcgtagtctgatgcgcgcgcaaccagggtggtggcggagtgcgcatgcgtggttcccgggcgaagggaacgcgcgctcaccgtgcgcgctcgcggccgggtggtagtggcggaggagaaaggggtcggcgcacgcgcggttgagtcctcgagtagttcgggtctcgcgggc

SEQ ID NO: 38859 - DNA, 2300 bp, Homo sapien
ggctgatagccattgcggggtcgaggaggagcagggggacccagctctgtcccgccccctccccggcgctcctcccccacgtccgggggagcggctcgccccgggggatccgacaggcgggcctccccatgcgactgcgcctgggggccgccccctcggtgctgctgcgcctggggaccactggaggaggtggccgcggccccggggctttcccgaccgaccgcagcggctggggaccccgcagatggcgcgcaacgacccggaccacgctccgtcccgccgcggagctccccagaggcggcctcttggtgcggtggcaccgtggggccgccccctccgcccgactcatctttgagcggcggcggcggggccggcaccagaaacggctccttctccgccgccatctcgatcatttcctccccttattccgtgccagtcggggtaacgagggggatcagggggcctaaccccccctgcctggaccctgctcccttcccccctttcccgagtgcgcgcgcagctctgctcttcacgcctagtctcgcgcccaagcgcctccccgccaagtgcgccctactagcccgcgagaccaaaacaagaggcccgcgagacccgaactactcgaggactcaaccgcgcgtgcgccgacccctttctcctccgccactaccacccggccgcgagcgcgcacggtgagcgcgcgttcccttcgcccgggaaccacgcatgcgcactccgccaccaccctggttgcgcgcgcatcagactacgaaccaacttaacggctctgggagtttaaatataacccccccacagcccccgcaaaagcccaccaccccaaactgacaccctacttccctgcgcagctatgtccggccctactgatctcctttgtctctgccgcgcgatcccacccaccgtaggcgggggacgggagctggtgtgaaaaggtctccttgacacccgacccttgttcctgaggaatgagtctcagcggtctccgcccggctctaaatccaacaacctccccaccccgcctccttcctcccccctagtgggcagcgcctgcgcacacccttttgggcttgcgcgggtagaggcagcacgtgctgaaactggcgccccgccccccgtcttaggggttgggcctgtgacgtcgcttccttaagtttggtaaacgcagcgtgcgtcagcgcgatccggaggggcggggcttcctgacgaagggcggggctcatgaattattcatgagctgttggtagcaaacctccccccctctgcccaccttcttagaagcgcttccgagggagcggaggggagaccctacaaagccaaggaagggcgggagtggaactgggctcagtaaaacgcgataggtcattataactcaccccccttgaaaatattctctgctgaattggggaaaaataaaaagcactaaaacagccgatgttgtccaacttcctcttcccccgaaacggctgagtcgttctctggctcctctaccttcccccaatcgcaatcacctggagacgccacaccacgccttcctctccgcctcaacacccacgacccgaaccccaacgcatccgcccactcccgacgcccgctcactggcccgtcagttcgcgggcctctcaacacccaccgcggcgccacgccgacttatataccagcgagtgtgggcggggacgggggttcggtccgcgctgggcccccccagcttctgccaatgaggaagaagcgagtctacgccgttttcccggggagatgcgccgcccggtctccctgccagcggagtgctgggccgaggacagggcggcaggggtgacagtggggtccaggagagtctcaaaatcctaaggtgagggcgtgaaggagaccagcaggaagaggaggaattagagaacggaaagagggaggaaaaggcagtctgaaacagaaaagttagtagatgtgcttcaggaacaatcaggcgccgcggccgccgcctaaaaatatgtgacaccaaagaggattctgggatttgtagttttcccgggacgttcgggtggaagatggcggatttacctcagctgcggaaacgcagacgctgtttccagttgcgcatgcgcctcggccccgcgagcgcaccgccctcgggtggagctagtgctcagggcgtcctcgtgccttttcttggtggcgggaaacctgggttgaggtgtgaggggcttgcggagtcgctgcggcagctggttccgcccatcgcctttaggtcctccttgctcctgaaggtagccagctagtttctggttgta

SEQ ID NO: 38860 - DNA, 2300 bp, Homo sapien
gaagcaagaactacatggccctcatcagtgcaagtattgagactgagcgggtcagtaatatctttggggatgaggatctccaccggatctcgccctttggccggaaggggggatgacttaggggtctccgcgttgagagtgcggctcacttcctcatccaggaggctattcaggttcaggggatcaaagatattgccccccaggaggaagttggagggtaacacagagtcacagtccgaattcacccgcctgcgcctcttgaaggccggatgtttgaagcctcccccgcctccccctacattacagctatttctcctcttgcccccgccccccccaggtggccggtggggctgatagccattgcggggtcgaggaggagcagggggacccagctctgtcccgccccctccccggcgctcctcccccacgtccgggggagcggctcgccccgggggatccgacaggcgggcctccccatgcgactgcgcctgggggccgccccctcggtgctgctgcgcctggggaccactggaggaggtggccgcggccccggggctttcccgaccgaccgcagcggctggggaccccgcagatggcgcgcaacgacccggaccacgctccgtcccgccgcggagctccccagaggcggcctcttggtgcggtggcaccgtggggccgccccctccgcccgactcatctttgagcggcggcggcggggccggcaccagaaacggctccttctccgccgccatctcgatcatttcctccccttattccgtgccagtcggggtaacgagggggatcagggggcctaaccccccctgcctggaccctgctcccttcccccctttcccgagtgcgcgcgcagctctgctcttcacgcctagtctcgcgcccaagcgcctccccgccaagtgcgccctactagcccgcgagaccaaaacaagaggcccgcgagacccgaactactcgaggactcaaccgcgcgtgcgccgacccctttctcctccgccactaccacccggccgcgagcgcgcacggtgagcgcgcgttcccttcgcccgggaaccacgcatgcgcactccgccaccaccctggttgcgcgcgcatcagactacgaaccaacttaacggctctgggagtttaaatataacccccccacagcccccgcaaaagcccaccaccccaaactgacaccctacttccctgcgcagctatgtccggccctactgatctcctttgtctctgccgcgcgatcccacccaccgtaggcgggggacgggagctggtgtgaaaaggtctccttgacacccgacccttgttcctgaggaatgagtctcagcggtctccgcccggctctaaatccaacaacctccccaccccgcctccttcctcccccctagtgggcagcgcctgcgcacacccttttgggcttgcgcgggtagaggcagcacgtgctgaaactggcgccccgccccccgtcttaggggttgggcctgtgacgtcgcttccttaagtttggtaaacgcagcgtgcgtcagcgcgatccggaggggcggggcttcctgacgaagggcggggctcatgaattattcatgagctgttggtagcaaacctccccccctctgcccaccttcttagaagcgcttccgagggagcggaggggagaccctacaaagccaaggaagggcgggagtggaactgggctcagtaaaacgcgataggtcattataactcaccccccttgaaaatattctctgctgaattggggaaaaataaaaagcactaaaacagccgatgttgtccaacttcctcttcccccgaaacggctgagtcgttctctggctcctctaccttcccccaatcgcaatcacctggagacgccacaccacgccttcctctccgcctcaacacccacgacccgaaccccaacgcatccgcccactcccgacgcccgctcactggcccgtcagttcgcgggcctctcaacacccaccgcggcgccacgccgacttatataccagcgagtgtgggcggggacgggggttcggtccgcgctgggcccccccagcttctgccaatgaggaagaagcgagtctacgccgttttcccggggagatgcgccgcccggtctccctgccagcggagtgctgggccgaggacagggcggcaggggtgacagtggggtccaggagagtctcaaaatcctaaggtgagggcgtgaaggagaccagcaggaagaggaggaattagagaacggaaagagggaggaaaaggcagtctgaaacagaaaagttagt

SEQ ID NO: 38861 - DNA, 2300 bp, Homo sapien
ggagaggaaggcgtggtgtggcgtctccaggtgattgcgattgggggaaggtagaggagccagagaacgactcagccgtttcgggggaagaggaagttggacaacatcggctgttttagtgctttttatttttccccaattcagcagagaatattttcaaggggggtgagttataatgacctatcgcgttttactgagcccagttccactcccgcccttccttggctttgtagggtctcccctccgctccctcggaagcgcttctaagaaggtgggcagagggggggaggtttgctaccaacagctcatgaataattcatgagccccgcccttcgtcaggaagccccgcccctccggatcgcgctgacgcacgctgcgtttaccaaacttaaggaagcgacgtcacaggcccaacccctaagacggggggcggggcgccagtttcagcacgtgctgcctctacccgcgcaagcccaaaagggtgtgcgcaggcgctgcccactaggggggaggaaggaggcggggtggggaggttgttggatttagagccgggcggagaccgctgagactcattcctcaggaacaagggtcgggtgtcaaggagaccttttcacaccagctcccgtcccccgcctacggtgggtgggatcgcgcggcagagacaaaggagatcagtagggccggacatagctgcgcagggaagtagggtgtcagtttggggtggtgggcttttgcgggggctgtgggggggttatatttaaactcccagagccgttaagttggttcgtagtctgatgcgcgcgcaaccagggtggtggcggagtgcgcatgcgtggttcccgggcgaagggaacgcgcgctcaccgtgcgcgctcgcggccgggtggtagtggcggaggagaaaggggtcggcgcacgcgcggttgagtcctcgagtagttcgggtctcgcgggcctcttgttttggtctcgcgggctagtagggcgcacttggcggggaggcgcttgggcgcgagactaggcgtgaagagcagagctgcgcgcgcactcgggaaaggggggaagggagcagggtccaggcagggggggttaggccccctgatccccctcgttaccccgactggcacggaataaggggaggaaatgatcgagatggcggcggagaaggagccgtttctggtgccggccccgccgccgccgctcaaagatgagtcgggcggagggggcggccccacggtgccaccgcaccaagaggccgcctctggggagctccgcggcgggacggagcgtggtccgggtcgttgcgcgccatctgcggggtccccagccgctgcggtcggtcgggaaagccccggggccgcggccacctcctccagtggtccccaggcgcagcagcaccgagggggcggcccccaggcgcagtcgcatggggaggcccgcctgtcggatcccccggggcgagccgctcccccggacgtgggggaggagcgccggggagggggcgggacagagctgggtccccctgctcctcctcgaccccgcaatggctatcagccccaccggccacctggggggggcgggggcaagaggagaaatagctgtaatgtagggggaggcgggggaggcttcaaacatccggccttcaagaggcgcaggcgggtgaattcggactgtgactctgtgttaccctccaacttcctcctggggggcaatatctttgatcccctgaacctgaatagcctcctggatgaggaagtgagccgcactctcaacgcggagacccctaagtcatccccccttccggccaaagggcgagatccggtggagatcctcatccccaaagatattactgacccgctcagtctcaatacttgcactgatgagggccatgtagttcttgcttcgccactcaagactggtcggaagcggcatagacaccggggacagcaccaccagcagcagcaggcagccggagggagtgagagtcaccccgtgccgcccacagcccctctcacccccttactccacggggagggcgcctcacagcagccgcggcacaggggccagaaccgggatgccccccaaccctatgaactcaacacagccatcaactgcagggatgaagtggtgtctccccttccatctgctctgcagggtccctcaggctccctatcagcccctccagctgcctcagttatctctgcacccccatcttcctcctcccgacatcgcaaacgtcgcaggacttccagcaagtcggaggcaggggctaggggtggaggccagggttccaaggaaaa

SEQ ID NO: 38862 - DNA, 2300 bp, Homo sapien
agaaaaggccccgaggtgggcatcgcccttggccaggggaggcggcagcgtgctgaagtggtcccttgcctctctccttaggaaacgatctacaagaactactaccgaatccaattgaagccagagcagttcagttcctacctgacatccccagacgtgggcttctccagctatgagcttgtggccacaccccacaacacctctaaaggtaaggctggtttattttgtcagggaggctggtcctggctgaaagagtgcagacccccatggggattcttgaggtgctgccaaccccttctgatcactctctctcccctcaggcttccagcgtcctgtgtacctgttccacaaggcccgatcccccagccactaagtggccccctaaacagaaagtgtgaagaggctgccctcgctgctcataaggacctgggggaagaggaaagtgtcccaaggtctttcctttctgactccaaaaatagtttcctttcttggatctgcaaagaaagcttttcttccgtcgctgcctcagcctcctccctatgcctctggcacctgcgcagcaaggctggctgtgctggagtcaccatcatcttcctctcccccagcctcccaggctggatggcatggactgtttgctgacctctgttctcttagggcatgggaggtgggaggatatcaaattctctagccctttcctcctattctcccaaggagagagattcccatttctcctcggccattgtacctagctcttgtccctagctgcatttcagtggaccatggatagagggactgagggttagacggggaagactggcagggaggcacgcaggtactgtgaaaatccttccctttgccctcccccagtgggagagggggttgggttttcaatgtgagaacagcacaataaacttgatgtctagggcagtggcccccacacctgtctcggtactgtctagctggtgggggatgggtggtgcctcccaccagaacctgtgctgtttatcttccatctcaaggaagacacgtttttcagtggttgagctgattgttgaacactagtcaagtccacacgcaagtacacagaagcctagtcaggaaaaggtgtgtaatgcaaattttggtgtggaacttggagtctgccttccctccccagaaaaaccccgtagacgttttgggcagaaggctaactttttggtttttgtttttctgagatggagatttgttctgtcgtcaggctggagtacagtggtgtgatctcggcttaccgcaatatccgcctcccaggttcaagtgattctcctgcctcaccctcccaagtagctgggattacaggcacgcgccaccatgcccagctaattttttgtatttttagtagacacgggggtttcgccatgttggccaggctggtttcaaactcctgacctcaggtgatccacccgcctcggccttctaaagtgctgggattacaggcgcgagccactgcacctggccagaaggctaacttggaaagagttgacggtggaggtaggcaaaagtgctttggatcaaatgcccagggacgggccagcaccttttttgtgctgtggaatcagacttacaggcaattaacaacatgaagctcttcgggggcttgttaggtgttactggaacttcgaacatactgagtattcaggtcaggtgtaaacaggatgggcaaggctcttaaaggtaaaaagcaaggagataatttcagtaactcagtgcagacagctggcttgcaagctccttgagacaggtaatcatggaaggttttcgtgaagtgtgataggctgggctctgcattttgagagatcagaataagtgatgcagagaacaatcgctacctgatcaaaaacaggcagtagctgtggctgaagtcagggagaggcaggtaaggttgtgaacggaggggtatctaagtaaacctctaacgtggacagtgttttccacttgccatgactctaccaagttccaaaaaggcccccaaacccgacttccaggcagcttccaacctgaggctaagtggataaccccctagagagcttttaaccccattttaggcctccaagaagagtcccatttattagcaaaattactttattctaacaaatagtttaacacaaaaatacgaactagccctccagggatctttggggtctacgcttcccatcgcctcagtgtccggtgcatgaggaaggtgtcctctgaagggcggggccggagttgaagtcggagagggggcagaccgtccagggtcaggtgtggagattcataaaata

SEQ ID NO: 38863 - DNA, 2300 bp, Homo sapien
cagtttaaaaatttatatttgtacctcgctatttcttttcacaattgaacaatgagataatagacatacttgcttgttcttaactttagcaggaaagcctctagtgttccaccattgagatcttcctttaaaatcctttttgtaaaatttgggctgtgctatccattctatctgatgttccacagcacttcctggaaagataaaatgaacaatgtggaaactcataatgaaaagtggtacacaaacgtgcctgttgactgagcatcaatcaattccaggaaagcttcaagattcctgaacctttttgaagcagtttggagaattaaaaaaaaaaaaaaaaaaagagtaagaaaggattcctgaacccacttccacttacattctacacaaaaaatgaaaggagacttgcagaattgaggggacctgccccaagtaacctaaggagcaggtgggagctctcatttccttttctgcagttcaggggtcttctgctatgtggaaaagctcagggcccaggataagtccactgacattaaaaattaaaaaaactgaattcaaggctgggtgcagtggctactgcctgtaatcatagcactttgggaggccaaggcagctgaaccacttgaggtcaggagttcgaggccaacacggtgaaaccctgtctctactaaaaatacaaaaaaaattagccgggtgtggtggtaggcgcctgtaatcccacctacttgggaggctaaggtgggagaattgcttgaacactggaggcagacgttgcagtgagctgagattgtgccacagtctccagcctgggcaccagagcgagactccgtctcaaaaaacaaaataaaacattgaacccacaatacagagttttttgtttgtttctgagacagggtcttgctctgtcgcccaggctagagcgcagtggtatgatcagagctcattgcagcctggaactcctggactcaagtgatcctcccgcctcagccttcccagtagctgggactacaggtgagcaccaccaccacgcccggctaaaattaaattcttttggtagagattgggaatggtggtgtggagtctcggtatgttgcccatgcttgtctccagctcagggtttcaagacatcttcccgccttggcctcccagagttggaattgcaggtatgcgctaccgcacccgtgccagatatctactttttatacaaattaatatttcagggaactctcgaaggtaaaagtagtcacaaaaagctgcaagagttgctgtgtcccagaagggagtccgggatggggtcggcgaccctcgcccgcactcatacaggccaactccggtccgagtttggaggcaacggaacaccggaaatgctgtgcaggtctgagtgggaggtcagggcacactggaccgttaccttaaagctgccccatttatggccaggtgcggtggctcatgcctgtaatcccagcactttgggaggccgaggtgggcggatcacgaggtcaggagttcgagaccagcctgaccaacatggtgaaaccgtctctactaaaaatacaaaaattagccgggcgtgatggcgcgcgcctgtaatcccagctactcaggaggctgaggcaggagaatctcttgaacctgggaggcggaggttgcagtgagccgaaatcgcgcccctgcactccagcctgggctacagagagaggctcagtctcaaaaaaaaaaaaaaatgctgccccatttggcgccccagaatgaggactgacacactgggcaatgggcatcgcagcgctagcaggactaagattcctctgggtaactcagccatagcagagttttcaagaggaggagtggccctgatgaggacccgtagggcttcaaccgaccccagctcaaaaacacttcggcttgggggcggtgccaaggctgtgagtgcttccaacacttcggcttgggggcggtgccaaggctgtgagtgcggaagcctgccggaaacctggggacggagcgagggaaatgacgcctgggagcgacaacagggtgggtggggctgctgactccgcccccgaaggaaagggttaacggtttccggtagcggcgtctaggaggggcgggggaaaggaggcggcagccaggctgtgtcccctgaccgttggagcgtctgcgacccccgcatccccgcaccctcaaggcacctccaaagatgatgatgggttgtggggagtcagagctgaagtcggcggacggggaagaagccgcggcggtcccggggccacccccggagccccaagtcccgcaactccgag

SEQ ID NO: 38864 - DNA, 2300 bp, Homo sapien
agcggttcgggtcctgggaaggggcaagtgaggattgggggtgggggggcgtctgcccacgtgctgggcggggggctgggaaacaataaggtctttggtggttgcccaagatccacccctggcttcccagtgtgtcccctctgcgggctggatccgggtggctgcttgggggcggggcggggggccctgaatgggccccttgtctcggggctgggtgtgggccaggctccccgggcacacggtgcccttgccaggcctggccagccgccgtggctcccacccccggccagctgaggacgggccctgtgggtgagctggcccctccctggcagcctgggctccggtcccaggcggaagagtcagcagcaatggagaaggaccccatctagtggggaagaggcgagagctgcagctgtagccccaggaggcccctagccccgggatcccctggccccagcagcctccaaggaggctgacctgtcttggagtgcctgactctctgcctccttaggtttccctaggttcataaccttgggcaacttctttggtttttctttttttttttttcatttctcctttctttttttgagacagggtattgctctgatgcccagagtgcagtggcacaatcacagctccctgcagcctccacgttcctggctcaagtgatcctcccgccttggcctccctgaactataggtgtgcgccaccacgttcagctaattttctttatttttgtagagatggggccttgctatgttgcacaggctggagtgcagtggtgtgatcatagatcactgcagtcttcaactcctgggctcaagtgatcctcccacttcagcctcctaagtagctgggactacaggcatgtggcactatgcccagctagagtcgaagtttcgctcttgtcacccagtctggaatgcagtggtgagatctcagcttactgcaacctccacctctcaggttcaagcgatttccatgcctcagcctcctgagtagctggaactacacgtgtgcaccaccacacccagctaattttttttttttttcgtatttttagtagagaaggggtttcaccactttggtcaggctggtctcaaactcctgaactcaagtaatctgcctacctcagcctcccaaagtgctgggattacaggcatgagccactgcgcctagcctaaattttttggtagagaccatctcgctatatggcccaggctgatctcaaactgctggcttcaagtaatcctcccaccttggcgtcccaaagttctgggattacaggtgtgagctaccacacctggctctcttaagttttttccttccttgcttccttccttccttccttccctccttccttttttgtctttcttttttgtttttttctttccttcttttctttcttttgttcttttccttctttcttctttctctctctctctctctttctttctctcctctctgtctctctctcttccttcctccctcctctcccttccttccttccttccttttttttttttttttttttgagacagggtctcattctgttgcccaggctggagtgcagtggcacaatcatggctcactgcagcctccacctcctgggcgcaagcaatcctcctgcctcagcctcctgagtagctgggactgcaggcacacaccaccactcccaactgatttaaactctttttttgaaaaatttaaacatagtgagttggggggagtctcactatgttgcccaggctggtcttcaactcctggcctcaagtgatcctcctgcctcagccacccaaaacactgggattacaggcatgagccaccatgcccggcccccttcagctttcctgaatttcagattcctctttgatgaagtggcactaacaataatacctatcttgaagggctgctgtgaaggactgcaggacgtgatgcaggaacagtgcttattagtttgttacgtgttagtttattttccctggatctgagcgaagaagagccagggtggaagagatggactctgtgggtctgggcagggcctcgggggttggggtcggggccaggcagcctcacaatggtctagaactctccctcactgtaggttctcacctacttcgactcctctccctgtcccagggaggggagaaaaggtctgggattcattgccaggaggggcttcccccaggatttcctacttctttctttactgctgtgcttgaagctcacaggagacccctcaagaggtggtcaccggcccacagcccaccccatcccccacccgccacccccaccgtacc

SEQ ID NO: 38865 - DNA, 2300 bp, Homo sapien
ttaagatggagtctcactctgtcaccaggctggagtgcagtggcgtgatctcgactcactgcaacctccgcctcccaggttgaagtgattctcctgcctcagcctcccgagtagctgggactacaggtgcccgccaccacacctggctaatttttgtattttaagtagagacttggtttcaccatgttggccaggatggtcttaatctcttgacctcgtgatccgcccgcctcggcctcccaaagtgctaattttttaaattttttgtagagatggggatctcgttatattgcccaggctggtcacgaactcctgggctcaagcgatcctcccacctttgagtagctggaattataggtgcacatcaccatgcccagctatttttttttattttttgtagagatggggtcttgctattatattgtccaaactggtctcaagcgatcctccttcctcgacctcccaaagtgcggagattacaggcatgagccaccaccgggatccggcaataatccacttttaaaaataaggaatggggggaataatgcagttgctgtgaaaaccaaaggagaatgacagtaacagccacagctgccccacagcagggactgggaacttctgggtgggcatgcagcacacctcccggcctgtgccttccgtctcttctgtgtgtctctaggccaatggcagcaattgactacaagtaagggaatccctcgcctccctgcaagctcctcccctttctccccgagccccgccccctgcagcccctccctgcaagagtggggctagggcccggcaggtgtggggttaagggagtctgtttggggcccccaggagcagcagcctaagcagtggctgcagcaactgcaacagcagcggctgtggcaggcctggccccgggccagctggcgggaagccccaggagggagggagggaggaggaaggggaggaagaggggaaggaggaggaggaggaggagaggagcagtcagcaggcccgaggaggcaggacttcctggtgtgggggttgtcaacagcccagaaagagaaagacggagaggcagagacccaggggagccgaggagcggagacacggacccagcagggtcacgcgggaggagactcgggacacccactcgctggctgccaccgggagcagaggggggctcggccgccccctcccacatcagtctccagacccttggggcttcagaggccgctcctaggctcctcggaggaggcgcgggtttcttcttttccggagagcaaactttcctcggagatgcctggcaggatgagccgcggcccccggagaggacgggacagcctctgatcgccgcctgcgtgccccgccactgcccatggccaggaggccccagggaacggacagcccgacctcttaggcgccgggaccctcaggctcagatcagtggccgaggccccagaggtagggttcagggctgggtggggcgctggggggtagccgggcagggcctgccccagagatgtgggagctggggtgagggtgggggctcgaggcccaggagaggtctctctgagtggccgggccaggctggggagctgcttcagcctggttctcccaggccctggagtccgagctcttgggacaatacgggccccctgagtcagaatcccaggcgagaaatgcccaactctgggactcatctgcctctttctactctgagtgccttcttggatccagtcccctctgccctggtctctgtcatctcttgcctgtctctgggtctctgacggtttccccttcccccactctgctccccggagaggaagccccggaggtggcctgcccactggtttcacacacacacacacacacacacacacacacacacacacacacacacacactctctctctctctctctctctctctctccccctctttttccagtttgcaaactcagctctggagttcagcagcaacagcagcaggaaaaacctgcccctgctcccccctcccgccacctcccctctcctcttctcccctcacccagcaggcacccccggttcccgccaggccctcctgccatgtcggacccagacgtccccaggggctcggatgtccccgccatgtggcccccttgttccaggggtgcctgagccccttcaaggagccccaacccacccccaaccttggcccagccctgagccccagggaccatgagcgggggcaagaagaagagtagtttccaaatcaccagcgtcaccacggactatgagggccctgggagcccaggggcttcggatccccctacc

SEQ ID NO: 38866 - DNA, 2300 bp, Homo sapien
tgtaatcccagcactttgggaggccgaggcgggcggatcacgaggtcaggagatcaagaccatcctggctaacacggggaaaccccgtctctagtaaaaatacaaaaaattagccgggcatggtggcgggtgcctgtagtcccagctacaggctgaggcaggagaatggcgtgaacccgggaggtggagcttgcagtgagccgagatagagccactgcactccagcctgggcgacagagcgagactccgtctcaaaaaaagaggggttagaaatttccctgaggccaggcaccatggctcacgcctgtaatgtcagctctttgggaggcccaggtggaagtatcatttgaggccaggaattcgagaccagcctgggcaacatagtaataacctgtctctacaaaaactaaaaaattagccaggtatggtggtatacacctgtggtcccagctactagggaggcagaagcaggaggatcacttgaggccgggagttcaagaccaccctgggcaacattgcaagatccccatctctaccaaaaaaaaaaatttttttttaaagaaatttagccaggcgtagtagtgtgtgtctgtggtcccagctacttgggaggctgaggcaggagcatggcttgagcccaggagttccaggctgtggtgagctatgatcgcaccactgcactccatcctgggcaacagagagagagagagaccctgtctctaaaaaaaaaggcgggggcaggttgggggaaaggggaatagtataacatctaggatctgatttcaaatagtccagcaaactacagctggcccccacacaatgtcatttcattgaatgtcatttcattataacattgatgattttctaaaaattgattttgggctgggaccaccatctgtgtggagtttgcatggtctccccatgtctgcatggcatgtttgaaaattttcataataatccactttttttttttttttgagacatggtctcactctgttgcccaggctggagtgcagtggcacaatcttggctcactgcatcctcaacctcctgggctcaagagatcctcctgcctcacagcctcctgagtagctgggactacaggtatacatcaccacactcagtttttttttttttttaagatggagtctcactctgtcaccaggctggagtgcagtggcgtgatctcgactcactgcaacctccgcctcccaggttgaagtgattctcctgcctcagcctcccgagtagctgggactacaggtgcccgccaccacacctggctaatttttgtattttaagtagagacttggtttcaccatgttggccaggatggtcttaatctcttgacctcgtgatccgcccgcctcggcctcccaaagtgctaattttttaaattttttgtagagatggggatctcgttatattgcccaggctggtcacgaactcctgggctcaagcgatcctcccacctttgagtagctggaattataggtgcacatcaccatgcccagctatttttttttattttttgtagagatggggtcttgctattatattgtccaaactggtctcaagcgatcctccttcctcgacctcccaaagtgcggagattacaggcatgagccaccaccgggatccggcaataatccacttttaaaaataaggaatggggggaataatgcagttgctgtgaaaaccaaaggagaatgacagtaacagccacagctgccccacagcagggactgggaacttctgggtgggcatgcagcacacctcccggcctgtgccttccgtctcttctgtgtgtctctaggccaatggcagcaattgactacaagtaagggaatccctcgcctccctgcaagctcctcccctttctccccgagccccgccccctgcagcccctccctgcaagagtggggctagggcccggcaggtgtggggttaagggagtctgtttggggcccccaggagcagcagcctaagcagtggctgcagcaactgcaacagcagcggctgtggcaggcctggccccgggccagctggcgggaagccccaggagggagggagggaggaggaaggggaggaagaggggaaggaggaggaggaggaggagaggagcagtcagcaggcccgaggaggcaggacttcctggtgtgggggttgtcaacagcccagaaagagaaagacggagaggcagagacccaggggagccgaggagcggagacacggacccagcagggtcacgcgggaggagactcgggacacccactcgctggctgccaccgggagcagag

SEQ ID NO: 38867 - DNA, 2300 bp, Homo sapien
gagtaaatacatacaaatttttatattttaatttgagatgaagtcttgctctgtcacccaagctgaagtgcagtggcgtgatctcagctcactgaacctccgcctcccaggttgtgattctcctgcctcagcctcccgagtagccaggattgtaggcacccgccacgacgcctggctaatttttgtagttttagtagagatgggcgtctcatcatgttggccaggctggtctcgaactcctgacctcaagtgatctgcatgcctcagactcccaaagtgctgggattacagacgtgagccactgctcccggcctatacatataaactaatcatactaaaggtataaatgtgaaatgggttttaagtgttttaatatttccctcccctgggagcattcttaatagcctataatatgtgggaccttttacaatttacaaggcactttggtattattttactacccctccccttccaaagaatggactaaagccagcttgtccaaccgcacgggcagcttgtggcccaagacaaattggtaaattttcttaaaacgcctaagttttggtttttgtttttgttttcgttttttttttttttttctctgagacaaagtctctctctctcacccaggctggagtgcagtggcccgatctgggctcacgtcaacctctgccttccaggtcaagcgattctcctgccttggcctcccgagtagctgggattacaggcgcaggccaccatgcccagcttattttttctatctttagtagacacggggttttgccacgttggccaggctggtctcaaacttctgatgtcaggtgatccaccagcctcggcctcacaaagtgctgggatttacaggcgtgagccaccgcgccccgccagtgttaagagtattttatgtgtggcccaagacaaattcttcttccaatgtggcccagggaagttaaaagagtggacatccccggactaaagcgtctctcagagaggttgcacgatctgcctaaagccacacagcaagactgcaaagacgctgccatggaaagtagcattcgcaggctccagggatcaggccgtgcctatctttgccgtgcccattttccagcccgtggaaggtacaaccgaggtcttctcgagctgatttacccccgctgcagagctgtgagcccaagggatttcagagggagttatttctaggggagataatgagaaaagaaaagataaatgagaaaaggggaggtcgaggtcacgtcccgtagcggccccccgacagtgccagggtggtagccgcggtggccacactcaggtcgaccctggtcgttgcgagcggcgccgggggagtcaaaggtcacgagaggaggactcgggccacgggggcggatagctttgagcccagacggtggaacgagatccgggcacccccgggaggctgcagggggaggcagccgattcccccgcgagccaactcaggtgctctcctggcacctgggggcggtggggaaagggggcgcggccgccggagcacgccccctgctgggctgagccgccgcccgtcccgttccccaccctcggagcccctcggcccggaaagcggcaccccctggcggccccagcgcctcactgcaccccgggccccgcagccgcagcctcggccccggaccgacgctgggtgcggacccggggcgcgccgggcgtacgggttgcacggggtgcacggggtacacggtgcgggggcgtgggccccaggctgccgctggggggcgccgccgcacgccgctccgccggggccggggagaccgaactcagcaccgaccggccgggcagggggcgaggggcggcgaggagcggacgcccaaagaccgcgacgggctggcgccgggcccccagcgccccacgaccttcctccgaatctgcccccgcaggctccgcggctcccccgccccgcgccccagccccacggccccgcgccgcacggccgctcccgttccgtccttggagggtgtggaagggtgggtttggggccgggggcgggtctgggggcggacccggaggcggggctgtctctgcggcagggcccagcttcgctccccccggtctgtctctgtctctcctcctccctcctcctgctccgggcggagcccggcatgggggggccggcgcccggcaggccaggtacggtgatggagaacctggggaggcttggtgcaggaaggttggggtggggggacaagggacagggaggattggcggagcgaaaggcggagaagcccagggtagcaggacaaggggaaggggag

SEQ ID NO: 38868 - DNA, 2300 bp, Homo sapien
gtgtgtatttggggctctgaacacctttgtcggggtctgtgtctgtctgtctgtgggtcctcgaagctgtgttgggttttctgtctgtgttttcctctctgaggacccgagtcatgtctcttctccgttttctctctttcattcatccctggcccccacccatcccacctttcttttttttccgttctcacccaccccgcccgccagtggatccgggacccagggagggccgccccccgggcctggtggcactgagcagggccccccagcccccacctcctgccccacgagatgaacctcctctaccgaaaaaccaagctggagtggaggcagcacaaggaagaggaggccaagaggaggtaaggctgcaccccagactgctcccttcccttccgcacctctgcctgccccctcactgggccacagcccttctcgggggccggcagccttgtcatgagtgagctctctgatctcagagtcagtacggaatggccaggattgcacacactgtcctggcccaactcctgctctcctgtgggggggtttacagcctaggagcacccctttggttgttccccatccccagaggcccgagtcactccttcctgactcacctctggcctgtagcccttctcctttctgcaaatttggggctggctgcgggctctcctgtcacctgaccttggaaggggcaggccccgcctctctcccagggtctagggaaggggtcatttcaggggcatcagagaacatccacttggcctcctcccagttttccctgctgggggaggtgagtggtcaagtgatggggttgtgtgtgtggtgggcagacatgcaggctgggccttgccaaagagccagggcaggggacgacctccagacccctgcaatccctgtctgcctccccgcttgcccttccagggacctggggcctggcctctcccatccttctctccttctcctcttctctcccattgacttcacagccacttggagcctgactcacagccacctcccttttccttcctcgcaactgtggagtttaattcttgttgttaattagattaatcagagtgatcgctgcagcgatctctccctaatgaagggctagtagacagggccttaatgagtgcccaccccacacagctctcctctcttccctgccagccgcccccccaaccctctgccaccctccactcagacagaagctcagggacagtggaatggaatgggggtgagccggggaggctgacagagagagaacagcaccaggggagagggaggaagaaggatgggccagggagggaggctgctctggtcctggaggggcacatcctgcatctgggagaggaggtgtgccgtgggggcagaggtcacagtggctgggcaggaggggtaaccagaggccaggtgtgggccactgtgagagtgagaggggccaaggagctgtggggggcaggcgtgtccatctgtgttacctgggtttgtatctctacctctgcacaaggctgtccacacaggtgcccaggctgggatccgccagccccagggatgctcccctgcaggcatactcacccctcttctcatccctgcccccaactgccttgtgtttttaaagcccaagattctgcctgaagccccttcattggtgccctggaccttctggcaaccctgtccccacccaggctcccgtcctcttccctgggaagccacagggttgctgacacctcttggggtggagaagggggatgcccaggtccgaggcccttcctccactccatcgtggccttctctccccagctccagtaaggaggtggcccccgctggctcggctgggcccgcggccggccaggggcctggggtccgcgtgcgggacatcgcctcgctgcggcgctccctcaggatgggtttcatgacgatgcccgcctcccaggagcacaccccgcacccctgccgcagcgccatggccccacgctccctctcctgccactcggtgggcagcatggacagtgtcgggggtggccctggcggggccagtgggggcctcacagaggacagcagcacccgaagaccccctgccaagccccggagacaccccagcaccaagctcagcatggtggggcctgggtctggggcagagacgccccccagcaagaaagcaggtgagataccccctatctctccctggggtggagctgggagctgggaggatctattccacgcccggggaggcttgccgggagggttcattcagggaagaaccaaggaagtggaagattccattctcaaaaggaattggg

SEQ ID NO: 38869 - DNA, 2300 bp, Homo sapien
attcaagggcaggggacactccctgaaaagttcttgagaaaggggtggtggcctcagagggacaatgaaggtaggagctgcgaattctggagaatacgttagaaagactgagggctgtgggacaagccccgtggctcacgcccgtaatctcagcacttttttttttttgagacagagtctcgctctgttgcccaggcaggagtgcagtggtgcgatctcagctcactgcatcctccgcctcccaggttcaagcagttctcctgcctcagcctcccaggtagctgggattacaggcgtccgtcaccacgcccggctaattttttgtatttttagtagagacagggtttcgtcttgttggccaggctgacaaggccaggcttgctggcctcaggtgatccacccacctcggcctcccagagtgctgggattacaggcgtgagccactgtgcttggccaattaattgacgttttaaaaagaccaagggctgactagtagaaaaggaacctacagctgggcatggtggctgatgcctggaatcctagcactttaggaggccgaggcaggaggatcccttgagcccaggaatttgggaccagtctgggcaacatggcaagacccatctctattaaaaaataaaaaagaaatgaagaaacctcctggggctgtaagttgaggaatgtggggaaaaggaagaggcagatatgtccttgcagaagggtcaagggatcagaatgggctcctcccacttgctcccctcattaaaagcctggtttatttttctctttcttgtcctgtccaggctcacagaagccaaccccagagggccgagagtccagccggaaggttcctccgcagaagcccaggcgaagccctaacacccagctctctgtctccttcgatgagtcctgccccccaggcccctctcctcgaggggggaacctgcctcttcagcgcctcactagggggtcccgagtagctggggaccctgatgtgggtgcccaggaagagcctgtgtacattgagatggtgggggacgtctttaggggaggaggacgaagtggaggaggcctggctgggccccctcttgggggtgggggcccgacccctccagcgggcgccgactcggactctgaagagagtgaggccatctatgaagagatgaagtacccgctgccggaagaggctggggaaggccgggccaatggccctccaccattgacggcaacatccccgccacaacagcctcacgcccttccgccccatgcccaccgccgcccagcttcagccctcccgagccggagggacgggacgcccaccaagaccactccttgtgaaatccccccgcccttccccaacctccttcagcaccggcctccactcctggccttcccccaagccaagtctgcttcccgaacccctggcgatggggtctcaaggctacctgtcctctgccactccaaggagccagccggctccaccccagctccccaagtgcctgcacgggagcgggagacgcctcccccaccgcctccacctcctgctgccaacctgctgctgctgggaccatcgggccgggcccggagccactcgacaccgttgccaccccagggctctggccagccccggggggagcgggagctccccaactcccacagcatgatctgccctaaggcggcgggggcgccggcagccccccctgccccggccgccttgctccccggcccccccaaggacaaggccgtgtcttacaccatggtgtactcggcggtcaaggtgaccacgcactctgtcctgccagctggtccacccctgggtgctggggagccaaagacggagaaggagatctcggtcctccatgggatgctgtgtaccagctcaaggccccctgtgccagggaagaccagcccccacggtggggccatgggcgcagcagctggggtcctccaccaccgcggctgcctggcctccccccacagccttccggacccaactgtaggccccctgaccccgctgtggacctacccagccacagcagctgggctcaagagaccccctgcctatgagagcctcaaggctgggggggtgctgaataagggctgtggtgtgggggccccatcccccatggtcaagatccagctgcaggagcaagggaccgatgggggtgcttttgccagcatctcctgtgcccacgtcatcgccagcgcagggacaccagaggaggaagaagaggaggtgggcgccgcgacatttggggcaggctgggccctgcagaggaaggtcctctatggagggagaaaag

SEQ ID NO: 38870 - DNA, 2300 bp, Homo sapien
gactcacgtctgtaatcctagcactttgggaggccaaggtgggtggatcatttgaagtcaggacttcaagaccagcctggccaatatggtgaaaccccatctctactaaaaatacaaaaattagctggacatggtggcacgcacctgtaatcccaactacttgggaggctgaggcaggagaatcgcttgaacctgggagatggaggctgaggtgggcggatcacttgagcccaggaggtccagaccagcctgggcaatatagtgagacccaatctctacaaaaaatttttaaaaattcgccaggcatggtggtgcacagctgtactcccagctacttggaaggctgaggtggaaggatcacttgagtccagaaggttgaggctgcagtgagccatgattgtgtcactgcactccagcctgggtgataaagcgagaccctgtctcaaaaaaaaagtaattgttttaaaaatggtgaccaacccaatctgaagtacccaacaggtggccaggcattgtggctcatgcttgtaatcccagcactttgggacgccaaggcgggaggctcacttgaggccatgagtttgagaccagcctggccaacatggtgaaatcctgtctctactaaaaatacaaaaattggccgggcgcggtggctcacgcctgtaatcccagcactttgggaggccaagaccggcggatcacgaggtcagaagatcgagaccatccttgctaacacggtgaaaccccgtctccactgaaaatacaaaaaaattagccaggcgtggtggcgggtgcctgtagtcccagctactcgggaggctgaggcaggagaatggcgtgaacccagaaggcgaagcttgcagtgagccgagatcgtgccactgcactccagcctgggcgacagagcgagactccatctcaaataataataatcataataataaaaatacaaaaattatctgggggtggtggtggccgcctgtaatcccagctactcaggagactgaggcatgagaattgcttaaacccaggaggcagaggttgcagtgagctgacatcgtgccactgcactccagtctgggcaacagagtgagactccatctcaaaaaattaaaattaaattaaaaaattaaaaaagtacccaaaaagtcttttccaagatgtgattttaattctctgcgtaggatttattactaactggtgattctttaatttgtgtattgtttgcttccccctactagaaactaagctctataagaatattttgtttgattgcttcgctgctgtattctattcccagtgtctagaacgtgcctgaaacctagcagacactcagtgtttgttaaatgaataatcgaataatagtccacctactaggagggttaaaggcagggtttctaaagttggaagacccagagtggaatcctgggccacgcactcgtgtgatctgccgcaagttgttgaacctaagggtgtaaaatggggattccacctctgggataggcggagcgaatgaaatgacatttataaagcactcccttcgctctgtggctcaggaattagagcactggtctagtaaagcactcttgctccctctccctctctcccttaagcgctctcttctttccccctcctgctcagcccctcacatggccacttctcttcggctttgcatgacactctacacagtctagagtaagcctttgaaatttgccgggaattaacgtcatcagtcgggaggacgacagctacgcacgcgcggggcacctcctctgtctcgcgcgctaactttgcagccccgccagccaatcaaaattagcgtcggagcccgagtgccgaggactcaccaatcggaactaggaggcgggccacggtggaggcagcggcgagagggggcggggacaaggagagggcacgcacggttctcgctgctggggtctctgccggccaataggagaggcctgaggcctgaaggcggtggggcggggcattggcggctccagcaaccggaggccgtcccagggagggccaatcggagtaaggaggtgggagaaacctagccaatcagtgtgcaggacgggcaaggagggtggtggacggcgaagtctcctgcggatgccgcccgctcccgagcttctgtcaggggagccgggcgtgcggaggcggctgaggaggcgggaaggcggcagtggttgaaggggtgattgctgactagcggggagggagtgggcagcgatggtgatggcggcgaagaagggcccgggcccgggcggcggggtcagcgggggcaaggcggaggc

SEQ ID NO: 38871 - DNA, 2300 bp, Homo sapien
ctcctcagcggctcgcctaagtccagtgcctcccaagcaggggctgcagcggggcagggagcccccgcccctgcccctgcctcccaagagccccttcccatagctggaccaggtgggacagggattttgggaggaggatggggcctgtgttggtgagggctggttgggagagagggacacagaggggatgcctgtctcacctgcccctgtcgctgtgtccctggttccggccccagcgacagcacctgctccacggccacttggctccattcagagaccaaacagcttcctcttccgttcctcctctcagagtggctcaggtgggtgtcctgccctccccagtgctgacccagtgcttgccagcaccaacggctacatcacccttctgccctgggagccctctgggtctgttgtaccttttgtacctttgcgttgaaaatcccacaagcaagccgggtgtggtggctcacacctgtaatcgcagcactttaggaggcccaggtgggaggatcgcttgagcccaggaattcaagaccagcctgggcaacatagcgagaccccatctccatgaaataaaaaaaaatcccacaagcagagaggcaggaggtgtaggtgccaggccactgggacccagctacagagtcagtggtgagcagtggaggcagccccatgcccccctttttctcctaggcccttcctcaccagactctgtcctgagacctcggcggtacccccaggttccagatgagaaggacttaatgactcagctgcgccaggtgagcagaggcgggagctgcgtgggcaggggcctgggccgggcacctccttgtgttgctgtccttgggaccagcctccctccacatcctctgtgcccactctggcacctcccctgaggacaggaagggacaggcacaagttccctgctagccctgagccccccactctccctgcctcccagacgcctctccttccctgacccctgctctatgtggtctacactgccaggtccttgagtcccggctgcagcggcccctgcctgaggacctggccgaggctctggccagtggggtcatcctgtgccagctggccaaccagctacggccgcgctccgtgcccttcatccatgtgccctcccctgctgtggtcagttggggctggggaagaggtgggggatgggccggggcgcctgtggcctctcccttaccacattttcttctttcacccaccccagccaaaactcagtgccctcaaggctcggaagaatgtggagagttttctagaagcctgtcgaaaaatgggggtgcctgaggtatgggggctgctttctaaagagtggtggcatgccggactcagccgagcatgtggcatggatggtgggcttccatttgcagcggatgtctgctctcagatgaaggcacaggctgcccctgccctgcccagcatgccccctgccctgcatgccccctgccctgcatgtcacctgtcctacacatcccctgccctgcaggccccatcttgtcctgcatgtcacctgtcctgcacatgccctgccctgcactcctcctgcactgcactccccctgcccagcacgtcagcatgtgggcgtggttctggccccagcacgtgagggcaggggtgggagggactgtcctgctgctgctgctgacgtctgtcccttgtccttgtccacctgctctcctctcccccaggctgacctgtgctcgccctcggatctcctccagggcactgcccgggggctgcggaccgcgctggaggccgtgaagcgggtggggggcaaggccctaccgcccctctggcccccctctggtctgggcggcttcgtcgtcttctacgtggtcctcatgctgctgctctatgtcacctacactcggctcctgggttcctaggccccaaaatcggccctccctcacccctttcccttcctctctatttataaggtccctgctccacccgaccccacctgcggtgccttcagccccaaccaaagacactagtgcacccccttcacagacactgacctcagaggccccactctggtgcccccagaccctgggcccccagcctctggcctccctccagtagccccacgagtccccacctctcagtgctgacggtgccttcatgtccccgccggccctgcccctgccctctgtaccccgtgaggggtggcaggagctggagtctcccccttcctcctgtgccctccccttccccccccaacagctgctatgggggggctaaattatctctattttgtagagaggatctatatttgtagg

SEQ ID NO: 38872 - DNA, 2300 bp, Homo sapien
atgtgtgtctgtgtctgttcgtgtgttgtgtttatgtctgtgttatttatgtcgtgtgtgtgcgtgtgtatgtttgtgtgtctgtgtttgtgtgtgtgttgtgtttatgtctgtgttatgtcgtgtgtgtctgtgcatgtgtatgtgtgtttgtgtctgtgtgtgtctttgtgtgtgtgtttgtgtttatgtctgttgtgtgtgtttaggtctgtgttgtgtgtgttgtatgtgttgtgtgtgtttgggtgtgtgttgtgtgggttgtgtgtatgtgttgtgtatgtttatgtgtgtgttgtgcatgttgtttgtgtctgtgtgtatgtatgttgtttgcgtgtgtgtgggttttgtgtgtgtgtgtgtgtgtgtgtgtgtgtgtgtgtgtgtgtgatgtgtgtatgattcctgtgttgggatcaggtagatgcgggtgatgtgactaagatctggggccatctcttagggatttaatggcttcttgaggagagacagtcatagggaagttccgtcagggggttccccagacgggggctagagggaggtggcactggactctgcgtgggggtcctggggaagacttcaccggaggcgcaggcgcagtgggagccgaacattgaaggagaattccccagccttctgcatccaggcagaggacccagcatgtgcaaagcatggggttaggaaggtgagccaggcatggcaggaaggcctgtgccatgctcaagtgtgaacttggttttgaagaacaaggagggagtgaggtggtcatccactttccctgtctccctactccctgaccctttctgcacctgccctcttccttcccagtcaaaaggggtaggaagggctctctctgggccataaaaagaaatccaagcaagatgtcctggggacagaggcaagagcaatgagttccatccaatctgggatgtctggaacgatccaccgaggaggtggtgatgcttgagctgaaccttgaaagatgcatggatggggaaaatggagttctcccagctgagcaaacagcacctgggaaggctcagaagctgagggcccggaggggtgggcagtgaggtgggaaacgcgggtggagccaggttgtggaagccttcctcatgctgggttagggagctgtgggttttattctgtgcttagggccgccatgaatccagactgtgccttttttttttttttttttgagacagagtctcgctctgtcacccaggctggagtgcagtggcgcaatctcggctcactgcaagctccgcctcccaggttcacgccattctcctgcctcagcctcccaagtagctgggaccacaggcgtccgccaccacacccggctaattttttgtatttttagtaaagacaggttttcaccatgttagccagggtggtctcaatctcttgaccttgtgatccacccgccttggcctcccaaattgctgggattacaggcgtgagccaccgtgccggtcccagactgtgcctttttaagatgagcaaaaggcacctttccctgtgggcaggcagcatttcatgcagggtgcagtgctgggcccgtgctggggaaaggggactcccgggcggccacaatccgctcaacatctgcagccctggttgcatgtcacaggaggtgtttgaacagggtttgtgccttgtgctgatcatttgaaaatggagggtgggttcgagtgtggagtgggcaggcgaggagatgaggaggacagacagggctgggcgggacctgacgtccggatgggccttcccggggaagctgagctgacgtccagatgggccctctcagggaggctcgcttagaccgtggaccagaatcatgtggagagaggagcagggaggtttctcccggggaatgacttgagccacccaggggagaggctgtgctgggcccagggtgactggccagctggagccaagggtgagggagtgagcacgaggccacagccctgagcatgttcctgacttttcccttgcccacctgttccagagctgggggacctccctctggtccgcctggatttctcctgtaaccgcgtctcccgaatcccagtctccttctgccgcctgaggcacctgcaggtcattctgctggacagcaaccctctgcagagtccacctgcccaggtgaggcgggtgcctggggggccacgaggacaggggtgtggctaggcaggagtggggttggtccccttggatagctgagcaggatccggggagctgccctccctgccaactccctggcgtgtgctgccccgcacacaggtctgcctgaa

SEQ ID NO: 38873 - DNA, 2300 bp, Homo sapien
tgacctgtggtttttcccgtgttgaaaacacactggagtagggaagaagggccccgaggagggatgggcactccctgtggtttgccccaggggtttcccatcttccctccgggagccccccagcccctcgccttactgttttcccatgagcactgacccctcctctcaccttcggtcctccgcctcacctggcatctctgaacaggaaccacaggagttagagattccagctgctctccaggatagccctccattgacattccccaacccccaagtctgaggcttctctagcccagtgacgctaaggcctttgccttccctgtgccattctggtcacgcctggaatgtgctcccgttggcagaaggctttgttatctctcctgggaggccacattgatggccttgaatctttaggtgtggaggtgagggagtgggcagccggctctggggggactgaaggtcctgtccgggctgggcctttccgcaactctccccgacacctccttttccccagacctgtcccggaaccggtttcccgaggtgcccgaggcggcgtgccagctggtgtccctggagggcctgagcctctaccacaattgcctgagatgcctgaacccagccttggggaatctcacagccctcacctacctcaacctcaggtagggaggccgagccagggccacgtgggagcgtgtgcttctcagtctcaagtactactgagtgacccacccagtgaccccgagaggatggcagtgctgggatgccatgcctggggagccagtccgctgcctttctcccttccacagccgaaaccagctgtcgctgctgccaccctacatctgccagctgcccctgagggtcctcatcgtcagcaacaacaagctgggagccctgccccctgacatcggcaccctgggaagcctgcgacagcttgtgaggatggggacgggaccaggaaagggacccctgagccaggcagcgggaccttctagggggaggttggggagggcctggagcaaagacagagatgggagggtgggttctgctgggcctggtctcatggccccttcccactgccttcctgataccaggacgtgagcagcaacgagctccaatccctgccctcggaactgtgtggcctctcttccctgcgggacctcaatgtccggaggaaccagctcagtacgctgcccgaaggtgagaagaatgaagaactggagaggaggtgtttgtatgtgcgtcccagttggctcaggctgcggtaacgaaaacactgcagaccgggtagcttatacatggcaggcattcatttttcacagttctggaagctgaagttcaggatctgggtgcttccatggtcagcttctggcagggtgcttttcctggctgcagactgccggctccttgtggtactctccgatggcggagagcagagacagccctctggggcctctttgataaaggagcacaaatctcactgatgagggctccaccctcatgatctcaattacttccctaaggcctcgcttcctaatcccatcactttgggggttaggatttcagcagaggactttttgggtgacacatttcagtccataacagtgtatgtgctttgaagaagttacaggccaggaatcttcagaggagaattacaccttcattgtccaggcttttgcagtatataaaacaaactgtaaacgatctgatttgatcttgacctagcaaccctctgatgctggcagggcgcagatgagcagctgtgttagaaacgtggacacaggcacagaaggggagctggtgggtgcatcagctctaggtagactggcaaggtcagaaggggccttcaaggtcacccagcagccctgctcaccccagcaggggctctcaaacacctgagtcgggatgctccgccactcctcccggagatgccagggccagtgccagagcccaggtggcccatctaatgtgcttgttgtgatgcactgatagcctctgccccaaagcaggcatgccttttgttcagcaggcagcagcatgtgtgtgtgtctgtgtgtgttatgtcttgtgtctgcgtgcatgtgtgtgtctgtgtgtatgtatgtgtttgtgtatgtgtgtgttgtgtctgtgcatgtgtctgtgtgtctgtgcatgtgtgtctatgtgcatgtgtatgtgtgtctgtgtctgttcgtgtgttgtgtttatgtctgtgttatttatgtcgtgtgtgtgcgtgtgtatgtttgtgtgtctgtgtttgtgtgtgtgttgtgtttatgtctgtgttatgtcgtgtg

SEQ ID NO: 38874 - DNA, 2300 bp, Homo sapien
aaactacccggagctccccggcccctcccagctcccgcccccggccccctcctcccccagcattccggctcagggtgcagccgtgctcctgtgagcttgggggggggtcggaaatcccagcttcccaagaaccctcctctgccccactctctacacagggcccaggttctaggccaagtggggtccctcttgtccagaattctctcctctgtcccctctccgcaagcagggacagaaaggggaagtgacaaaaacatacagttgcccataccctgccctccatctctcctcgccctccaagcagacgaaaagcatcagtgccttgctgcccggactgccttgagccttcccctcccgtctcccatctctttctgagtgtcttcgctgcgtgtcgcctagtcttgggtccctgatctcccttggactaggctccctggggtgatagtaggaagaatcctgaggtggcggggaggggccatcttgcaaaggagaagtgcagctcattctctcccagaccacatcctgtgcccccagtgccctgcctcctgcctgagctcccttccgctcctagcttttgtccccgccaccgcctaccccatcagaactctgagaactcggtctccacccccttcgtccacatgcacacacacaaacacatttgcagagaaagcgggcaggtggaggcgaggctgggaggggcaaatgccatccccccaccctctccagaacggtcatctctgaggccagggcttctgtctgtgcaccagggctgggcagagaggaagagaaaggggtcccggggcatcaggctgtcatccaccctggtaaacacggggcctaccagagccagaacctgacagattgtttctacttcatttcctgtcacaagactcatttccttgggggatatacccggcttctctcctctgcttgcttttgctggcctgcccttccctgagaagggcccttggagaagctcaccaggtctgtggcctgggactccgcctcgcgggccctgggcccctcccaggacaggctgggccgaggaaacagaaaggcaggcttctccaggtctaagccgttagtgggtccgtgctacagggaatcccaaggctgccagcctccgcatagcaaggcagtgctccagataagagggcgattgtagaccccaggccctcccacactctccaccctcgccgtgcctgagatgctcacacagttgctgatctcttgaagtctgtgtcagtaagagaggaagcagagccgggctgctagggctagcagagggtaggaaggatgcctgccctgggccagagaagcccagatgggagggacctgggaactccagctcccatctccaaccaggtcttcttgcccttccctcccagcccttgggaatcagtaactttatgattctttggacctggcttgctggtccttggggctggcgaaaaactcgtccggtgtcggggactttatctctagaaccaagatagagtgacctgtggtttttcccgtgttgaaaacacactggagtagggaagaagggccccgaggagggatgggcactccctgtggtttgccccaggggtttcccatcttccctccgggagccccccagcccctcgccttactgttttcccatgagcactgacccctcctctcaccttcggtcctccgcctcacctggcatctctgaacaggaaccacaggagttagagattccagctgctctccaggatagccctccattgacattccccaacccccaagtctgaggcttctctagcccagtgacgctaaggcctttgccttccctgtgccattctggtcacgcctggaatgtgctcccgttggcagaaggctttgttatctctcctgggaggccacattgatggccttgaatctttaggtgtggaggtgagggagtgggcagccggctctggggggactgaaggtcctgtccgggctgggcctttccgcaactctccccgacacctccttttccccagacctgtcccggaaccggtttcccgaggtgcccgaggcggcgtgccagctggtgtccctggagggcctgagcctctaccacaattgcctgagatgcctgaacccagccttggggaatctcacagccctcacctacctcaacctcaggtagggaggccgagccagggccacgtgggagcgtgtgcttctcagtctcaagtactactgagtgacccacccagtgaccccgagaggatggcagtgctgggatgccatgcctggggagccagtccgctgcctttctcccttcc

SEQ ID NO: 38875 - DNA, 2300 bp, Homo sapien
cttgcggagaggggacagaggagagaattctggacaagagggaccccacttggcctagaacctgggccctgtgtagagagtggggcagaggagggttcttgggaagctgggatttccgacccccccccaagctcacaggagcacggctgcaccctgagccggaatgctgggggaggagggggccgggggcgggagctgggaggggccggggagctccgggtagttttccccaagagtccacacagggagagacagcctaaggaagtaaagaataacatttggtctttgtcaaaaaacaaccaagggggaggggaagggaacagacagtgagtgtcacacagctgctgaggtcaatctggagtgtggggttaggtgggggtgggagggaacagggctgtaaggggcaggaatggctcctggagctcactcattccccatctcaagtgttgcagagcaggcgagatcagtggggaggtttcgactggttctccccagaagagggaagaggatgtgtgccagtgccggcctgagtgttcccaggtgagcaggcacctgcttagggagaagtaagcactatcctccagctctggtcccccaccgtgcagatgagaggaggaagaggcctgggctggggtgaggcttcgggaatgcagtcctcctccctgatcctgatccccacccccagctgccggcccaaggtcataggctgcctcctgagtagctgaggcttgactcacctgtcacagttaagtcccccaccccctaccatccacagacaccagggtggagggtgcatggttggacagatcctgcgggtggaggcgtggaaggacagtctctagctggccagcactcccagctaggagataagatttccttccctccagcaacggcctcaagtccctcccccgggggaaagcagaaactgaaatgggaattctaagatccctatgaggtcacaggctccacagtgacctcacaggcttaggaaggaggaggaggaatctcagataagccggttggggataataggcggaagagctcagggagaaaagagtgaggggaggtagagatttgtttctttcccataggctggagagctgcgtggacagtggagagggccaggaccttagggggcggggttgcggcacagaaagcagaaacctcgggcttaggggccagtcactgggaagggggtgcccggggctgctcggatctcggtgggacgggggttaagaggtgtagatgaagagggagagaaagcagttattagaggagctcgtggggactgcttcatagaccgattggagctgaggttaagagatcatgtaaataagccaaccaggtgaggggcgggaccatcctacaggtgcgcagatatgcaaataaagagaaaggaggaatctctcccaacgctcggaggcgcagggcgttctgtgcaaacgagaagcacgttcattgtctagggggttctcaaagatgggagaggatggctgcaggtttagggcaatcaggaggggcagcaaccctggccgccaggtgaaggggcgggcccgactcccgggccgggcggggcccggggtggggctatgcaaatgagggacccggttgggcccggggcccggctgcactcaccagcctgggtgatgtctgacaggtcgtagctacgggccgcgccccgggggaagtgcttcaagcgccggttagacaggttcagggtcccggtggccacggcctcctctagggcccgctctgcactgcgtctccccggcagacctggagacccgggcacggaggtcgtggctgccgcctcctcacccccggcggcgagtggagccgctacggccgccgccatccgctcccggcggctcccgctgcctgactgacgggaccggccgtccctccttcccccaccccctccttggagccgccgtagttgcctcaagggggagggagcggtgtccgggaccggacggaccaatcgtggccccgagacgcgtcagaagcggccaatcagaacccgtcagtgggggtggagctccggcgccggagtctgacgagagaagggaggggaacaaggatagagcgctcgccaacggccgacgctccaggccgtcccgcccagcgcagctgcacccaatcacaatgctcagatcgggaggtggagccaatcaggtccaaccaagaggaggggacaccggcactccactagcaggaaaacgggccgagggaccgcaagcagggggtgcctagtcctcgtcccccaaagaccaatcgtaagccagatacaggcgagtgac

SEQ ID NO: 38876 - DNA, 2300 bp, Homo sapien
gcgggaaagggctgtgcgtggaggatccagagacctggtttctagagcaagccagctgtcaggaacttgctgttcgctcttgctaacgcatcaacttccctctgcctcagtttctgcattcgtagcaccaagggcgtgttctaggcggtgagatcctttctaagcctctaaaaccccgtggtctggtcccctctccattcctgtccaggggagctcctcgggtgagacggcagaccgtgcaacgctgcacctacaccctccctcctcgagctgggcatctccaggctctgggaagccccccgcccgcccccagcccgggggtcccgagacccctgccagaggcttcacagtcggaggtccccccgctgccccttcagctgcgacaaccgccagtgcactggcctcaagcagtcgcccgaatcccctcaagccctggacgccggctagccccctaacacgtccagctcgcactcgccactgcagcggcgaactgcgttcccggccggccaggggctccgcgttcattcttaacctcagtcttaaagttctagctcacccgcctcctccttagcaaagggaccgccttctcgcccatgctattggtaggtagagccgtccctcagagaagaggcaggtccagattcccttcggaggctctaattggccttcttgacagtcactcgcctgtatctggcttacgattggtctttgggggacgaggactaggcaccccctgcttgcggtccctcggcccgttttcctgctagtggagtgccggtgtcccctcctcttggttggacctgattggctccacctcccgatctgagcattgtgattgggtgcagctgcgctgggcgggacggcctggagcgtcggccgttggcgagcgctctatccttgttcccctcccttctctcgtcagactccggcgccggagctccacccccactgacgggttctgattggccgcttctgacgcgtctcggggccacgattggtccgtccggtcccggacaccgctccctcccccttgaggcaactacggcggctccaaggagggggtgggggaaggagggacggccggtcccgtcagtcaggcagcgggagccgccgggagcggatggcggcggccgtagcggctccactcgccgccgggggtgaggaggcggcagccacgacctccgtgcccgggtctccaggtctgccggggagacgcagtgcagagcgggccctagaggaggccgtggccaccgggaccctgaacctgtctaaccggcgcttgaagcacttcccccggggcgcggcccgtagctacgacctgtcagacatcacccaggctggtgagtgcagccgggccccgggcccaaccgggtccctcatttgcatagccccaccccgggccccgcccggcccgggagtcgggcccgccccttcacctggcggccagggttgctgcccctcctgattgccctaaacctgcagccatcctctcccatctttgagaaccccctagacaatgaacgtgcttctcgtttgcacagaacgccctgcgcctccgagcgttgggagagattcctcctttctctttatttgcatatctgcgcacctgtaggatggtcccgcccctcacctggttggcttatttacatgatctcttaacctcagctccaatcggtctatgaagcagtccccacgagctcctctaataactgctttctctccctcttcatctacacctcttaacccccgtcccaccgagatccgagcagccccgggcacccccttcccagtgactggcccctaagcccgaggtttctgctttctgtgccgcaaccccgccccctaaggtcctggccctctccactgtccacgcagctctccagcctatgggaaagaaacaaatctctacctcccctcactcttttctccctgagctcttccgcctattatccccaaccggcttatctgagattcctcctcctccttcctaagcctgtgaggtcactgtggagcctgtgacctcatagggatcttagaattcccatttcagtttctgctttcccccgggggagggacttgaggccgttgctggagggaaggaaatcttatctcctagctgggagtgctggccagctagagactgtccttccacgcctccacccgcaggatctgtccaaccatgcaccctccaccctggtgtctgtggatggtagggggtgggggacttaactgtgacaggtgagtcaagcctcagctactcaggaggcagcctatgaccttgggccggcagctgggggtgg

SEQ ID NO: 38877 - DNA, 2300 bp, Homo sapien
tcctcttgcatttgggtcccctttatccactccatttcaccccaggaggcaaacgagaggttgtgaatagaaaaagtccactgtgggccaggctttgtggctcacgcttataatcccagcacttcgggaggccgaggtgggagcattgcttgagcccaggagtttgagatcagcctgggcaacatagtaggaccctgtctctacaaaaaatacaattagctggcatggtggtgcgtgcttgtagtcccagttactcgggaggctgaggtgggaggttgaggctgcagtgagctgcgatcaagccactgcactccagcctgggcaacagagcgactctgtctcaaaagaaagaaaaagtccactgtgggccgggtgcggtggctcacgcctgtgatcccagtactttgggaggcagaggcaggatcgcttgaggtcaaaagtttgagaccagcctgggcaacatagcaaaaccccatctctacaaaaattgaaaataaattagccaggtgcagtggtgccgcccgtggtcccagctacttgggaggctgaggcaggaggatcacttgagcccaggcattcaaggctgcagtgagccatgactgcaccactgcactccagcctgggcgacagaatcagaccttcttaaaaaaaaaaaaaaaaaggccgggcgcggtggctcacgcctgtaatgccagcactttgggaggccgaggagggcatattgcctgagctcctgagtttgcgaccagcctgggcaacacggtgaaaccccgtctctactaaaatacaaaaaattagccgggtgtggtggcgggcgcctgtagtcccagctactcgggaggctgaggcaggagaattgcttgaacccggacagtggaggttgctgtgagccgagatcgcgccactgcactccagcctgggcgactgagcgagactccatctcaaaaaataaaaaaataaaaagaggaagggaacggaagggagagggagggagggaggaagagaggaagggagtgaaaacatccactgtgaaaactgagggagcgggaaagggctgtgcgtggaggatccagagacctggtttctagagcaagccagctgtcaggaacttgctgttcgctcttgctaacgcatcaacttccctctgcctcagtttctgcattcgtagcaccaagggcgtgttctaggcggtgagatcctttctaagcctctaaaaccccgtggtctggtcccctctccattcctgtccaggggagctcctcgggtgagacggcagaccgtgcaacgctgcacctacaccctccctcctcgagctgggcatctccaggctctgggaagccccccgcccgcccccagcccgggggtcccgagacccctgccagaggcttcacagtcggaggtccccccgctgccccttcagctgcgacaaccgccagtgcactggcctcaagcagtcgcccgaatcccctcaagccctggacgccggctagccccctaacacgtccagctcgcactcgccactgcagcggcgaactgcgttcccggccggccaggggctccgcgttcattcttaacctcagtcttaaagttctagctcacccgcctcctccttagcaaagggaccgccttctcgcccatgctattggtaggtagagccgtccctcagagaagaggcaggtccagattcccttcggaggctctaattggccttcttgacagtcactcgcctgtatctggcttacgattggtctttgggggacgaggactaggcaccccctgcttgcggtccctcggcccgttttcctgctagtggagtgccggtgtcccctcctcttggttggacctgattggctccacctcccgatctgagcattgtgattgggtgcagctgcgctgggcgggacggcctggagcgtcggccgttggcgagcgctctatccttgttcccctcccttctctcgtcagactccggcgccggagctccacccccactgacgggttctgattggccgcttctgacgcgtctcggggccacgattggtccgtccggtcccggacaccgctccctcccccttgaggcaactacggcggctccaaggagggggtgggggaaggagggacggccggtcccgtcagtcaggcagcgggagccgccgggagcggatggcggcggccgtagcggctccactcgccgccgggggtgaggaggcggcagccacgacctccgtgcccgggtctccaggtctgccggggagacgcagtgcagagcgggccctagaggaggccgtggccaccgggac

SEQ ID NO: 38878 - DNA, 2300 bp, Homo sapien
atgagagccatgaaccaggaagcccacaggctgtagctggggctcctgcagggacccagggggtcccatttccctagcaccaccccacctccctcctctgccgcacaccacgctctctgctttctcccttagcagactgtgctggccttgcccaacctcacacacccctgggacttagccggctcagggctggtgtgagagggaagaatgcaataggcagattagcccgggcaccctgggaaaccctgcaaggaaagcaccactcagccatgccccctttctctcctcctccaaggtccctctgtgtgcctgtgccctctgtgccaccagggagtgcctatacatcctgtccagccacgacattgagcagcacgccccctatcgccacctgccagccagcagggtggtggggactcctgagcccagcctgggggccagagcaccccaggaccccggggggatggcccaggcctgcgaggagtacctcagccagatccacagttgccaaacgttgcaggaccgcacggagaagatgaaggagatcgtagggtggatgcccctgatggccgcacagaaggacttcttctgggaggccctggacatgctgcagagggctgaaggaggcgggggtggtgtagggcccccagcccctgagacctaatccccctcatgctagcctagtccctggaggagggagtccggccccaggccagggactaaggagcaatgaccattgtgcacatgcgtgtgggaaggggttgctagggggtggggacggctaaccagggtaagaatgttcagggggctgcccaggaggggcccccaacctgactatcatggacaagagatttgatggatagaataaaaggctgcagcgaggcctggtgtggaagccttgggggctgggagggacaggggcagggatggggtgggtgggtgcccggcttggtgggtgcaggagggcaggagcccaggcaggggcaggcagcacaagcagctccaggtctcaggtgcagcagagctgatgctgcctgaacccttcacattgttgtccactccctgctcccaagagcacacctggtcgtttggactgggaagttctggccctaccttctggaacaactctatgcacagatgctcttggctaccccactgggatcccctgcccactagacttgtccccatcctgaggcagcctgttcctcctgacccccgaaagcttcccacccatctcccttcggcctgaagccagcccccctcctctctcccttctgtttacctcccaggtttgggctctattttctactccttccacctcttcctgagtaacaaggacactcccttcatccacaccccatgcctcctgccttgcttcctgtaccttcaagtagttggaagaggtcatgggtgagaattccttctccttggcctagtctggcccaggtctggagagaaggcaatggagatgtgaagtggaggccaggtgtggtggctacgcctataatcccagcactttgggagtccgaggtgggcggatcacctgaggctaggaatttgagaccagcctggacagcatgctgaaaccctgcctctactaaaaatacaaaaattagccaggtgtggaggcatgcacctgcagtcccagctactcgggaggctaaggcacaagaattgcttgaacccgggaggcggaggttgcagtgagcagagatcgcgccactgcactccagcctgggtcacagaatgagactctgtctcaaaaaaaaaaaaaaaaaaaaaaagaaattgaagtggaaaatgagctggcaggggtggtcaggcagggggtgagcaatgagggctcctgagctgaggaagcaggggcggggggaggatgggggctagggagtcctcagaagttcccggagatactccctcactggacagagtggggttcccgatgacgttacttgaggcctgggagacggcctctgcccctcactgctcctccccctcctaaggtcaacatttatgtgtcctagacctagagaggtcccaggacacgccactgtcccgccttccccattgcccgccccactggccagtccccacgcccacacacccaaggctgccccatctggcgctgattatcctgctgctgccgccaccgctgctgctgctctgcaaaattcagctgctgcctctgtcttgaggaccccagcgcctttcccccggggccatgctgcctgcagccacagcctccctcctggggcccctcctcactgcctgcgccctgctgccttttgcccagggccagaccc

SEQ ID NO: 38879 - DNA, 2300 bp, Homo sapien
caggctggtctcgaattcctaagctcaggtgatcctcccgcttcagcctcccaaagtgctatgattacaggcatgagccactacccctggccaggtggccttttaacttcgtcccaacttcgcagagccccagtcgcctctctatccgcggaccccagacccggggccaaatctcctctttgcctggcctccaacctgctcccctcgccggtttggagccctggggttcagatcccgtccctttagctgaaccccgcccctccaaacagccgcgtgcgtgcggtccgccgactctctcccggactcgcccaggtcccgcccctcaccccgggactgcgtcgccgcagaacttccccagcctccgggagtcgtcgctcacggctccgttgaacacgctgaccgagtcatagcggcagtaggtgtccggctccaggtcaaacttctcgaaggtcagcgcgatgacctggcggcgggcggaggcggggactgcgcggcgggacacccctgggcgcctgcacctcatctcctactgggtgcctgcagcagctcccactcccacctcccgcgtcctctgggcccccctcctgaaggcgttcacaccacagcacggaggaccacacacacccatgggaccctgcaggggtgtcggtcgtcgtggttggcaaggtcaagtcctggcgcactcacaagtgacaggcccgcgtgttataccaggaccctgtacctcgctctcctgagacttgtctcagttgtaatttttacatttttgtttgcgtgcatgcaggggttggggctgttttgggtgcccaccagcgcaagcgcagtgctcgggacacagcagatcttcaataaatctctgctggctgcaagctggagggcgccgcctgggtcccctagggcagcccggggaggagggtcggtacctggtccgggggcgcgatgatgtgccaggaacagctgatgcccggggggtaatcggactcgggccagttgggcgtggtcagggttccctgggccttctccagccgccccccgcaaaattggtgctctggggaggggagagaggagcgggggtggggggcggtggagaccctcggtcagcttcaggagaactctaggctgggagccccggcaggcagctcggatgtctggggctcaggatgaggggacgagaagaaggggaggtaagatgggggcaggttaacagagagcggccgggaggagcgcggctcggggaagtctggggccgcagggcgcactggcgggcggtggaagcgggaggaggaactggctggacgcccccttctggcccctccccgacccgcggccgcaccgcgcctcttcccctaggagatcccatctccccggccctgcagcagagtcccctttcaggctggagagggtgtcctcgacttggggcacagcccccgaggacccctttagggaggtccccgcctgaaacattgcaagggagacttctgccgccaggagggggtgatgggaccgcaatcgggagcccagggctgggtgtaggggccccccggggttggaggaacctagtccccccagccctggggtgccccctcgcgcccgacggagggagcccgattgcggacgggggccggcagttactcaccgtcccagtaaccccaggccgcccattccacccgcgggtcggtgacccatttccgcctcgcgcctggggggggccctggaagagggatgggtgggtgcgggaggaggggagagaagacggggaggagggactgaaggggcggttagtgaggaaaatgggtcagggaggtagggggccctaggcactggggcgcggggtgggcggggcggaggttagggctgggggcggggctgcggccggggcggggcctggagggggggaaggcggaggtgagggagttctcaccagtgcccgaggtggcccgcccgctgtaccagagcaggaagcctcgtcctcctgtgccctcatccgtcgtcatcctcagggtcacctggttgccgggggcgactaggggcgcaggccggaaggtcccacaaaagcgtccgagccgctggccggaagtcccagacccagcgaagacctccagagcatcgtagcggcaggcggggtgcagctccaggtcgaagactcggaatgagagggacacagtctggccctcggggacctgatagcggggacagaggcggggacccacagagtcaggccccacacaacccagccagagggcagctcccctgccccaagcgtttcttgcagaaacggactgaatgggaaggggcctcca

SEQ ID NO: 38880 - DNA, 2300 bp, Homo sapien
ggcctcccaaagtgctggaattacaggggtgaaccaccgcacccggccttgttgcccatttctagtacacttctgttttaggcctttgctatttcctctatccagaattctctcccatagacatatctcatggttcacttcctaaatccagtcagatctctgctcaaagttcatcctagtcactcattcatttgttcattccaaatggtaggcactgtcataagtcctaaagatacaacagaaaactaaacaaagtccctgctcttgtgaaaaggaaaaaacattctactggaggagagagaaacaataaaataggaggtcatgtatcactataagtgctattaaaaaaacaaatacagggcagggagcggtggctcacgcctgtaatcccagcactttgggaggctgaggcgggcggatcacaaggtcaggagatccagaccatcctggctaacatggtgaaacatcatctctactaaaaatacaaaaaattagccgggtttggtggtgggtgcctgtagtcccagctactcgggaggctgaggcaggagaatggtgtgaacccgggaggtggagcttgcagtgagctgagatcgcgccactgcagtccgagattgcgccactgcagtctggcctgggtgaaagagcgagactccatctcaaaaaataaaccaaaccaaacaaaacaaaaaaaacaaatacaattagccgggtgtgaagtcgcgcgcctgtagtcccagctactcagaaggctgaggtgggaggattggttgagcgcaaccaagcaggtggagactgcagtgagctatgattgtaccactgccctccagcctgtgtgacagcacaagactgtctcaaaaaaaaaaaaaaaaaaaaagaaaaagaaaaagaaaatgtaaaagagaacacggggattctacacaagatgttcagaggagactttcagataagatcaactttgtctttgctccattgctaactgggtgccctcagagacccagattcttcaccttatccaggctgtaaaaggagttgaagattcgatgcaattaaagtggcagggtttagcaaatccttttttaaaatatataattactcaaacaacatgggtttgaaatcagcaaatcttaattccctgtgcaaatgtgagtgatttcccacgtccctcacaggaaggtgagaaacaggaggcaagacttagtctggagtcccagatgggaggaacctccaacccatagaaaacagactttgagcctggggaaggaacagtggctctcatgcactttgggaggcttaagtgggaggatcgcttgggcccaggagttcgagaacagcctgcagaacatagcgagatcgtctctacaaaaaattacaaaaagccaggcatggtgatgcacgcctgtaatcccagctactcgggaggctgaggcaggagaatcgcttgaacccaggagttggaggctgcagtgagcaatgatagcgccactgcactccagcctgggcgacagagtgagactctgtctctaaaaaagcaaaaaagagggcgggcacggtggctcacgcctgtaattacaggactttgggaggctgaggcaagtggatcgcctgaggtcaggagttcgagaccagcctgaccaacatggtgaaaccccgtctctactaaaaatacaaagaattacccgggcgtgatggcgcacgcctataatcccagctactcgggaggctgagacaggagaatcgcttgaaccctggaggcggtggttgcagtgagccgagatcgtgccattgcactccagcctgggtgacagagcgagacttcgtctcaaaaaaaaaaaaaaaaaagcaaagaaaacaggcttggttcctgcagaggcttctagagcctggaatgaagaggaggaaaagggcttcccggtgggagattgacttggaccatctcaagaatagggaggaaagaacaaagcccagttcgaaaccccgcccccggttctctgagttacttcagggctcgagttcgagccagtacaactgttacgtcaccggaatccagccaatcgcagacgacagaaggagggcgttgtttggtctttcagcacaccaatcggcgtatagttacggcagaaacaaagacgtcctagccaatgacagaggccgtacggcggaagtatagaaaaggactctctggaacatggcaacattaatctgaccacaagctgactggcaggtgctttaaccacaaggtgggcatcctaacgcgagcgaccgttttgaggcagaagcccgatggggcccgtgtccga

SEQ ID NO: 38881 - DNA, 2300 bp, Homo sapien
attttgggaggtgaaggtgggctgattgcctgaggccaggagtttgagaccagcctagccgacatgccgaaaccctgtctctactaaaaaaatacaaaactagctgagtgtggtggtaggcgcctgtggtcctagctactcaggaggctgaggcaggagaatcacttgtacccaggaggcagaggttgcagtgagctgagattgcacgactacacaccagcctgggcgacagagcgagactccgtctcaaaaaaaaaaagaaagaaagaaagaaaaaagaaaagaaaagtgtgtaaagaaagactataaccaggatcctgatttagattgcagttcagggaaggcttcgttgaggaactgacgagtctaaactgccaagatgagtaatttgccaggcaaagagactgtggaaaaacattcaggctgagattcaccatttgcgaagggtctgaaatgtgaagatggtggcctcttggaggaagggaaagatggtccatgtggccggtgaggtggatgtagctcaggccctaaagggccttactggctactttaactgttttgaattgaattttcctgcctcatccctgagtgatcctccccactcccctccccataagcaccttatctcacgcttttgatgtgtagctttaaatacacatatggggcgggtcgtcatggttcatgcctgtagtcccagcactttgggaggatcgcttgaggccaggagttcaagaccagcttgggaaacacagcaagacttctcgtctacaaaaaatttttaaaaatcagcggttggtggcgtacacctgtagtcccagctgctcaggaggctgaggcgggaggatggcttgagcccaggaaccggtgattcccctgagtaccttggtgtaaagtgtctccatgaggcccacgtggaggatgggggagatgaggagggtctgctgcctgcccagttagctctttcgaaggaaagtgtttgggtgctgtgtgtgtgtgtgtgtgtgtgtgtgtgtgtgtgtgtgtgtgttgacgtcgggaggaacgaggttgggggagagagtttggcttgagccgggaagaacctacaggatgatgggcaggacccccagctatgggaagtcaggttttaagcagagtgaggtcctgagagtctccggcgccgccctggtggtgatgggagaaaatgggtccgcggagggccctgcactgcggctcgcgcctgtaatgccagcactttgggaggccgaggcgggcagatcacctgagatcaggagtttgagaccaacctggtcaacatggtgaaacccgtctctactaaaaatacaaaaattagccgggcgtgatggcacgtgcctgtaatccctgatacgagggaggccgaggcaggaaaatggcttgaaccaggaaggcggaagttgcagagagccgagattggtccactgcactccagcctgggcgacagagcgacactccgtctcaaaaaaaaaaaaaaaaaaaaaaaaaaaagcgtccgcggggagcgctcttttcctaaactcaggaacccctcgccgcccctgcccctggcgaccccacgtctctggcatccttccctcttccctccctctcctccgggcgcccagaaaagtccccacctctccccgcttaggcaaaccagccttcgggaacgggtggcaggctcggccgggatggccgctctgactcaggacattcgcgcggcgctctcccgccagaagctggaccacgtgtggaccgacacgcactacgtggggctgcaattcccggatccgtgagtgcgcgcgcgggcggggggcgcgcggggagggggacgcggctcggggcgctcaccagccccgctccccagggctcaccccaacaccctgcactgggtcgatgaggccgggaaggtcggagagcagctgccgctggaggaccctgacgtctactgcccctacagcgccatcggcaacgtcacggtgagcaccccctgcccgctcctaggatggggcgcggcacgagccctttcctgggtctcgaaggagggacgcggggagcgcgcctcaccgtcctcgtgtccccagggagagctggtgtacgcccactacgggcggcccgaagacctgcaggacctgcgggccaggggcgtggatccagtgggccgcctgctgctggtgcgcgtgggggtgatcagcttcgcccagaaggtaagtgtccctggacagagggagggcttgagcccgggaaccggagggtcggactgccagtgagaatcgttcagggtgctgtgagagggagacagg

SEQ ID NO: 38882 - DNA, 2300 bp, Homo sapien
ttgcctggcctggggctgtgcgtgccatccccccagctcaggaacagggcctagctcagggcagagactgctgttcaataatacttgttgaatgaatgaattattgattgaatgatatgaagaggatactctccctctgaatatgaaaggggacagaccgaggaggggaggatgaggtggggaggggcttcagagggatgtgaacccaaggggtggttggggcctgttggaggattcccaggggctgcacctgcctgtccacacctccctccaaggccaccctgaccctgatattaccccctccacccagggcactttccagcagatgtggatctccaagcaggaatatgaggagggcgggaagcagtgcgtggagcgaaagtgcccctgatggcactcctccccacacacctgctcccaagctcagatggaagtcccttaacccccatgccacattgcccccctcctcctttccctcttgtcctcattaatggtgatgtttctgggttgaaagaagtaaaaatgttttaagaaaaaaaagtttggcctccgtggggtggggagtgggcacaggggtctggagggaggtgaggggagggagtctcacttctacacccatgccgatcccacagtgggtgctgggacacagccccaggggccatggattcctcaggtttcctaggggttgtgacccagggagggccacatgacgaggaccgggggttgggggagttgctgggggctaacagttgtggtgggaggtgggaggggctgcagggtgcagtggaggggcacggcctggggtgagtgtggcaggaggtgggtggagcaggaggtgaagcctggatgggcggaacaggaggtggggcctggtgggcggggcctcagcgtaggccttaggtctcaggggagcagcacgcctgagcaccccaggacctgcgctcaggtgagatgcgctatgccttccttcctggggctcttggtggtgacagacatggggcggggactagggcgctggtgcatcccagcagctcggaacttctctggacctgagtaggagctgatgtttcccaggggaaacccgaaagggaaacttggtgggaccctgagccctcctcttcagagctacttgtcttggggccctcggaagggtttggggacctgcgccccctgcctgtttagcagtttatgcctgtgacatgtttctggggtgaggctaactggcctttcatcagcctcagaacccaaagaggtagaaacccatgtgatccaagtccttcggtgaccaaacgggccggtgcccagggaggaccatgacttgtccagggtcacccagctctgcccacaccttggcggggactctgatcactcctccccactgacccacatatccctgaccccaggacccctatctgggagctctcgctggtctcatctgaccatgtgctcccacctgtgcccctccttctccagcagccagcaggagtctgagaacgacctttcaaaagagacacacatgcacaccaccagaccagacccccaagtcacaccactgtggtgcctccagcttagaatgccactggggcaagtgtcaggacagggaggacagctgatatgtcacaggaccggggcactgggggactctgaaggccagatgaggaaggggcagatgtcttaggggtgaatcttccacctgggcatggcggggcttaggaaggggtccccaggatccagggaggggtaaaagcaggagaggggagggggcacccatgtctctgccctcccccactatcggcccccttcccccacccctgatgggaactaggaggccaaagtccgccccaaggtcaaaaaattgattgttttgcagggaggaggcaggcgtggggctgtggagagattggcaggggagagcacagccccttgtgctctggcctggacccgggggccacgtctggaaggctggactgaggccaggactgtgcccccacccttgggggtggtgaggagcagccttggttcaggctgcctgccaggactgataaggggccctcctagggctcccacaaacggtttatcggtttatcgctgggggacagcctgcaggcttcaggaggggacacaagcatggagcggctttggggtctattccagagagcggtaagactagtgggattgggaagaccccttaggccttctctctaagtccctcagccccctcccaagcccctgaggctggcccctcctggaccgtgtcctgacctcgcttcttcccacccctgcccctcccccacgccccc

SEQ ID NO: 38883 - DNA, 2300 bp, Homo sapien
ttcaccgtgttggctaagcttgtctcaaactcctgacctcaagtgatctgcccatcttggcctcccaaagtgctgggattacaggtgtgagccaccatgcccggcctgaaattaagtattaataatatatcctggacaagtggagtggctcacacctgtaatcccagcactttgagaggccaaggcgggaggatcatttgagcccaaaatttctagaccagcctgggcaacaaagcgagacctcatctctacaaaaaatttaaaaagcaactggcaatgtggcgcatacctgtagtcccacctacttgggaggccaaggttggaggatcactggaacctggaaggttgaggctgcagtgagctgtgccactgcattccaacctgggtgacagagcaagatcctgtctcaaaaaaaacccaaaaaaattgggtgtgtattttccacttagagcacgtctcaatttggaccagggctggtgagctacaggaagctagtggccactgcattggacagcacatgtgtgtaggctgagaaagatcaaagaagcccagccgtggtagctcacgcctgtaatcccaacattatgggaggctgaggtggaacgattacttgagcccaggagtttgagaccaggctgggcaacatagtgagacaccatctctacaaaaaataaaaattaggctgggcgcggtggctcacgcttgtaatcccagcactttgggaggccgaggcgggcggatcatctgaggtcaggagtttgagaccagcttggccaacatggcgaaaccctgtctctactaaaaatacaaaaattagccgggcgtgttggcacgcgcctgtaatcccagctacccagcaggctgaagcaggagaatcgctggaacctgggaggcggaggctgcagtgagccaagatcgcaccactgcattccagcctgggcgacagagcaagactccatctcaaaaaaataaaataaaaataaaaataattaaaattaaaattttaaaaaaatagagagaagggacactctgagatgctcattgcaggaaccctcaaggggcaagttgtaatgccgaaggctgcagatggggtgccacagtgttggaatggtgaggtggagggaatatcttccttgggaaagagggagactggcggtgttccaaagccctgatggagtgagaagaggacacctggtggggaaggactgtgtgtgtgtagggggtgttgagtgccaggtgcaggttgcctggcctggggctgtgcgtgccatccccccagctcaggaacagggcctagctcagggcagagactgctgttcaataatacttgttgaatgaatgaattattgattgaatgatatgaagaggatactctccctctgaatatgaaaggggacagaccgaggaggggaggatgaggtggggaggggcttcagagggatgtgaacccaaggggtggttggggcctgttggaggattcccaggggctgcacctgcctgtccacacctccctccaaggccaccctgaccctgatattaccccctccacccagggcactttccagcagatgtggatctccaagcaggaatatgaggagggcgggaagcagtgcgtggagcgaaagtgcccctgatggcactcctccccacacacctgctcccaagctcagatggaagtcccttaacccccatgccacattgcccccctcctcctttccctcttgtcctcattaatggtgatgtttctgggttgaaagaagtaaaaatgttttaagaaaaaaaagtttggcctccgtggggtggggagtgggcacaggggtctggagggaggtgaggggagggagtctcacttctacacccatgccgatcccacagtgggtgctgggacacagccccaggggccatggattcctcaggtttcctaggggttgtgacccagggagggccacatgacgaggaccgggggttgggggagttgctgggggctaacagttgtggtgggaggtgggaggggctgcagggtgcagtggaggggcacggcctggggtgagtgtggcaggaggtgggtggagcaggaggtgaagcctggatgggcggaacaggaggtggggcctggtgggcggggcctcagcgtaggccttaggtctcaggggagcagcacgcctgagcaccccaggacctgcgctcaggtgagatgcgctatgccttccttcctggggctcttggtggtgacagacatggggcggggactagggcgctggtgcatcccagcagctcggaacttctctggacctgagtag

SEQ ID NO: 38884 - DNA, 2300 bp, Homo sapien
taataataataagtgaaaaggtcaaaaaaggacttggaggctgggcgtggtgcctcatgcctgtaatcccaacactttgggaggccaaggcgggtggatcacctgaggtcaggagttcgagaccagcctggccaacaaggcgaaaccccctgtctactaaaaatacaaaaaattagccaggcgtggtggcgggtgcctgtaatcccagatactcaggaggctgaggcaggagattcctttgatgtcgggaggcagaggctgagatctcaccattgcactccagcctgggtgacggagtgagactgtgtcaaaaaaaaaaaatttaaaaaggacttggagacagagaagggcagcagagtgcatagagcaagaagagagcaggagggatggagacttagccaagaaggaaggaaattgtttgggatgggtgaggggagtctgaaaagggaagggaagtggctcagagcagtggcttgaggggagaggaggagaggtggatggtgggaaggaggtgcagtggagatcagggttggacatgaggatggaggaggcactcaccggagcctcggacatgagcactgggtgcaggtttggctcagacttgacgtgtttgctgtaggtgtgatccaggatggctcggaagcactcccagtcctcgactggggccagaagagcagcgtgcagagacgcaagaaggcaggcaggggacagggacaggaagaaaaggagggagaaaggccaagcccaaaggagggtcagtgagtccagctccaggggaacgccccccttcccagaaacctggtgggcccctgggaagggaacccagcgagaagaaccctggcagccagaagaaccctggggctgcaaggaagactccgcggggagtgggggctgctatgacccagattgtggggagcgggctccttttctgtcaggaggtgatgggtgggggccccttactcatgccattcttgaggggcgacatgacctccgctccatcccgaggcacgtgcagggcattggtgtcgatgtggaagatcttccctttcttctctttgtccccctccagctccagcccgcccccctcctccgcggccagcagccccactgtggtggggaagtcagcctggtggggaagggttgggggagtattggcagggagagaggtcaccctcttgcccctgtccagccccacagcagggtcctcagaccgcccctgggtttattcccatattcccgctcagcagagcttctgggcgatctgggagagccctgggtcactggaaagcctgaagaagggtccgaagcccctaggatttggagaggagactggaaggctcaccttgggacagtcctccccagcgtacccagcgcggactgagaaggagccaatgtcaaagaccagcgcccccacctcatctgtgcggggagacaggcctgtaaggggacctcccccgaactctctcccgctaggtagctccgagagaaagtcagggcagagccacagtctcgccactttcaacaccagtctggggccggtgggagctgggcctggagtccgaggtcctgggactgggggtgggggcatcacaccgccagggtcccttcttgcccaatggccttgctcagggcaccctcccgacgggaaaggaaggggcccggggccaggtggaggtgggttgcaaggtagggccctgtgcgcgcggggcgtctggggaggaccgagcgcaggggtggcgggagacccgagcctgagactcgacccgctcgtgcgcggaggtgacaggccccggggtgcccagagctcggatggatggcgcgggtttggaacgcagggctgcgggagccgggggcccgaggctcgctcacctccgccgtagacgcccccgctcatagtgcccgctgcgctgctagcggcccgtgggcggtggcgggatcagcaccgaggcggccggacagctcccgggatccctggcggggcgggactctcagcggccaattgggaggccggatcccccgctccaacggcgccgccgattggctgccaggcgagacaatgaccgaccgggggcagctgctttaaaggggaagatacactctattaagcggccaggaggagatggggcagggggcacctagcagggacttagagaccgtcgctaaggaactggcggcagagaggagagcagggaagaggcggagaccaggactctgcaggacgactgatgaggtccctatccccttgctttttatttttatttttatttttatggtagagacggaggtcttgtgatgttgcc

SEQ ID NO: 38885 - DNA, 2300 bp, Homo sapien
aggctgaggcagaagaattgtttaaacccaggaggcagatgttgcagtgagttgagattgcgccattgcactccagcctgggcaacagagtgagactccagctcaaaaagaaaaaaagaaatgtaagcactttaagagatccactcaattcttccagacctcaatggactgacctagggtcactttggaaaaatctcactctcccagctcctgagtcggccctctcccctacagctcaccactcctgctgaaacctggaccctttcagtcttagaagccaagtctgaacttggaaccaaccctaggcattgaaatgccaccgtcgtcagtaggtaatccatgagccagctaaagccatctgtcctttggccggggaggggtggagtctcttccagggtgggcatgtggtgagcagagaaccttcaggggcacgcggacctcacatagtatccacttcctgtgctatctctggtctcaaagctccctcgcccccaaacaagtagatgggcatagtcaacacacacaagcattcagatgtgcatatgtacacacatgcacccatatgccaacacacatagacacatacatacagacacacacacaccctcacataagagtccctcacctaccccaagttgtcagagctgctcctttgcctttgctaccaaaactgtggtactgggagcccagaagaacctgggatccaagcagtagaaaaccctgttgttagccaggcgctgtggctgacacctgtaatcccagtgactgaggaagccaaagtgggaggatcacttgaggccaggagttcgagaccagactgggcaacatagttttttcttaaaaaaaaaaaaaaaaaaaaaaaagccaggtgtggtggtgtgcacctgtaagtcccagctactcaggaggctgaggcgagaggatcacttgaacccaggagttcaaggttacagtgagctataagtgtgccactgcactccagcctgggtgacggaagaccctaactcaaaaagaaaagaaacaaaaaccctcttgttgataaatgcctcctcaggagaacaggcgctgaagagagacagatggagaaaggaagctaaagccagatgggctgaatgcctgtgtgtgaacgtatgtacacatgtgtaagcatgtgtacacatgtataaggcctaggtactgcggggggtgggggggaaagcaaggcaaggaaaaaaggggccaacgaaagacaaaggagggaagttggacacggtggctcatgcttttaatcccagcactttgggactttgaggccaggagttcaagaccagcctgggcaaggtagcaagacccagtctcttaaaaaaaaaaaaaaggtaaaaacagagagagatggagacacaccccctttggtccctctctcaatcttcccttccctccctctcccggtgattccatttagaccttggtgattccatttaggcctgggtgtggcagaaccgggctcagagcagcctgaagatagataacccttctgggaactggacctctctccccaatcctgctttaaaaagtaagggggtagaggtcgggcgcagtggctcacgcctgtaattctggcatttcgagaggctgaggtgggaggatcgcttgaggccaggacttcgagatcaacctgggcaaaagagcaagaccccgtctctataaaaaatttttttttaatccaggcgtgctggcacctgcctgtaatcccagctacttgggaggctgaggaggatcgcttgagctcaggagttcgagaccagcctgggcaacatcacaagacctccgtctctaccataaaaataaaaataaaaataaaaagcaaggggatagggacctcatcagtcgtcctgcagagtcctggtctccgcctcttccctgctctcctctctgccgccagttccttagcgacggtctctaagtccctgctaggtgccccctgccccatctcctcctggccgcttaatagagtgtatcttcccctttaaagcagctgcccccggtcggtcattgtctcgcctggcagccaatcggcggcgccgttggagcgggggatccggcctcccaattggccgctgagagtcccgccccgccagggatcccgggagctgtccggccgcctcggtgctgatcccgccaccgcccacgggccgctagcagcgcagcgggcactatgagcgggggcgtctacggcggaggtgagcgagcctcgggcccccggctcccgcagccctgcgttccaaacccgcgccatccatccgagctctgggcaccccggg

SEQ ID NO: 38886 - DNA, 2300 bp, Homo sapien
tcttttgtctttctttcttcttcttgagtcaaagtcttgctctgttgcccaggccggagtgcagtgagtggtgtgattttggctcactgcaacctccgcctcccgggttcaagcaattctcctgcctcagcctcctgagtagctgggattacaggtgtgtgccaccacgcccagctaatgtttgtatttttagcagagacggggtttcaccatattggccaggcttgtctcaaactcctgacctcaagtgatccacccgcctcggcctctcacagtgctaggattacaggcgtgagccccatctcgttctttcttatggctgcgtgttttgatactttcaaattacaaggactcagtgaaggctattcgttgccttgaacttcccaaagcatttccacaatcgatggggttctcagtaagaatccgggacttggagggcagatgctgtcaacatccccatttaacagatgtggaaactgaggcctagacctacgttcttgtccctttacaggcaaggtccctggaggaaggggttcatctagaggctcatacagataaactggaatgtacagtaaagttttggctgcctgggttcatatctaaactctgcagcctcaggtctctttccactattagaaaatggggagaaggctgggcgcggtggctcacgcctgtaatcccagcactttgggaggccgagacgggcacatcacctgaggtcaggagtttgagaccagcctggccgacatggtgaaacctcgtctctactaaaaatacaaaaaaaaattagctgggcatggtggcgggcgcctgtaatcccacctactccagaggctgaggcaggagaatcgcctgaacccaggaggcggaggttgcagtgagccgagatcatgccactgcacttcagcctgggcgacagagtgagaccctgtctccaaaaaaaaaaaaaagaaaagaaaagaaaatggggagaatgttagcacttaatttcccagtattgtgagacttaacatatgtcagcctgggcagcatagcaagaccccacctctaccaaaaatttaaaaattagctgggcatggtggctggggcacgcctgtggtcccaggtactagggaggctgaggcaggaagatcacttgagccgaggagattgaggtggcagtgacctacaatcgcgtcactgtactccaattaaaaaataagtgtcgggccaggcgcggtggctcacgcctgtaatcccagcactttgggaggccgagacaggcagatcacgaggtcaggagatggagaccatcctggctaacaccgtgaaaccccgtctctactaaaaatacaaaaaattagccgggtgtggtggcacacgcctgtagtcccagctactcaggaggctgaggcaggagaatcgcttgcacccgggcggcggaggttgcagtgagttgagatagcactccagcctgggcgacagagagagactccgtctcaaaaaaaaaaagtgtggctctcaataaatgagttgttatttcagtggcaagccctgaaagggggtctacaaaggcccagtgggcgaggctgaggaaatgcctggacacgacccttctcatggcattcccggggcgcccgcatcagcccctacccactcccgctcggggactttctcggaatcgcgcttcttcttccagcagcctcgaggccggccccgtccaggtctctttagctccgccccctggtgaggggcgtggcctcctcagggccggggcgtggcccaaccgggaactggggcgtcgaactccccttcccagtctggagccacccattccaggcggggcgggaggctgatcacgtgaccagcgagcggtctcaccctcctcatatgccagtaccacctcctccagtcccagaggggggatgtcttactcctttccgtgaagcaaaccctttgagtacggtttgcgtccacaaagcgtagggtgagaaccttgggagcgactgggcccgtctttgctccctcggtggggttttgtctcctggcttcccccaagtgcgaggcagttggtctcgcccagccgggtcctgggcgcggcggcggcagccgcgtcactggcgggcgggatccctccgctctggggaggcagcgctggcggcggggctggggccactgaggaaatccatccgcgccgccgccgccgccgccgccgccgccgccgccgcctccgccgcggaggaagacagcgccgcccgcgcaccgccagcgacctccgccgcagagtcccaccgccacaggtaccttcgctggcaaaagga

SEQ ID NO: 38887 - DNA, 2300 bp, Homo sapien
gggtctacaaaggcccagtgggcgaggctgaggaaatgcctggacacgacccttctcatggcattcccggggcgcccgcatcagcccctacccactcccgctcggggactttctcggaatcgcgcttcttcttccagcagcctcgaggccggccccgtccaggtctctttagctccgccccctggtgaggggcgtggcctcctcagggccggggcgtggcccaaccgggaactggggcgtcgaactccccttcccagtctggagccacccattccaggcggggcgggaggctgatcacgtgaccagcgagcggtctcaccctcctcatatgccagtaccacctcctccagtcccagaggggggatgtcttactcctttccgtgaagcaaaccctttgagtacggtttgcgtccacaaagcgtagggtgagaaccttgggagcgactgggcccgtctttgctccctcggtggggttttgtctcctggcttcccccaagtgcgaggcagttggtctcgcccagccgggtcctgggcgcggcggcggcagccgcgtcactggcgggcgggatccctccgctctggggaggcagcgctggcggcggggctggggccactgaggaaatccatccgcgccgccgccgccgccgccgccgccgccgccgccgcctccgccgcggaggaagacagcgccgcccgcgcaccgccagcgacctccgccgcagagtcccaccgccacaggtaccttcgctggcaaaaggagtcctctcgccccccagccccaatttcccccaggggaacctctcttccttcggtctcccggggctggcctcctgggagcggacgtaactccccagacctccgctcccttcccctcttgcccggtcgctcccaaacccggaaggggaactggggaaccctcgccccccaccgtgcgtgcgcttccccgcaccatcagcgaagtttttgcccgaccccagaccccagcccagccccgactgcctcttgctccctcggaagttggggggctaaattccgggcttcctctaggccccgccccgccccctttccccaccgccaccctcccgcctgcccccggggagcacccctcgtgtcctccactgtcgcacccctgccggccctcgccttgcacaactccaaaatcggggagaagcaggcaaggccgcgcgccacccttcctttcgtctccaccctacccacgatttgggtgctgcccgtggtttctggccccactcgccgaaactggagccctcggcgccctattccctttacagatcctcaccccaagcccagctcccaggcgcccgccccccgcccagctttcttttaggcaaaatggaggtcgtaggggctggagggccaggcccactgcgcttcgcagcgccgcaccagcccgcgccttccagctgccagatccagggaccctcccgtcactctcctgagccccgccagacctgcggaggcggttgcaccctcatttctctatggagcgccggctgctatatccctagagtctgggggctgctgagggccctggggggtgatggggaccgagggctgagaacgtcgcccccgcccccagtttcttcctccagccgtgcttccttctgccctgggcctccggcggtgccgccaggcctgggctgctagtaggtggaagaggctttgtgcgggcctgggggttgggtagagtaaggagttctgcccgcaccccccatcccccgattttgagggtcaccccttggcactggcgtagaaagctgaacttacaaggaggggaaatgtcagtggggaagaggaacgccctgcgcctgggggaagtgggagctgggtgggggacgcctgggccggccaagtgcagtgtgtacggccggatcgcacaggtgtcccgcgggcggggaaggactcaggctcccggagcggagccagccgggcccctggggcccgggcgccgagcctgcgggctgggccccccgggtgtccagggcgccgcggccaggccgcctggggccgcccgcccgcgcctgggagagagcacctccgcgcctcggggccggggacctcgttgcggagccgtaattactcgagagcggctcccacgggctttctgcgggcgcggcggggcgggcggtccctgcgctggagggagcagcggctcggggctgccttccccgccgctgtcacccccacccgcggcggacggctaatggggcgcagccggaccggggattatccggggtgagccgtccagaacctattagcgcccaatcggcttttcccaa

SEQ ID NO: 38888 - DNA, 2300 bp, Homo sapien
cctggggggtgatggggaccgagggctgagaacgtcgcccccgcccccagtttcttcctccagccgtgcttccttctgccctgggcctccggcggtgccgccaggcctgggctgctagtaggtggaagaggctttgtgcgggcctgggggttgggtagagtaaggagttctgcccgcaccccccatcccccgattttgagggtcaccccttggcactggcgtagaaagctgaacttacaaggaggggaaatgtcagtggggaagaggaacgccctgcgcctgggggaagtgggagctgggtgggggacgcctgggccggccaagtgcagtgtgtacggccggatcgcacaggtgtcccgcgggcggggaaggactcaggctcccggagcggagccagccgggcccctggggcccgggcgccgagcctgcgggctgggccccccgggtgtccagggcgccgcggccaggccgcctggggccgcccgcccgcgcctgggagagagcacctccgcgcctcggggccggggacctcgttgcggagccgtaattactcgagagcggctcccacgggctttctgcgggcgcggcggggcgggcggtccctgcgctggagggagcagcggctcggggctgccttccccgccgctgtcacccccacccgcggcggacggctaatggggcgcagccggaccggggattatccggggtgagccgtccagaacctattagcgcccaatcggcttttcccaaatcctgtaaacagccacccgggccggttctggggagggcgggaggctgggtcgggcgggggcgatggggccgggggtggggtcacccaccctacaggtctctgccgtggatgcggttgccttggcaacggggctagggtgggggcatttcaccaatgaggtgctctcggtccgggtgacggttgcctaggcaaccccacgaacagcccagctttcccctctggtctctccccccacccgccaccatcgaagctgggggtgtgtgtggagggtgtgcgccttgtggggtgaatttcaagaggcaccgccccttttaaaattaggtgcttggagggcggtgcctgtgcgggctggggcagaagccaggtctgttttcgaagggacacccccgccccccccgccccagttcctgccgcgggtgtcctgcccgggctgtgtccgagggaggggtttcccctgcgcttcctcttgcacttcccgctccgtttccggggggcgggaggaagattggggaagtcggctcttactcggcgacgtctctggtgccggagaccctggttgtgcccggggacggcggccgcgccgccccttccccctccccttgcttaccccttccgggccgcgctgcaaccccgcctttctccccacttccccggcggcctcgggcctgacgtcagccctgcatcccccaggcctcgggccagcggccaggagctgcctcccccagcccccgtcccgcggcccccagccgcccccaaccctgccccacgggcccggcgccatgagtgagctggagcaactgagacaggaggccgagcagctccggaaccagatccgggtgagggcctggtgcggggcgggcgattcatgtgtacaccgcccggtgccctggaccgggttgggtgagggtgttggtgggggaagggggagggagggccccttaatggctcagaatctgaccctgtccactcctgtcttctgttctcttctctccctttcctccccaacctgtcttctctcgcgtctctctggctctgccatcccttacaggatgcccgaaaagcatgtggggactcaacactgacccaggtgagggcacttggtggccagagcgtaactaggggttgaaggggcaaggatcagaggccgctgccctctgcagtcctgctgcctgggcctccccgagcgcattctgtctctacctccagatcacagctgggctggacccagtggggagaatccagatgaggacccggaggaccctccgtgggcacctggcaaagatctatgccatgcactgggggaccgactcaaggtgtgtgtgtgtgcgcgggctggcgctgtgggccgactttctagcaggccgtgggagcagcctcagatctggcggagtaagcaggccaccaaaatacccagcgtacgtctggaaaaacggtgactcccagacatgtccgccagacctggacaggcaggaccatgctggtgagaacttgtgggctgcagctggagactgtctctcaggtggctcacgcctgtaatcccagcacgtgg

SEQ ID NO: 38889 - DNA, 2300 bp, Homo sapien
atgttcctgccgcgtctggcagcgtggaggcgagggtcagggcaccgcattccctctgccattagttgagttgacccaagtgaagtggtggactcggcctaagggagtgtgacccgcggttccagccacactcaagggcttgtgctaactcgcgtggcaggcccagcccttggttctgaactctggccatctccctcttctaggtgggaaagagctgaccccactgcctcctcaggaggagaagtccagctccccatccccactgcccaccctgggcccactctgggggacaaacggggatggggacgaaactgcagagaaagagcccccagcggccgaaggtaggaagggaggatggcctacctcccgggtgcgctggggctgtgggagaaagtgctccccactcgtgggggtgggcacacagggcattcacattgaggagccatggcaagagcgtggtgttctggagtgagagtaggcgaaagctatcttgtctcctccccgcccttctttccacctcctatctcatgccttccagatgatattcgggggatccagctgagtcccggggtgggctcctctgctggcccacccggagatctggaggatgatgaaggcttgaagcacctgcagcaggtgtgggggcctgagaaagcgggagggacccttcccacttctgacctgacctgcttggccccagccccggccccagctcaagctccatccccatccccatcctgatgttgctgagattggcagctgagcctttcttctttttctgggcatccaggaggcggagaagctggtggcctccctgcaggacagctccttggaggaggagcagttcacggctgccatgcagacccagggcctgcgccactctgcagccgccactgccctcccgctcagccatggggctgcccggaagtggttctacaaggacccacagggcgagatccaaggtacctgtgtgggatgggagggctgctcaaggccgttctggttcagggtgtctctggcataccctgtgaccccagtggttctcccgctccctcgctccctgtccaggccccttcacgacacaggagatggcagagtggttccaggccggctacttttccatgtcactgctggtgaagcggggctgcgatgagggcttccagccgctgggcgaggtgatcaagatgtggggccgcgtgccctttgccccagggccctcacctcccccactgctggtgagccgcttctcccctgcatggagggacagggtgtgaggggtgccggcaggagtccagcagagtcccctcctccctgctgggggcactggccgagctctcacctgagcagggaaacatggaccaggagcggctgaagaagcaacaggagctggccgcggcggccttgtaccagcagctgcagcaccagcagtttctccagctggtcagcaggtatggggggcctggggtgggctgggagaaggcccggcgctggctctgtggcccaccatctccactgtcccatttgcagccgccagctcccacagtgcgcgctccgagaaaaggcagctctgggggacctgacaccgccaccaccgccgccgccacagcagcagcagcagcagctcacggcattcctgcagcagctccaggcgctcaaaccccccaggtgcgtggtgcgtgcgagccctcaggatacagggtgggggggggatgggggcagaccagagatggatttggggtcctaagaatccacaatttgctcctcagaggcggggaccagaacctgctcccgacgatgagccggtccttgtcggtgccagattcgggccgcctctgggacgtacatacctcagcctcatcacagtcaggtgtgtggcctgactggtccccacccccaaggcagtctccgggtgaaatggggtctggggtctgctccccacccccacacgcccctagctgccattctggctggggagcccactgctgcggctggactagatcagtgggcccaagtgcccacctgcagccgcctctgcccccctgccccctgcaggtggtgaggccagtctttgggacataccaattaactcttcgactcagggtccaattctagaacaactccagctgcaacataaagtgagtgggcatcctggggctgaggccctgggaatgaagggtggaccgaggcaggccccaggctgtcccctgcagctctcccctctgatgggccactggtctcagttccaggagcgcagagaagtggagctcagggcgaagcgggaggaagaggaacgcaagcgt

SEQ ID NO: 38890 - DNA, 2300 bp, Homo sapien
agcgattctcctgcctcagcctcccgagtagctgggattagaggcacctaccaccaggactggctaatttttgtatttttagtagagacagggttttgccacgttggccaggctggtctcaaactcctgacctcaggtgatctggctgccttggcctcccaaagtgctgggattacaggcatgaaccaccacgcctggccactttttcttttttaaaaaatgtttagaattgtttctgtagagtcgtggtcttgttctgttactcaggctggtctcggactcctctcttcaagcctcccacagtgctgggattataggcataagccattgtgctggccaggtggtcccttttctgttctactctctcccaccctcatgcctccaggatgagcttctggccttctagaaggaatgaactggaggaggcccaaaatggcctctcctgaggctgatttgaaggaatgtggggtgtttttcttggagtggggaaaacttaggtatgcggtggttatctccagataccttttgttccctaaagcttttttaaaaaaatgattattgtggtaaaatatacaacaaaatttggagactttaactgtctctaattgtgccattctgtgttactaagtacactcacattggtgtgcggccatgaccaccagcggccccaggatcccctcctcagttgaggctctggacccttcagcaacagctccctgtcccctcagcccctggtggctgcccttctaccttcctccctcaatgagtgactgctctagagacctcatgaaagagaagtaaggggtagctctccttttttggctggtgtgtttctcttagcgtgatgtcctcaaggctcatccagtccccagattgctctaggtggccacctgcagtcagtgacaggctggtggcttttcatgtcatggaacacaccaccactggagcatccagccgaggcagaggaaggagaggtcccaggggaggccagcctggccttgggttgcctctgagcccggtgtttccccctggagtgcctggactctgagcaggcctcggcttgtcatgggctgctggctcagctggggctgatggcctttcctcctcagcaccctggttgaacccgcttcctcttctttcccagactgtggcgtcctggagttgatgggagctgcagcaccaagccgggccagcctccctcccagccagtgacaacaccgcagcacctggaccccgcccacccgcttgagtcctctgcctggggccccagggatgcgcctcctcctgaaagtcccctccatcctcccttagaggaacaggctgccgccgcgcccccatcagcctccattgccctgaccttatttccacctgatggtgccagaggctgcttcccagctggtatcctgagatcctcgttcccttggtggcttggttgtttaagcctccattattgattgggggcggtggtctgggtgtgattcctgtgggggaaaccagcccgaggtgccttggctcaggcttgcctgcctggagtccttgtcgtgtacccgtctgtggccctagagtcacctcctgctccttttcactgggtttctccccagaccaagcccctggatttgagcttctgagcagccaactgatttttttcatgagggaaagaattttgctcctagatttatttctaatccttttctccgtaactgaccttttctctgtaagctatttgtggctctagtgggtttttgtttgcttgcttgtttttgttttatctttgccctgaacgtccatcctggcctcggctgcctccctccccgagttcttcactacacctcctgtctcagcctcccagagagggtggcgagggtgctgatgcccagagacaccatccggcgaatggacctctcctgtcatgcggggcagggcagggctgccggcagagccatgtcctgaaccctccctcctcccccctgctctccttaagggtctttcccagatgtgaaggtccctcccaggctctactgaggtcagaccaattcccagtggcttgggtaccctcgttcactccagcaccagcccctgccctccttcttcccgggccaggctgccaggtgagccccgggccaagggtggttgccctgctgaggccgaaaggactcgagcttcccatctcctcgcctcccccaggtctttcaccgtctggactcatctctgggtaactcatggtgtgagtggccacgtggctggctcaggtgagtccttttagaccccaggtgacccaccagctagtccggggcccattg

SEQ ID NO: 38891 - DNA, 2300 bp, Homo sapien
tgcaatagacaaacttaggcagtttttcttaaaaaaaaaaaatctattcttttctcaaagattttctcctggcaggatttcagatttccctcgtgggacagtgtaattagggaatgatgtccctgctgttcagagaggagaatgacccagcgtgcacacacctgccttcccttgccttccccttggcccagtagacccccaagggctgtgcccatgctcgtggcgcagaggagggtgtctcagcactggcgcacttggtatctggagtcacatagctcttggctgtggggctgccctgtgcaccccctgcccagtggtgacaacccagaatgtctctagacttggccaagagccccctgaggagcagaggtgcccccagtccagaacctgttggagggtgggagccccatggtggcctgcaggtgtgccactagttcctttagtccaaggaaggggccaggcaccatcagcttccggcaccagaccctgctgtgggggtgcctagagagttaacctcactctcctggtttcttcccaagaaggcgggtggcatgggctttttcctgctctgggcctgctctctcccctgtcttggtgtcgctgtcctcagtctgcatgaaccattccccctttgtgtgccccttgcagccaagacacagccaggatgggtgacttgagccggaggcacctaggagagctgcccttgctgcgcctggcagggggcagtgtgaggccatcgctttaaatttttttttttttttttttttgagacagagtcttgctctgttgcccaggctggagtgcaggggcgcaatctcagctcactgcaacctccgcctcctgggttcaagcgattctcctgcctcagcctcccgagtagctgggattagaggcacctaccaccaggactggctaatttttgtatttttagtagagacagggttttgccacgttggccaggctggtctcaaactcctgacctcaggtgatctggctgccttggcctcccaaagtgctgggattacaggcatgaaccaccacgcctggccactttttcttttttaaaaaatgtttagaattgtttctgtagagtcgtggtcttgttctgttactcaggctggtctcggactcctctcttcaagcctcccacagtgctgggattataggcataagccattgtgctggccaggtggtcccttttctgttctactctctcccaccctcatgcctccaggatgagcttctggccttctagaaggaatgaactggaggaggcccaaaatggcctctcctgaggctgatttgaaggaatgtggggtgtttttcttggagtggggaaaacttaggtatgcggtggttatctccagataccttttgttccctaaagcttttttaaaaaaatgattattgtggtaaaatatacaacaaaatttggagactttaactgtctctaattgtgccattctgtgttactaagtacactcacattggtgtgcggccatgaccaccagcggccccaggatcccctcctcagttgaggctctggacccttcagcaacagctccctgtcccctcagcccctggtggctgcccttctaccttcctccctcaatgagtgactgctctagagacctcatgaaagagaagtaaggggtagctctccttttttggctggtgtgtttctcttagcgtgatgtcctcaaggctcatccagtccccagattgctctaggtggccacctgcagtcagtgacaggctggtggcttttcatgtcatggaacacaccaccactggagcatccagccgaggcagaggaaggagaggtcccaggggaggccagcctggccttgggttgcctctgagcccggtgtttccccctggagtgcctggactctgagcaggcctcggcttgtcatgggctgctggctcagctggggctgatggcctttcctcctcagcaccctggttgaacccgcttcctcttctttcccagactgtggcgtcctggagttgatgggagctgcagcaccaagccgggccagcctccctcccagccagtgacaacaccgcagcacctggaccccgcccacccgcttgagtcctctgcctggggccccagggatgcgcctcctcctgaaagtcccctccatcctcccttagaggaacaggctgccgccgcgcccccatcagcctccattgccctgaccttatttccacctgatggtgccagaggctgcttcccagctggtatcctgagatcctcgttcccttggtggcttggttgtttaagcctccattat

SEQ ID NO: 38892 - DNA, 2300 bp, Homo sapien
aaaccccatctctactgaaaatacaaaaattagccgggcgtggtggtgcacacctgtaatcccagctactcaggaggctgaggcaggagaatcgctttaacctcagaggcagaggttgcggtaagctgagatcgtgcctctgcactccagcctgggcaacggagcgagactccgtctcaaaaaaaaaaaaaggaatgaatctctggaaactagcaattagagccagacctccctaggaccaaggagacaggagttggagaaaaagacactacaggtgatgcccacagtctcaagcactgtggcatatgcttgacctcagagcattccagtactcaaggtcaagtgtggcaccatccgtatatcctgtcatcgcaaatgcccgcaactgctacaattaacaggatatgggagagaggaggcacatcatgtgaggaggaatgaatcgctcccaacaattatgtgaacatttcgaaaatttctttttttttttttttgagatggagtctggctctgtcccccaggctggagtgcagtggcgcgatcttggctctctgcaagctccgcctcgtgggttcacgccattctcctgcctcagcctcccgagtagctgggactacaggcgcctgccaccatgcccggctaattttttgtatttttagtagaggcggggtttcaccgtgttagccaggatggtctcgatctcctgacctcgtgatccgctcgtctcagcctcccaaagtgctgggattacaggcgtgagccaccgcgcccggccaacatatcgaaaatttcaataccaaggattaacttctaaaatacaactttatatgctagtgcatgcccgtagtccaagctgttcaggtggctggggcgggagaattgcttgagcccaggagttcagggctgcagtgagccgtgttaacgccactgcactccagcctgggtgacagagtaaggccctgtctcaaaaaaatgaaataaactggccgggtgcggtggcgtgcgcctgtaattccagctactcaagaggctgaggcacaagaatcgtttgaacccggtaggcagaggttgtagtgagctgagatcacaccactgcagtccagcctgggccacagagaccctgtctcaaaaataaatgcatgcaagtttgtagacagaagctatacagctagccattcaataaaatgcatgtgcaatatggtggagctgttgtgaacatccccatttgaatgctgggcaaacagagtagttcaaggtccccagtgcagcaggtcctactcatttcagaagggaactctgcagaaactatgcccatctgggcagagcccccactccactggcctgagagccacgaatccggcgcgcgtcctccccaccttgcccgccagggggcggcaagtccctgatccggggtcgcctgctgcagagctggtgggagatggttgaggggcgtgggtgggtcagcgttccttggggacccgtgaagcctgggcttagggctcacagcgtgggtccccagcacagacaggaggcggacagcttcccgtgaactgcaggggagtcccgggacgctgtcctccagcgaggtggggaccggctatgtccctcagttccccctcggtcctcgggccacagggacattagactagggggtcagttctgccagccctgcccaggcctcttctgaccagaggagctgcgacggacgcggagttcaggccccttggcgaccgcggtctcctgaactcggccccttccctgctcccatggggaagaaccctgcccctagaacagcctcccctccaggtgtcttccctacgctacccctccgccggccgggaactccgccaggcctagagacgccgacccggccctttctagctcctccccggctcggacctggttcccgccctcggccgcccgccagttcccgaggcgtacacgtgtagatcccgtcacgcccggaagtctcgcgtttctcaaacgcctcgcgcagtcgcccttgcgctcagggaaggggcggggcgaacggaagccgggaaggcgattcatagctcgcggggtacgggcgcgcgtgcgcactccgcagcccgttcaggaccccggcgcgggcagggcgcccacgagctggctggctgcttgcacccacatccttctttctctgggacctggggtcgcggttacttgggctggccggcgaacccttgagtggcctggcggggagcgggcctcgcgcgcctggagggccctgtggaacgaagagagtaagcacgggaggggcggcggaggggcgcgagttt

SEQ ID NO: 38893 - DNA, 2300 bp, Homo sapien
tattgtaaattcttatctctgtatactgtacttctgcatacaaatgtactgtacttctacatataaatgttatgttaaagaattaattcatccccatgtgaccatctcacctcataatcaaatgaccctaaatccctcactaacctacccccgccctcactaaacttaataataaatgatggtacatctggtgcattgttgacaccacgggaccagaaggcggtgaccccccggaccagctttcactatcttgtgtgtgtctattatttctcaacctgctgatccgcctgggaacaaagagagagccctgttgcattgcgggctgctggccagatcccgcaatactcacctgactctccattcactttgctgaatcgacaatcccccacccacctcatacctcttcccattgatgtcctaccccccttcaaggctgaggtcattgtcacctcctccctcaaatctttcttgatttctcccggctaactcttacagctcagatctacacattccagtctttttttgtttttgagacaggctctcactctgtcgcccaggctgcagtgcagtggcacgatcatggctcactacggcctcgaactcctgggctcaggtgatcctcctgccttagcctcctgcatatttgggactacaggcgtgagccaccacacctgactaattattttttatttatttatttattttagagacaaggtcttgccatgttgtccgggctggtctcgaactcctgggctcaaaggatcttcctgccttggtctcccaaagtgctgggattataggtgtcagctgcggcgcctggacctttcctgtcttttatgaaacctgaatgggataggctggtagtttcaccacacccatttgacagatgaggacattgagggctcaaggacgaggccactttctaaggtgtgagagaccagctagtcttggtctcctgctctgggaatctcactcctctggctcagggtttccagaagccataaaaccttagctgtaaatcccagcccccatcactcttggtgttagctgtatttcagtgttcttaagaactcagcaatgcagcctagctaacctacaccacaggtcaaataaacagatgtcaaggtgcatgtgtgtcctgcacaatggactgtgtgctctgtgcactaaaagttaagtgtctggggtgggggctgggtgcggtggctcacgcctgcaatcccagcactttgagaggccgaggagggtggatcacctgaggtcaggagttcaagaccggtatgggcaatatggcaacaccccatctctactaaaaatacaaaacatagccgggtgtaaaggtgtgcctgtagtcccagctgctccagaggctgaagcaggagaattgcttgaacccaggaggcagaggttgtagtgaacgggagatggcaccactgcactgcctgggcaacatagggaggctacatctccagaaaaaaaaaaaaaagttaagtgtctgggtttgcagagtactagacggtgaggagtgaggtggggaggaagaaccccaaatttcttgccctatttgcccccatcaaattcctcaacatggtcaacattgtttctagaacatgtcctgggattgtgggaagggagaccactcatttgcccctccctaaagcttctgggcttccagacccagctactttgcggaactcagcaacccaggcatctctgagtctccgcccaagaccgggatgccccccaggggaggtgtccgggagcccagcctttcccagatagcacgctccgccagtcccaagggtgcgcaaccggctgcactcccctcccgcgacccagggcccgggagcagcccccatgacccacacgcacgtctgcagcagccccgctcacgccccggcgagcctcaacccaggcgtcctgcccctgctctgaccccgggtggcccctacccctggcgacccctcacgcacacagcctctcccccacccccacccgcgcacgcacacatgcagataacagccccgacccccggccagagccgcagagtccctgggccaccccggccgctcgctgcgctgcgccgcaccgcgctgtcctcccggagccggaccggggccaccgcgcccgctctgctccgacaccgcgccccctggacagccgccctctcctccaggcccgtggggctggccctgcaccgccgagcttcccgggatgagggcccccggtgtggtcacccggcgcgccccaggtcgctgagggaccccggccaggcgcggagatgggggtgcacggtgagt

SEQ ID NO: 38894 - DNA, 2300 bp, Homo sapien
atgatccaattacatacctactgataaatatttatcataacttttcctattgtaaacaatgttgcaattaatatctttgggtatccgcaaatttgtgcaaagtgcatgtatttctgtagcaagtttcctagaaatgttaggtcaaagatatgcacatttgaaagttcaacagtcattgtcaaatgccttctaagaagttttctggccaggcactgtggctcacacctgtaatcccaacactatgggaggccaaggtgggtggatcacctgaggtcagaagttcgagaccagcctgaccaacatgatggaaccccatctccactaaaaatacaaaattagccgggtgtgatggcacatgcctgttaatcccagctacttgggaggctgaggcaagagaattgcttgaactcgggaggtggaggtttgcagtgagctgagattgtgccattgctctctaggctgggttgactcctcccccaaaacaaacaaacaaaccaaaaaacaaatgccttctaagaagttttcaccggctgggcacagtggctcatgtttgtaatctcagcactttgggaggctgaggcaagcggatcactggagcccaggagtttgagaccagcctgggcaacatagtgagaccctatctctacaatacaagcaagcaaaaaaaacaaacagaaattagctaggcatggtggcttgtgcctgtaatcccagacaccccgggaggctgaggtgggagaactgcttgagcctgggaggttgagactgcagtaagctgtgacggcaccactgcactccagcctgggcaacagagtgagacgctgtctcaaaaaaaaaaaaaaagttttcaccaacattctttttttgttttgttttgagacagggtctcgctctgttgctctggctggagtacagtggcttgatcatagctcactgcagccttgaacgcgtaagtcctcccgcctcaacctcacaaccagctgggacctacaggcacatactgccatgcttggttaatttttaaattttttgtagagacagggtctcactgttttgcccaggctggtctctagcctcaagcggtcctaccatctcggcctccaaaaagcacttgggattaccagcatgagccactgcacctggccaccaacctacagtcttatcatcactgagttcgtatctacctgcatcctgtccaatactccgtactaccaatctttcaaatttttgtcggctgggcacagtggctcatgcctgtaattccagcactttggaaggccaaggcaggcagactgcttgagcccaggagtttaagaccagcccgggagacatggcaaaaccccatttctgcaaaatatacaaaaattagctgggcttggtggcatgcactggtagtcccagctactccagaggctaagatgggaagatcacctgaccccgggggtttgaggctgtaatgagccaagtcatgctgctgcgctccagcctgggtgacagaacgaggccctgtctcaaaaaaaagaaaaaaaaatttttttttggtcaatataagagtcatagttttgattagcatttcccttattactagtgaagcagaacagcttttcaaatgtttgctgcctgtttgtatctcttcctctgtgacttatctttctccgtgatttgccagtaggcatttgcagtcctttttttcttttttttttgacttggagtctcgcgatctcggctcactacaacctccgcctaccaagttcaagtgattcttgcgcctcagcctcctgagtagctgggattatgagcatgtgccaccacccctagctaattttttgtatttttagtagagatggggttttgccatgttggccaggctggtctcgaactcctgacctcaagtgatccacccgccttggcctcccaaatgctgggattacaggtgtgagccaccacgtccagccgtttgcagtccttccttcacctaactctccagttgccactgttgccagttatagaattttaggtttgaaatggttttctgttggaattctgcagacaatgttccactggctcttagactccatggttgctattgaaaagctggatgccatgttgatttctgatccttggtatatgacttgttattttctatctgaaagtgtttcagatcttctcttcacccctgatagtctgaagtccagtgcttccatgggtctctatgctttcatcaccctggacacctttttaatctagagacttgtatatttcagttctggatattttcttgtgcgtttttctttttaaaa

SEQ ID NO: 38895 - DNA, 2300 bp, Homo sapien
ggggtgtttggtctgaaagcagagaggggtcttggacagggaatgaaattgtggggtagagaggctgattctgggacttaggggaggaaacgtggaggctgagacaagaggttcccctcccacaccagcagcctctgctcgtgggggtcaggaccagggcgcagctctcattttaaccctttctgagctgccgccccttctccccgtacattttgatctccctccctcctccagggaggcctagatctggggtatcccaagggagccccatgcctaccagatgttgggggtggggttggcacttagcagaagaggccagaaatcaggcgggtgcagagggcagggcttgctcccctcttggccccccaactcctctagctcagagctaagaggatccacctgcctcggttcccagggatctggtcttcctgacctccctcccccaccccaggcactgactctgtctctctgtctgtctcagagaccctgctgaacacaaaattggaaactgctgatctgaagtgggtgacattccctcaggtggacgggcaggtgagagctgcacccaggagctggagctctggagggaaactgagggaggagagggcgcctgtgccgcctgctttctgtgtgccactcctctcccctgtccccccagatgacagcagccccagcagtgtcgtctgagcccttctcagaggcgccctcctcgcagtaccagcagcccccctttctcagtccctctcactttataggattcaccccatgcagccctctccctggcggctccccagcccccttgctgacctccttctctgcacagtgggaggaactgagcggcctggatgaggaacagcacagcgtgcgcacctacgaagtgtgtgacgtgcagcgtgccccgggccaggcccactggcttcgcacaggttgggtcccacggcggggcgccgtccacgtgtacgccacgctgcgcttcaccatgctcgagtgcctgtccctgcctcgggctgggcgctcctgcaaggagaccttcaccgtcttctactatgagagcgatgcggacacggccacggccctcacgccagcctggatggagaacccctacatcaaggtacctgggtgcccccagggctcagccacagccaaggtgggattccagccagcaggcccgtggcctggagggcagccgatgtagttgcgaggcctctggcccgcgcgctgggggctggaagcaggaggcttaggtctggggagggaagggggtgatcttctgggcggaggagcagaatatacgggggctgcctggcccggcccccagggaggcccaagggtcaggcttctcctccagtcacctcaaccaccctaccccactgtgctccagccacactgagtttctcccattccctgactgcacctggctggtttccagctcaagactttgcagcggtgatgtctccacctgggggcctctctgcctctcacacccctacttgtcttcggagttccagctcccgagatcttgcctgtgccaccttggctgactctctcctccctacaatcctgcatacctctgtccacctgcctgtctcggcactcattttactttatttatttttcttttatatctatatttttaaagcggggtcttctacgttacccaggctggtctctaactcctgggctcaagagatttctcccacctcggcctcctaaagtgctgggattataggcatgaggcactacgcccggcctcatggtactttataacttccccaggattcattcatcgctgtctccttgactctgaggtcaaggcctggcatggcgtcagtgtcagtaaatgtttgtagaacgagtgaataaaaagggggagaggtgcaggccagaggccgggcatatcgcaggagctttgcaaggctgaatggacagtgtgggggcctgcagaaagtgtgccctggggaaggtggagggaagattctggaacgggaaccaaggaggtccgggagggtgagctgggaagaacacaacagtccgctgggtcctcagggagtggggacagcagcggtgtgcctcccccccgccggcaggtggacacggtggccgcggagcatctcacccggaagcgccctggggccgaggccaccgggaaggtgaatgtcaagacgctgcgtctgggaccgctcagcaaggctggcttctacctggccttccaggaccagggtgcctgcatggccctgctatccctgcacctcttctacaaaaagtgcgcccagctgactgtgaacctgactcgattcccg

SEQ ID NO: 38896 - DNA, 2300 bp, Homo sapien
ctgggcctgcatcggggagggaggagggaattcccagctccagcctggtctgcctggctccagtgaagccggctgtttcctgccctcggtgaccggcccaccccccccaacccgggcgcaggacccaggcagaacagcaaggaagggcaggggtgtggggaacacctcttgcagcaggaagataagtaagccgggacaagaggttatcacaggcccggctgtcctttctgggacgtaagggcgcttggcagccccccaagcatcctggactccaacgtctctcttgctgggctccaacgtctctcttgctgggctcctcaagattctgtcctccggctgggcgcggtggctaacgtctgtaatcccagcactttgggaggccaaggtgggtggatcactttaggtcaggagttcgagaccagcctggccaacatggcgaaaccctgtctctactaaaaatacgaaaactagccggggttggtgccctgtgcctgtaatcccagctactcgggaggctgaggcaggagaatcgcttgaacctgggaggcggaggttgcagtgagcccagatcacgccactgcactccagcctgggaaatagagggagactctgtctcaaaaaaaaaaaaaaaatctgtccccgctaattactgtgggagtctaagtcctttccttctgccccttggaggggctgactcctggagcagcaccccctccaatccatctatccagtaacccatactgttaagttccctgaagtagaagggggttggtgggaggagcacggctgtgctggaccctccccgctaactgatgggagggtgaggggagttggcagtgagaggaagggcccctcccagccatcccgagggcccccaggagccagacaggaaacagctcaggaaagacagcagccgcagccgcagccccagcctcaggggtcatggctgcgggcggcggggaagcccccccaaaacacgagagtgagagtgagaagggcgatttggagatctagccggacccctcaccctctcggacacacccaccttttttttttttttttttttttttgagatttcgtctcactctgtagcccaggctggagtgcagtggcgcgatctcagctcccagctcactgcaacctccgcctcctaggtcccggttcaagcaattctcctgcctcagcctcccgagtagctaggattacaggcgcgcgccaccatgcccagctaatttttgtatttttagtagagacggggtttcatcatgttggccaggctggtcttgaactcctgacctcaaatgatccgcctgcctctgcctcccaaaatgctgggactacaggcgtgagccaccgcgcccgccacacccaccttttctttaccgttgtttcctcgatttttctctactccctagcgcagcttagtgcgcgcctcctctggacatttttcagggcttggttgcgcgcacagtaggtccccaacactgaatgtttatggggtgactgtgtgaacgttcgctgcaaggctatccaaactgggattgctccttgaggccccctgggcggccgtcaattctccaaagcttctactcccttttccttccttttcccccaaaacgcagtccctgcgcccactagagggtggtgggcgcatccaagagcggcatctagagtccgcagcaaggtcagagcgggctttgtgtgcgcggtgaacatttacgtgcacgcctgggcggccctccgtgttgctgctgggtgtgtgttttctctgctccctggtgccagccgggttcgggcctgtcccgggggtccctgggccccagccccgacatgctcggtcctggacagcgcgcaccgccacggcgcacatctgggcggtcccggggttcctcacccgccgcccctcccccttctccaaactttctctcaacttcccgacctgctccactcggtgcccctctccgcttccctcatgaattattcagtagcgtgagctccaatcagcgcgcccggggctcactcgcggagcccccgcgttgggagagctgcccccgccccccgcgcgcccctccctcccgggcccggcgccgcccggcccagttccagcgcagctcagcccctgcccggcccggcccgcccggctccgcgccgcagtctccctccctcccgctccgtccccgctcgggctcccaccatccccgcccgcgaggagagcactcggcccggcggcgcgagcagagccactccagggagggggggagaccgcgagcggccggctcagcccccgccacccggggcgg

SEQ ID NO: 38897 - DNA, 2300 bp, Homo sapien
ggatcttccagtttcagcctcctgagtagctgagacaacaggcgtgcaccaccatgcctggttaattttcttttcttcttcttcttcttttttttttttttgagatggagttttgctcttgttgcccaggctggagtgtaatggcgagatctcagctcaccacaacctccgcctcccgtgttcaagctattctcctgcctcagcctcccaagtagctgggattacaggtgcgtgccaccacgcccaactaatttttgtatttttagtagagatggggtatcaccatgttggccaggatggtcacaatctcctgacctcgtgatccacccacctcggcctcccaaagtgctgggattacaggcgtgagccaccgtgcctggcccaatttttaaaaaaaattttgtagagatgaggtcccactttattgcccaggctggtctggagctcttgggctcaagtgatcctcctgcctcagccttccaaagtcctgagattacaggcgtgacccactgcacccagctccttgccaccttcttggtgccaatcaaaatagtcctgaataaagtctgacttactgttttaacaagagtcagatttttttctttaataagcgcagtagaagaggtgaactgaagaggaggggctgcagtcattgatgaagacaaggtccaaggcaaaaccacagactaacaaggtaaggtggaggttgagatttatggaagcagagttcagtgacggacaggccagggtatgccaagggagtgcttataactaactgaccctgaaaaagttttttttttttttttgagacagagtctcgttctgttgccctggctggagtgcagtggtgcgatctcagctcactgcaacctctgcctcccaggttcaagcgatcctcctgcctcagcctcctaagtagctgggactgcaggcgcatgcttgagttcaggagttccagagaggcctgggcaacatggcgaaacccggtctctacaaaatatttaaaaattagccaggcgtggtgtgtgcctgtgtagttccaggcactgcggaggctgaggcaggaggatgcttgagccggaaatgcagaggttgtagtgacacgagatcgcgccactgcactccagcctgtgtaatagttcctggatcaaaaaaaaaaaaaaaaaaaaaaggaaatgtatctgaaactttccaagctccaatttcctaatctgaaaaattgaaatagcggtacctacctcacagagtggctaatttaatgcagtgctatttgcaagggataatttatcaaacctttaggcgttgttctaaagtgcccattaaatgctcactgaactcacagccttaggagggaggttcgagtttatgcccattttacatatgaggacgcgttggcaggtggtactgctgttcatgggatctgtaaagagtgaagaaggagtctcagctctcagtagagttcataggctctaggatttctgctggaagtgagaacactgcagggaggcaagaaagcgggcatcagacggtgcaaagcgaccctgggcccagatcggcggccaatggctccctccggtggcggaagcgaagagcgcagctggatcgggcgcgaagggaggatccccgcagcgggtgaggggcgaggctgggacccggtggaggttctagggttttgagaggttggaggactagaactccagaagtccctgaacgaagtgggccggatttcccgtgacgcacctggcccaggtgttgcagccccgcccacctccctgccgctttccgccatcctcacacgccccctttagtggggtggctgctcaccgcacctcggagctcggactggggtccggcccctgcggcgacgattgtttgtacctaagtgaaggaggctccgagacccgcggcccacgtcctgccggagacgcttgtctgcagggctgcattgcatccccgggcgcacgtggagctggagcagcgcaggctggggaagagcagagagggtcgggcttctccgggcgcgccatggggcggggccgaggacggggaccaatagcgcgcgcgtgctggtgggggtggggacaggctccaggcctggcatcccggtagccgcagctgtcttttccggcccccgtgcactctccgcccgagcggagccccccggctcgcggggatcgcccccgagcgctgcgtcctgcgggtgggtgagtgagcgcctcgcggcccccgagctgtggggtgcacctggccggggagaaggatatcttggctcccttgcaccccaacgggcgcaaaggggc

SEQ ID NO: 38898 - DNA, 2300 bp, Homo sapien
aactaatttttgtatttttagtagagatggggtatcaccatgttggccaggatggtcacaatctcctgacctcgtgatccacccacctcggcctcccaaagtgctgggattacaggcgtgagccaccgtgcctggcccaatttttaaaaaaaattttgtagagatgaggtcccactttattgcccaggctggtctggagctcttgggctcaagtgatcctcctgcctcagccttccaaagtcctgagattacaggcgtgacccactgcacccagctccttgccaccttcttggtgccaatcaaaatagtcctgaataaagtctgacttactgttttaacaagagtcagatttttttctttaataagcgcagtagaagaggtgaactgaagaggaggggctgcagtcattgatgaagacaaggtccaaggcaaaaccacagactaacaaggtaaggtggaggttgagatttatggaagcagagttcagtgacggacaggccagggtatgccaagggagtgcttataactaactgaccctgaaaaagttttttttttttttttgagacagagtctcgttctgttgccctggctggagtgcagtggtgcgatctcagctcactgcaacctctgcctcccaggttcaagcgatcctcctgcctcagcctcctaagtagctgggactgcaggcgcatgcttgagttcaggagttccagagaggcctgggcaacatggcgaaacccggtctctacaaaatatttaaaaattagccaggcgtggtgtgtgcctgtgtagttccaggcactgcggaggctgaggcaggaggatgcttgagccggaaatgcagaggttgtagtgacacgagatcgcgccactgcactccagcctgtgtaatagttcctggatcaaaaaaaaaaaaaaaaaaaaaaggaaatgtatctgaaactttccaagctccaatttcctaatctgaaaaattgaaatagcggtacctacctcacagagtggctaatttaatgcagtgctatttgcaagggataatttatcaaacctttaggcgttgttctaaagtgcccattaaatgctcactgaactcacagccttaggagggaggttcgagtttatgcccattttacatatgaggacgcgttggcaggtggtactgctgttcatgggatctgtaaagagtgaagaaggagtctcagctctcagtagagttcataggctctaggatttctgctggaagtgagaacactgcagggaggcaagaaagcgggcatcagacggtgcaaagcgaccctgggcccagatcggcggccaatggctccctccggtggcggaagcgaagagcgcagctggatcgggcgcgaagggaggatccccgcagcgggtgaggggcgaggctgggacccggtggaggttctagggttttgagaggttggaggactagaactccagaagtccctgaacgaagtgggccggatttcccgtgacgcacctggcccaggtgttgcagccccgcccacctccctgccgctttccgccatcctcacacgccccctttagtggggtggctgctcaccgcacctcggagctcggactggggtccggcccctgcggcgacgattgtttgtacctaagtgaaggaggctccgagacccgcggcccacgtcctgccggagacgcttgtctgcagggctgcattgcatccccgggcgcacgtggagctggagcagcgcaggctggggaagagcagagagggtcgggcttctccgggcgcgccatggggcggggccgaggacggggaccaatagcgcgcgcgtgctggtgggggtggggacaggctccaggcctggcatcccggtagccgcagctgtcttttccggcccccgtgcactctccgcccgagcggagccccccggctcgcggggatcgcccccgagcgctgcgtcctgcgggtgggtgagtgagcgcctcgcggcccccgagctgtggggtgcacctggccggggagaaggatatcttggctcccttgcaccccaacgggcgcaaaggggcaggagcccggattgggggaggaggaggacccggggaccttgtgtcgctcggtgggagccggtctgtgtttctgtttcgctagggtgtgtttgggttggtagagtttgtggggaggggtgcctcgtgtggatgggaggaatcggggaggctaaggcgaggaggagggggtttgagatgggttgagggagaggattgacggagggtggggttttgaaagagttggaagtttcttgttacctgtgggt

SEQ ID NO: 38899 - DNA, 2300 bp, Homo sapien
agaacctttgcccctttccagaaccggtgccatccctagtctcaggaacataagggaaggggtggcccccaggagccgggaggggccttgaaacccctgctgacaggtttggggtaccacttttttgtggggcagtggctggtaccatttgcagcccacggacttttttgagttgccggtaagcagggtgtgggtgcgttcctgtttccttgcggttgtctctttttttttttttattgacacagggtctcgctctgtcacccaggctggagtgcagtggcatgatctcggctcgctgcagccctacgcctccaggactcaagcgattctcgtgtctcagcctcccaagtagctgtgattacaggcatgcaccttcacgcttggctaatttttttttttttcttgtgagacggagtctcactctgtcacccaggctggagtgcagtggtgtgatgtcggctcactgcaacctctgcctcctgggttcaagggattctcctgcctcagcctcccaagtagctgggactacaggcatgagccaccatgcccagctactttttgtatttttagtagagacggggtttcaccatgttgaccagggtggtctcgaactcctgacctcaggtgatccacctgcctcgtcctcccaaagtgctgggattacaggcatgaaccaccgagcctggccaatttttgtatttttagtagagagcagctctgtcttttggggaggcttcagggtgtttgattagtggtctttgggggtgggcgagctctgtgggggagcttttgatgcaacataatctcctttgcaggtcacctaacccatttgtggcttcctctacctgtgctcagccatggccagcgagagctcacctctgctggcctaccggctcctgggggaggagggggttgccctccctgccaatggggccgggggtcctggaggggcgtctgcccggaagctgtccaccttcctgggtgtggtggtgcccactgtcctgtccatgttcagcatagttgtttttctgaggattggtgagtgggtcctggggcgggtgtggactgactatagtatgggaggacatgatggggaggggtggagatgggactgggataagattaggaaggggacccaagagaagcggttggctgaagggtttggggaggggctctctgtgggcttgcatttagctccaccctggagctctgcagaaccagggggtgggggatatggggtgtgagtcccctgtgacctgatttgctgctcctgcctcagggttcgtggtgggtcatgctgggctactgcaggccctggccatgctgctggttgcctacttcatcctggcactcaccgtcctctctgtctgtgccatcgccaccaatggagccgtgcaggggggcggagcctactgtatcctccaacatcgatggactggggtctggcctgttctgcctgctagggagggtgtggaaggggccattacctttgttggctcaggggcaagacaagtgtttttttcattcttaaaatttttttaggctgggtgcggtggctcacatctgtaatcccagcactttgggaggctgaggtgggtggatcacttgaggccaggagttcaagaccagcctggccaacatagtgaaaccccgactccactaaaattacaaaaattagctgggcatgatggcacccgcctgtgattccagctactcgggaggctgaggcacgagaatcgcttgaacctgggaggtggaggttgcagcgtgccaagatcgcatcactgcactccaacctgggcaacagagcaagactctgactcccaggctgcagtgcagtggcgccatcatagctcactgtgatctcgacttcctgggctcaagtgatcctcctatctcagcctcctgagtagccagcactataggcatgtaccaccacccctgtttaatttttaaatatttgtagagatggaatcttgctatgtttcccaggctggtcttgaattcctggcctcaagtgatcctcctgcctcagcctcccaaaatgctaggattacaggcgtcagccactgtgcctggcctggcagggcaagttttaataaatgtgcagcaggcaggctggtatagtgaaggagatcaacattgccctgcacgttgatgccaatttctagtccaacaatctcatctgttaggcagtgattgttttacagatgcagaaactggcactcagaggatatgagtgacttgggcaaagccacatggctggggcctggctgcacttgggttcagtgcttggagct

SEQ ID NO: 38900 - DNA, 2300 bp, Homo sapien
accgtcctctctgtctgtgccatcgccaccaatggagccgtgcaggggggcggagcctactgtatcctccaacatcgatggactggggtctggcctgttctgcctgctagggagggtgtggaaggggccattacctttgttggctcaggggcaagacaagtgtttttttcattcttaaaatttttttaggctgggtgcggtggctcacatctgtaatcccagcactttgggaggctgaggtgggtggatcacttgaggccaggagttcaagaccagcctggccaacatagtgaaaccccgactccactaaaattacaaaaattagctgggcatgatggcacccgcctgtgattccagctactcgggaggctgaggcacgagaatcgcttgaacctgggaggtggaggttgcagcgtgccaagatcgcatcactgcactccaacctgggcaacagagcaagactctgactcccaggctgcagtgcagtggcgccatcatagctcactgtgatctcgacttcctgggctcaagtgatcctcctatctcagcctcctgagtagccagcactataggcatgtaccaccacccctgtttaatttttaaatatttgtagagatggaatcttgctatgtttcccaggctggtcttgaattcctggcctcaagtgatcctcctgcctcagcctcccaaaatgctaggattacaggcgtcagccactgtgcctggcctggcagggcaagttttaataaatgtgcagcaggcaggctggtatagtgaaggagatcaacattgccctgcacgttgatgccaatttctagtccaacaatctcatctgttaggcagtgattgttttacagatgcagaaactggcactcagaggatatgagtgacttgggcaaagccacatggctggggcctggctgcacttgggttcagtgcttggagctatggcaacttcctcacgtccatttcagtcttttcccttaatgctcacccctgcttccactttcagtcatgatcagccgcacactggggcccgaggtcgggggcagcattgggctcatgttctacctggctaacgtctgtggctgtgccgtctccctcctggggctggtggagtctgtgcttgatgtcttcggggccggtctgtgctctgtccgatctgggcagtgctgcgggtttacagggtctgggagtgtgggatcatgagggagaaggtcctctccagcagaggggcagactgagccattaccttggctttctggagcttctgctgtgtggccagcatcgtgcaggagatatggacatccctgagattgtccttgcctgcagggagctaaccatctaatcggagagaccaggctaagattcttaaaactgacagagaccaccagggagagctaagatgctaggatggagctaagagggaagtggggaaggtggactctctgatagcaggtgggcagaggagggcttgtcttgctttgggtcacagttggggctgggtcccttcttatttatttatttattttgagatggagtcttgctttgttgcccaggctggagtacagtggtgtgatctccgctcactgcaacctttgcctcccgggttcaagcaattctcctgccttagcctcttgagtagctgggattacaggcactcaccaccacgcctggctaatgtttgtatttttagtagagacggggtttcaccatgttggccaggctggtcttgaactcctgacctcaagtgatccacctgcctcagcttcccaaagtgttgggattacaggcgtgagccccggcgccctgccccttcttcttttttttttttttcttgagagaaggtctcactctgtcaccaaggctggagtgcagtggtaccatctcggctcaatgcaacttctgcctcccgggctcatgcgattctcccacctcagcctcccagtagctggactacaggcatgcctccccacacctggctaattttgcagtttttgtggagctggggtttcacaatgttgcccaggttagttttaaactcctggactcaagcaatcctcccacctcggcctcccaaagtgctggaattatagatgtgagccgcccaccatgcccggctggtggggtgccttaggatcgggccttctaactctgtccctacctctctccagatgccacagggcccagtgggctccgggtcctgccccagggctacggctggaacctgctgtatggctccctgctgctgggccttgtgggtggggtctgcaccctgggagccggcctctatgcccggg

SEQ ID NO: 38901 - DNA, 2300 bp, Homo sapien
tcccagtagctggactacaggcatgcctccccacacctggctaattttgcagtttttgtggagctggggtttcacaatgttgcccaggttagttttaaactcctggactcaagcaatcctcccacctcggcctcccaaagtgctggaattatagatgtgagccgcccaccatgcccggctggtggggtgccttaggatcgggccttctaactctgtccctacctctctccagatgccacagggcccagtgggctccgggtcctgccccagggctacggctggaacctgctgtatggctccctgctgctgggccttgtgggtggggtctgcaccctgggagccggcctctatgcccgggcctcattcctcacattcctgctggtctctggctccctggcctctgtgctcatcagttttgtggctgtggggccgagggacatccgcttgactcctaggcctggccccaatggctcctccctgccgccccggtttggccacttcaccggcttcaacagcagtaccctgaaggacaacttgggcggtgagctgggtgctgccgtggcagggatctcggggtgaggggtgggcagacgtcgggccgggcccgtaaaacctctggatgagcacaggtgtcagagggaatggagggcaggaggtctggactgcagagcagtgcaatttaattcaagcctgtctagcgtgtgcttggccggcagggcaggaggaagcccacaaaacagtccctgctttagaggaacttgtgttctagctgaggagagacatgcattcaggaatcagttaaatagcacagaatggcccagcatgacttaaacagatcaggatcacccaggagtggagagaagggaggcctgactatgggctggggagggcaggagccggggagctggaggtggcctgagatagacaggtgggggattcagccaggagctgggagcagagagggaaggcatctcaggaaagagcttgagaccaggtgcggtggctcacgcctgtaatcccagcattctgggaggccgaggcaggaggatcacctgaggtcaggagtttgagaccagtctggccaacatggtgaaaccctctccccgtctctactaaaaacacgaaaattagctgggcacgctggcttgcacctgtagtgccagacactcgggaagctgagggagaactgattgaacccgggaggaggagccgagattgtgccattcagtgagccgagattgcaccattgcactccagcctgggagacagtgaggttccctctccaaaaaacaaacaaacaaaaaaaacaccataaaataaaaatacaaaaattagccaggggtggtggtgcgcacctgtagtcccagctactcaggaggctgaggcatgagaatctcttgaacccgggaggcagaggctgcagtgagctaagatcgccaccactgccctccagcctgggcttcagaacgagactccgtctcaaaaaaataaataggctgggtgcggtggctcccgcctgtaatcccaggactttcggaggtcgaggcgggtggatcacctgagtccaggagttcgagatcagcctggccaacatggtgaaaccccatctctactaaaaatacaaaaattagccaggcgtggtggcgggcacctgtaatcccagctacctgagaggctgagacaggggaattgcttgaacctgggaggcagaagttgcagtgagccgagatcgcaccactgcactctcgcctgggtgacacagcgagactccatctcaaaataaataaataaataaaattaaaaagttagatgggcatggtggtgcacacctgtagtcccagctacttggcagactgaggcaggaggatcgctctagcccaggaggtagaggttgcagtgagctacgatggtgccactgcactccagcctggatgacagagccagaccctgtctctaaaaaataaataaataaataaaagagcgtggattagggtctggagggaggaatatcggagcactggggggacgtggcaatgtgtctggctgacccagggccagtgcaggaacaggctggggtcttagtgagggcagtgcaggggaggcaagaggaccgtgggaatgtgtggagagggtggctaagaggcctggatccctgagacggatgctgatgcactctcctccctgggaggatcctcctagctggctatgctgaggactacaccacgggagccgtgatgaattttgccagcgtctttgctgtcctctttaacggctgtacaggcatcatggctggggccaac

SEQ ID NO: 38902 - DNA, 2300 bp, Homo sapien
cctgcctggtccattttttcatcttcccattgcagagtctgggacgctattaccctggggattcaggtcatgagcttggctgatcagggtgtctggtttgcacaacagagtcaaactcgcatcccctgccgtgaaacagatgccccgctagaagccgggagtggacagcatcctcctctccatagaattggagtgctcattagtggcaagaatcctaaggcgaactttgcctgtttaagtggaggagattagtcactgagataataaaataaatgcatgtgaaagtgtttaggaaaaatgaaaagtctttatgcaaatatgcagaatgttgccgtaagagcccgtacacagtgggaatgtcatacctatggctgacgcaccttgctgtcagtgtgtgggagcgtggtgtaaacttagcctgtgagcctgactcctgtctgttcctgccttccccgctctgcccccaggtggcatgaagcccaacacgttggtcctaggtttctacgatgacgctccaccgcaggaccatttcctgacggacccggctttctctgagcctgcagacagcaccagggagggcagttccccagctctgagcaccctgttccctcctccccgggctcctgggagcccccgggccctcaatccccaggactatgtggccacggtggccgacgccctcaagatgaacaagaatgtggtgctggcccgggccagcggggccttgccccctgagcggctgagccgggggtctgggggcacctctcagctgcaccatgtggacgtgtggcccctcaacctgctgcggccccggggtgggcccggctatgtggatgtctgcggcctcttcctgctgcagatggcaaccatcttgggcatggtgcccgcttggcatagcgcccggctccggatcttcctgtgcctggggcctcgggaggcgcctggggcggccgaggggcggctgcgggcactgctgagccaactgaggatccgggctgaggtgcaggaggtggtgtggggcgagggggccggggctggggaacccgaggcggaggaggaaggggactttgtgaacagtgggcggggagacgcagaggcagaggccctggcacgcagcgccaacgccctggttcgggcccagcaggggcgcggcacaggaggagggccgggtgggccggagggtggggatgctgagggccccatcacagccctcaccttcctgtacttgcctcggccgccagccgatcccgcccgatacccccgctacctggcgctactggagactctaacccgagacctgggccccacgctgctggttcatggggtcactccagtcacctgcactgatctgtgatgcccctgcctccagggctaggtagagagggcccaggcaggcggcctatcctgatccttggaggaggaggaagaggaggccactgtggcccgtggccctgcccttgggacgtggagcccaggggaggtttgaaggggatcctgggcttgggcatcacgcccacctcctttggcagagggaccccagcacactaactctgggtggctgtccccaccgtgcaggggagggagtccgcagcctcccttcactggtgccttgatgctaggggccaggcctcctctgtgactctgggctacctcagtttccccattttggccagactcaccggcccactggggtggtgatgttttcgttctgttttatttttctaactctgctgaccatgaataaaagaccaaaacactacaggctggctgagcagtgctggtgggtagctgagagggagggggtgggaatggagagctctgcagaggggtggagatcggagccttcagcctcccgccgcgaggctgccacgtgcagggctggggtgcggggcccggacgcatccgtggacttggaggctggctcgggcccgcacctcccatccccagctgcccgcaacccccagtgactcgggatcccccggagagccctcccctctcggcaggagggggctgactcagggagaaatggcagtttagggcctagggggccacgtgaccctcccccaggaatgtggtgacgtcatcggaggcgtggtcgtccccaaaattagggaggaagaggaaaaaaaaaagccagaaaaagttttcttttctggagtcccaaacgaggtgcgggacggaagagggggtgaaggccagaggctcggggcttcaagaccgctgtctggagtccccctttccaggccatgtcggggcccacctggctgcccccgaagcagccggagcccgccagagcccct

SEQ ID NO: 38903 - DNA, 2300 bp, Homo sapien
gctaatttttgtatttttagtagagacagggtttcaccatattggccaggctggtcttgaactcctgaccttgtgatcctcctgcctcggcttctcaaagtgctgggattacaggcgtgagccatcgcgcccggccaattgttgcttctttttcaacaggagtgtgggctgctgctctcctctgagggcgagtgtcagggctgctacccgctggatgggcacatcttgtgcaaggcctgcagcgcctggcgcatccaggagctctcagccaccgtcaccactgactgctgagtcttcctagaagtacctgctgggttctcagttccagttcccatcctttgattgatcactctccctgacatccacctgtatgactttgtcaccaaatgctgtcttctctttctccaatcaagaaataataatccctcgagtttacaaaacacttccaagtctgttgtctcatctgattctcccagtagcccattacaggcccagtcattgttactgcctgcattttttttcttttttttttgagacggagtctggctctgtcacccaggctggaatgcagtggtgccatctcggctcactgcaacctctgcctcccaggttcaagtgattctcttgcctcagcctcttgagtagctgggattacaggcgcccgccaccacgtctggctaattttgtatttttagtagagacggggtttcaccaccttggtcagggtggtcttgaactcctgacctcaagtgatctgcccgcttcacccaaccaaagtgctgggattacaggcgtgagccaccgcccttggccactgtctgcatttttacatgtgaggatgtcagagctgagaggtgactcccccagattgcatggttcttaaatggtggaacctgggtctttttgactcaggtccagttttttttgacaactcttgtaatccgtcactaccctcctctcagtgctgggagcaagcacgcctcagggaggaggcaagatttcctctatgtatctattttgagacagggcctcactctgttccccaggctagagtgcagtggtgcaatcaaggctcactgcagccctgaactcctgggctcaaacagtcctcctggcttagcctccccagtagctaggaccacaggggcatcccaccaagcccagttattatttttttgtgtgtagatgggatcttgctatgttgcccaggctagtcctgaactcttgggcttaagtcctccctcctcgaccttcccaagtgctgggatcacaggtgtgagccaatgtgcctggccctaaatattctgtaaaggggccttgctatgttgcccaggcaggtctccaactcctgggctcaagtgattctcccacgtcggcctcccaaagcgctgggattgcaggcgtgagccatctcagctggtcttcctattaagtctcacactcaattcactgagaggggccttggtgttactcccgggggtggtaatccattgaatctgggcggtccatactctgtttagggcgttaacttacagcctatttcatccaaatactgagcggggttaagactgagatctgccaattttacttaaagacggggcgtctttgtcgaggaaaagcaggaacggcggactttgcatttagtgcgcactgtggcacccaattttggctggatatttggagcagaaaatggtgggatacgatgctttaaaatggttgcttccaccttccatcccctaagcgcccgcgcttcccaagcccacgccctgcccgaggaggggacgaaatcacccccggtgaggtcaggaggcccgtggggggaacatggctggatgagaaccgtcttaggaccccgacacatctggggtcgcgcgatcctcgacttccgctctcccttcgcgcccagagggcttgttcgcctcccgaggccgcgcttggcccagccgaggtcccgtagttcctaacgctcgagccgttatcgtctcgaaaagccgcgcgagacttgcgagatccccgcccctttcccatcacgccctgctctccccgcccttcgcgctcggtttgttagttccagttccggccgcgagggtggagctttgtgcctcggaggcgtgggtgacgcaggcgcagcgcgggctgcgcgcgctactgcccatccccggttgtcccacttttgttcgcctctcttcggccctctactcaagagctccgtctccgtctcgccctcctcgaagtcctcgtcgcgcgcccgcgacccaggtcgccctgaaatctagcccgtccgagcgcgagtccaacgc

SEQ ID NO: 38904 - DNA, 2300 bp, Homo sapien
ccagccagctaagttttgtatttttagtagaaaggtggtttcaccatgttgccccagcctggtcttgaactcctgggctcaagcaatccactgcttcggcctcccaaagtgctagcattcattacagatgtgagccaccatgcccggcctgcctcatttttcaagcagaacaaaatatctcaacagattcagtgtagaagctatcctctacaaagccagaacttggagagattggtgacaatgtaaaaacaatgccactttttctcaccaaaatttttctggaaaacgatttttcataaaaacatgtaatgtgtttcatcttactgtgtaatttaaaaatgaaggttttggaacatttcgttttaattttgaatatagtaagtatcgatagatgtaacccacataagcagaaactctttggtgtcctcagtcatttttaagagtattaaggggctgaggcaggagaattgcttgagcccaggaggcggaggctgtagtgagccgagagtgattgtgctgctgcactccagcctgagcgacagagtgagactgtctccaaaaaaaaaaaaaaaagaagaagaagaagatgaggatgggggaggctggtgattggttgggaggttggtgactggtggagaggctggtgactggtcgagaggctggagtgacagccaggagcccaagttaaaacaatagtgttgcttactgacattgaagtaacggtgtgatgtgatgagacttgtgtttgaggaaggtctgcctgccagtggggagacagaagcgagagaccagaagcaggcgggcagccagggctgcaggagccacactggccaaggacaaagactaggacagggtgtgtggggatggcagagagtgggacagctttgataggctttgaggcagaggattagcaggagcagtaattagcggtgagggtagtgaatgacagctggcgagagatgctgttccgttgatacagcagagtggggagcgggaggaggaaaagacatttgggcccatagtggtgggatgaataggcttgattcttttttctttttttggtgggggggatgaagtcttgctctgtcgcccaggctggcttgcagtggcgcgatctcggctcactgcaagctccgcctcccgggtccacgccattctcctgcctcagcctcccgagtagctgggactacaggtggctgccaccacgcctggctaatttttttttgtatttttagtagagactgggtttcaccatgttagccaggatggtctcgatctcctgacctcgtgatccgcccgcctcggcctcccagagtgctgggattacaggcgtgagccaccgcacccggctgaataggcttgattctgacaggctgaatttgagggggtgatggacttctagtaggggatgatttttaaaaagttttctgttttatttttagagacagggtctccctctgtcacccgggctgagtgcactggtgcagtcgaagcttgctgcagccgcgacctgcccgtaagtgggcctgtagcaggggtgattcatgtgggtctggagcacaggcggaaggccaggctgggagaagagttggagaaccatcagttcttgggtattggctgaactcatggagttagacaagaatctttgttttgttttgttttgagacagggtctctgttgccagggctggagtgcagtggcttgccctgactagagaaaaatctttttctgttaggagcgaagttttataattgtaggctttttagtctggtatctcagggtgtaagaagggcctgtttaggaatgtggctgtggcatatccagctgtatctttaattattgttacctttttaaaaaataaaaaattttttgtagggatggcggggggcgggggggggtctcactattgcccaggttggtctcgaactcctggcctcaagtgttctctgcctcggcctcaaaagtgcttggattacaggcatgagccactgtgcctggcctttaatctttgttacttgttcttactgccagagagtgggaccgtggccgtgagcgccgtagtcggggtgaatatcgggactatgaccggaatcggcgagagcgcttctcgccacctcgccacgaactcagcccgccacagaagcgcatgaggagagactggtgagatggagcggtttccctctcctcccctttgcctcagttccacctgggcctcccctttctcccctcacctgtgcctaaatctttgtcatttccttttctcaacttcccatcacccatcgttactttgtcccttgaaa

SEQ ID NO: 38905 - DNA, 2300 bp, Homo sapien
ctgtcccctctctcgaattgctctgtgtctttgtcctaatctctcagcaccttcattcttctctgtttctgttcttgctccctgcctaacaccaccttcttccctgttggtttttttagtttctctctctgatctttagtttttccctttgttttcggtttctgggactttctcacactctcccctttcctccctttccccttttcctcatactcctcatttcttctgttttccctctgaggtcctatttgaaatgttttatttttcttctccctaaccttccagccctctcctctctctccccctgtgggcaggacctgaggctctaaagggcactccagtgtctcccttcggtctttcctgtcccttcaccgtcttgcttatcttcccacgggtggagaaaggtgccctgcctctgggcttttgctatctggccctctgtcttccacctcggggtggagggagttggcgggagcagtttttgaatgactgcagtttggggttggtgaggagagggaggttcttcagggcctgctatttcctgagccttcctctctgaagctttgggaaatgacacctttttactacgttagtgtttcccagagatttaaagtggtaaatctgcctctcctaccctggcgtccccctgtagtcattggtcttcccaaatccagagctcttagttcctggttctcccccaaatcttcacagaacacaacttctggttccttttggggtgttgggtggttctagcgcacccctatcccttaatctctctattttgatgaccttttgtggttgtgagaggaagggggatatgccctgtctttcctgggccccttcccacatcctggccttggcttccaataactgttttgtctttccctcccccgcttcgttcccaggtttcggtctaagtaccacccagatgaggtggggaagcgtcggcaggaggcccggggggccctgcaaaaccgactgagggtcttcctgtccctcatggagactggctggtttgataaccttctcctggacatagacaaagctgatgccattgtcaagatgctggatgcaggtgtgcggatttggaggggtggcaggcatctgggccccatgggggtgggggtgtctggggatcaggtagaagccggttgacaggagccagggccctggggtcatgacctctgttccctttgttggtagccgtgattaagatggaaggaggcacggagaatgatcttcgcatcctggagcaggaggaggaggaggagcaggcaggaaagcctggggagcccagcaagaaagaagaaggacgggctggagcaggcctaggggacggggagcgcaaaaccaacgacaaggatgagaagaaggaagacggcaagcaggtccgagccctgggtctcctagtgttgtccctggcagcctgggggaggggggcgggtaggggtccataggagctagaagtagggggctggggaaaatgaacctgtggcctcagctgtgggggtgggggccctctgataaaggtgggaggggaggtttgacatccccagtggttgtctcttaccataggctgagaatgacagttctaatgatgacaaaacaaagaagtcggagggtgatggggacaaggaagagaagaaagaagactccgagaaggaagccaaaaaggtgaggtgtctgtggcctggggtcagagtgttggggctggggttctggcacgctgacttgtcccctctgctgtggctcacacagagtagcaagaagcggaaccggaagcacagtggtgacgacagctttgacgagggcagcgtgtcagagtctgagtcggagtcagagagcggccaggctgaggaggagaaggaggaggccggtagggtttcttttctgctttaaagtgcgttctcctaatgcgggtggggaggtgagaggttggcgacattgacgggagggtgggtggcttttaggggaaagcttctgtatcctccccaccacaatcagtaataaaaatgcaccaactccttcctaccccccttcctgcctagaagaagcgctcaaggagaaggagaagcccaaggaagaagaatgggagaagcccaaggacgccgcggggctggagtgcaagccgcggccgctgcataagacctgctccctcttcatgcgcaacatcgcgcccaacatctcccgggccgagatcatctccgtgagtggggacccgtggagtcagggcagggctgatggagaagtggagggtagagggaaggcagtggggccctgcctgtgacagatgcccccgt

SEQ ID NO: 38906 - DNA, 2300 bp, Homo sapien
aatggaaatggaaaagccagtattcttttataaaattatcttttggaacctgagcctgacattggggggaagtgggaggccccggacggggtagcaccccccattggggctataacggtcaaccatttctgtctcttctttttcccccaacctccccctcctgtcccctctgttcccgtcttccggtcattcttttctcctcctctctccttcctgctgtccttctccggccccgcctctgccctcatcctccctctcgtctttcgcacattctcctgatcctcttgccaccgtcccacgtggtcgcctgcatttctccgtgcgtcctccctgcactcatacccccccttcaacccgcccaaatgtccgatccccgaccttcctcgtgccgtcctcccctcccgcctcgctgggcgccctggccgcagacacgctcgacgaggcggagcgccagtggaaggccgagttccaccgctggagctcctacatggtgcactggaagaaccagttcgaccactacagcaagcaggatcgctgctcagacctgtgaccccggcgggacccccatgtcctccgctccgcccggccccctagctgtatatactatttatttcagggctgggctataacacagacgagccccagactctgcccatccccaccccaccccgacgtcccccggggctcccggtcctctgcatgtctcaggctgagctccctcccccgcggtgccttcgcccctctgggctgccaataaactgttacagccacgggagtgtgcgcgactagggagccaggggtagaggcagaacgccggaatcacgggggccgagtctatgcaggagcggggctggagggcaagaaacaggcgagctccgaggcgggcgcaaggcaaaggccaacccctagccctgccctgccgggcggagctcgcgcctgcgtaatgaggcccgcaggcaggctagctggcacggcggaggggaggagaggggaggggaggggaggggaggggaggggaggggcggggcggggcggggcgcggcggagcattgtgggagctcctcggtcggtgccggtcggtggctgcctattgcggcctgcggtgatcaacgaggcccggggagcgcgtccccagtctgcgcgccggtcctgcggcagctggcccaagacccggagccgaaaggaagtgttggagcctgaggtcgctccgcgccgctaggaggacgctgtgcctggcctgggacctccgctcccgcccaccgccctggagccgctgagggacgtccacgtgggcctgtccccgccgagccgcggccctgtccgcctggcgctgctctcgggccactacctctactaccactacggctgcgacggcctggacgaccgcggctggggctgcggctaccgcactctgcagacgctgtgctcgtggccagagggccagcccgcgggcgtacctggactggccgccgtacaggcggccctggaggacatgggcgacaagccccccggcttccggggctcccgggactggatcggctgcgtggaggccagcctctgcctcgctcacttcggagggccccagggacgcctctgccacgtaccccggggagtggggctgcacggggagctggagaggctttactcgcacttcgcagggggtgggggcccagtcatggttgggggggacgcagatgccaggtccaaggccttgctgggagtctgcgtagggtcaggcacggaagcctatgtcctggtattggaccctcactactggggcactccaaaaagccccagtgaactacaggctgctgggtgggtgggctggcaagaggtgagtgcagcctttgaccccaactccttctacaacctgtgcttgaccagccttagctcccaacagcagcagcgcaccttggactgaggacgaagttacagaactgagattctcgggtcccagacacgcacctatgtacctcccactggtgtccctgcaaagcctggcgcttttgacatcaataataaaagtggcagggctgagcaacacctcaggagttactctggaaggatggaggagttatgtaacacacgagagtcaggagccctgtggaagtgcttttattagcagtaaggctgatcgtacaaaaaattctcagagcttcataggacaaggtagtacaagtatggatgatacaggactgaggaacgggggacggctcaaaagaaatcaacatcgtctggggcatccaggtcccgatattccacaatggcccttgggtctccacgaaccatcctgtgaggtg

SEQ ID NO: 38907 - DNA, 2300 bp, Homo sapien
gagaccaagacaaaggagttggagctggattaagtcaaaccagtgatgattcactagcagtgacacattctctcacacacacaccagtttacctggatcgagaagaggacaatgaaatctagcattggatgggtgttgttaaaaaatgtgatgtttgtagacataggacccgtcctggttatttaggaaagtctcaagacatcctagccatttttttagtgagagaaacaaagatggaacagaaaagctgagggaaacggaaggagacggagcgcttgaggaagggaagaccccaatgaccgcgcacattggagaaagtggtgggagggaggggacgggttctctggggctctccgctgagctgaagagtccgggatcccgtggagttgggggccacctcctcccactgcccgtctggactgagccttcccttccttccgcagggatcccaatgagccccgagaccccaaggccccacaatggcccccgtacacggcgggggctcagcagtacgttagtctggacctgcggccgctggaggtgcggcgggggctgcgcgcccaggcctgcgccttctggaaccgcttcctccccaaattgctcagcgccaccggtatgcaggggccagcgggcagcggctgggaggaggggagtgggagcccgccaggtgtaacccctctcttctccccctagcctcggaggctcccagcacctgcccaggcttcacccatggggaggctgctccgaggcccggcctccccctgcccctcctcctcctccaccagcttctcctcctcttcctctcccacctccggcggctgtgaacacggcctcttcccctacggccacaggggcccctcctctaatgagtggtcggaccgtggggaagggccccactcagggatctcagacctagtgctcccttcctcctcaaaccgagagactcacactggacagggcaggaggagggggccgtgcctcccacccttctcagggacccccacgcctttgttgtttgaatggaaatggaaaagccagtattcttttataaaattatcttttggaacctgagcctgacattggggggaagtgggaggccccggacggggtagcaccccccattggggctataacggtcaaccatttctgtctcttctttttcccccaacctccccctcctgtcccctctgttcccgtcttccggtcattcttttctcctcctctctccttcctgctgtccttctccggccccgcctctgccctcatcctccctctcgtctttcgcacattctcctgatcctcttgccaccgtcccacgtggtcgcctgcatttctccgtgcgtcctccctgcactcatacccccccttcaacccgcccaaatgtccgatccccgaccttcctcgtgccgtcctcccctcccgcctcgctgggcgccctggccgcagacacgctcgacgaggcggagcgccagtggaaggccgagttccaccgctggagctcctacatggtgcactggaagaaccagttcgaccactacagcaagcaggatcgctgctcagacctgtgaccccggcgggacccccatgtcctccgctccgcccggccccctagctgtatatactatttatttcagggctgggctataacacagacgagccccagactctgcccatccccaccccaccccgacgtcccccggggctcccggtcctctgcatgtctcaggctgagctccctcccccgcggtgccttcgcccctctgggctgccaataaactgttacagccacgggagtgtgcgcgactagggagccaggggtagaggcagaacgccggaatcacgggggccgagtctatgcaggagcggggctggagggcaagaaacaggcgagctccgaggcgggcgcaaggcaaaggccaacccctagccctgccctgccgggcggagctcgcgcctgcgtaatgaggcccgcaggcaggctagctggcacggcggaggggaggagaggggaggggaggggaggggaggggaggggaggggcggggcggggcggggcgcggcggagcattgtgggagctcctcggtcggtgccggtcggtggctgcctattgcggcctgcggtgatcaacgaggcccggggagcgcgtccccagtctgcgcgccggtcctgcggcagctggcccaagacccggagccgaaaggaagtgttggagcctgaggtcgctccgcgccgctaggaggacgctgtgcctggcctgggacctccgctcccgcccaccgccctggagccgctgagggac

SEQ ID NO: 38908 - DNA, 2300 bp, Homo sapien
ggtgataaactatccctgccctccctatcttcattgtacaggcctagaaactcgtgacgacagaggttaggtgacacctgcgtggcacagttcgtctggagggtgacaggggcaagccttcatcactagcagggccaaaaatccctaaagcctcaggactggggcaggcctcagagcactcgttcacagtttgtttccatcattttatttttttgcggagaagggagtctcgctatgttgcccaggctagtctccaactcctggactgaagcgatcctcctgtctcggcctcccagagtgctgggattacaggcaccgcactaggggccacacgcggccccatcattttaataattcataattaccacgcttagaaacctgcctcagattcattccccccgcagcaacacccaccatccaccctcctgtcccctcccccatgcacagcccttacatctgctcttcagggatctcaactagggcacatggtctggccagtgaggagccttcaactagtgcggccagaacgctgaaggccggatacaaggagcctcggtgtccaggcaggggatttggggttgcctgagattggggcggggaaagccggagacagtgggcacagatggcgaggggttcacctccccaacacccccaacccagcccagtctccgaggcccgagtggctgctttttgcgccacctggcggccgtctccagcgagcggagcgcgggtgaccgtgcctgcgggacccggttcccgtggggcgagcgggcgtggggcccgcccagcttggagagccgggaaccgcgcggcccagggactggcaagactccggattcaacccctgcgaggccccgcaacccggtgcccgcggtccctggcggcggcgcccgcgtgcccgaggcgctgcggggcgctgcggggcgcgcggcggttagagcgagcgtgtgcgcacgcgcccaccccacgccgcgccccgcaccgccgcgcgcgcgcacgcacgcccgacgctggcctgcgccggccgctctcccacgcggggtctcgggggctcctgagccggccgcctccaggaagcaggcgccgcgcggtattgccgcatgcacctcggtcgtggggaccccgctgcagcagccctgtccacacgggtgaactcctggagggcggggcggggggcaatctgcgcgggtcaggcccctcggagcaggctgggggcgcccgagccaggccgctcccacctgccagccgcgtggccaatgaatgctaggcctggtgatgtcatgccccgaccggaccctggtgacgaaagtccgaagtcacccgtcagggaaccagcacagacccacccgcgggggttccagaagtttccactgccgccgcggagtgcgcctcgcccagcagccttgcgcgtgctaccacgctgtcctgccttctcaggtgtcccaagtcaccccttcctcccccaggggtctcctgtctccatgccctcccacctcatttccactagcgatcccattttacatctccattcccacaggtgtcctttcatccccaggagtgtcccacgtcaccttttctgcacccgtgccacctggacccctaaggggacggtactctgccacactcccacatgcctctcctcccatgccacccgtctgtgtcgtggccggggatgcatgaccccttggccttgcgctaacttcaccagcctcgagcgagaccgacagggtgtccaagtgtgtccgtccgtctgtgaaagtcgtccctgcgtttgtctgtgcctgtcactgcatgaggtcgtccgtctgcgcgtgtctgtctccacgggcttctgtccgtctgtctgtcacgtgggtgtctactccgccgctgcaggtctttgggtcgcgtctgtcactgcgctctgtcgtcggtcggcgtctggcactggagtgcgtctgggccccggggtctccgggtctcggctccaagggagggagagagaggggaggtggccacccgggagagcggggaggggcgggggcggagacagtgggcgggggcgggcgggggcgctgtgaggcccggagggggtgtgtgcggggggccggaggcggcggctgtcagagtcggctcagcctgcgccggggaacatcggccgcctccagctcccggcgcggcccggcccggcccggctcggccgcctcaggtgagtctccctccccgcccgggactctccttaaggcccgggtccggggcaccgtgcgctccccgaggggtccaggcccccctaacgggacggctcccgcttccccgggcct

SEQ ID NO: 38909 - DNA, 2300 bp, Homo sapien
attcctggataaacagaaatggtgagagaagaaatgggaaaaatcaaggacatccctgcagtgacagctgtggagggtggggagtttactatgctagactatgtagggaaacgcctcctggcttgacaggttaggtgcctgtgttgacaacggttgctgagagctcaaggtgaaaagagggatagttccaggaaatgataaccctggtgataaactatccctgccctccctatcttcattgtacaggcctagaaactcgtgacgacagaggttaggtgacacctgcgtggcacagttcgtctggagggtgacaggggcaagccttcatcactagcagggccaaaaatccctaaagcctcaggactggggcaggcctcagagcactcgttcacagtttgtttccatcattttatttttttgcggagaagggagtctcgctatgttgcccaggctagtctccaactcctggactgaagcgatcctcctgtctcggcctcccagagtgctgggattacaggcaccgcactaggggccacacgcggccccatcattttaataattcataattaccacgcttagaaacctgcctcagattcattccccccgcagcaacacccaccatccaccctcctgtcccctcccccatgcacagcccttacatctgctcttcagggatctcaactagggcacatggtctggccagtgaggagccttcaactagtgcggccagaacgctgaaggccggatacaaggagcctcggtgtccaggcaggggatttggggttgcctgagattggggcggggaaagccggagacagtgggcacagatggcgaggggttcacctccccaacacccccaacccagcccagtctccgaggcccgagtggctgctttttgcgccacctggcggccgtctccagcgagcggagcgcgggtgaccgtgcctgcgggacccggttcccgtggggcgagcgggcgtggggcccgcccagcttggagagccgggaaccgcgcggcccagggactggcaagactccggattcaacccctgcgaggccccgcaacccggtgcccgcggtccctggcggcggcgcccgcgtgcccgaggcgctgcggggcgctgcggggcgcgcggcggttagagcgagcgtgtgcgcacgcgcccaccccacgccgcgccccgcaccgccgcgcgcgcgcacgcacgcccgacgctggcctgcgccggccgctctcccacgcggggtctcgggggctcctgagccggccgcctccaggaagcaggcgccgcgcggtattgccgcatgcacctcggtcgtggggaccccgctgcagcagccctgtccacacgggtgaactcctggagggcggggcggggggcaatctgcgcgggtcaggcccctcggagcaggctgggggcgcccgagccaggccgctcccacctgccagccgcgtggccaatgaatgctaggcctggtgatgtcatgccccgaccggaccctggtgacgaaagtccgaagtcacccgtcagggaaccagcacagacccacccgcgggggttccagaagtttccactgccgccgcggagtgcgcctcgcccagcagccttgcgcgtgctaccacgctgtcctgccttctcaggtgtcccaagtcaccccttcctcccccaggggtctcctgtctccatgccctcccacctcatttccactagcgatcccattttacatctccattcccacaggtgtcctttcatccccaggagtgtcccacgtcaccttttctgcacccgtgccacctggacccctaaggggacggtactctgccacactcccacatgcctctcctcccatgccacccgtctgtgtcgtggccggggatgcatgaccccttggccttgcgctaacttcaccagcctcgagcgagaccgacagggtgtccaagtgtgtccgtccgtctgtgaaagtcgtccctgcgtttgtctgtgcctgtcactgcatgaggtcgtccgtctgcgcgtgtctgtctccacgggcttctgtccgtctgtctgtcacgtgggtgtctactccgccgctgcaggtctttgggtcgcgtctgtcactgcgctctgtcgtcggtcggcgtctggcactggagtgcgtctgggccccggggtctccgggtctcggctccaagggagggagagagaggggaggtggccacccgggagagcggggaggggcgggggcggagacagtgggcgggggcgggcgggggcgctgtgaggcccggagggggtgtgtgcggggggccggaggcg

SEQ ID NO: 38910 - DNA, 2300 bp, Homo sapien
tttttttttttttgagacagagtttcgctcttgttgcccaggctggagtacaatggcatgatttccgctcactgcaccctccacctcctgggttcaagcgattctcctgcctcagcctcctgagtagctgggattacaagcatgggccaccatgcccagctaatttttttgtatttttagtagagacagggtttctccatgttggtcaggctggtcttgaactcccaacctcaggtgatctgcctgcctcagcctcccaaaatactgggattacaacaggcatgagccaccatgcccggcctctattatatcttgttaaagccattatttggtttttggtctcatacagctgaattgaatattaaccaataaatagaggaaataagaatcttttgtgttagaagatgtggatcaaggtctgtaatagaagtggggttccctgccaggcatggcagctcatgcctgtaatcccaacactttgggaggctgaggcaggaggatcacctgaggtcaggagttcgagaccagcctggccaacatggtgaaaccccacctctgctaaatatacaaaaattagccaggtgtggtggcaggcgcctctagtcccagctactcaggaggctgggaaaggagaatccttgagcccaggaggcagaggttgcagcgagctgagatggcatcatctctacactctagcctgggcgacagagcgagactctgtctaaaaaaaaaaaatggcgcttccttccaaggtgggagacagagataaaagaggggtagggaaattctctgaattggcagaactggtagtagaagcaaggctcattcctggataaacagaaatggtgagagaagaaatgggaaaaatcaaggacatccctgcagtgacagctgtggagggtggggagtttactatgctagactatgtagggaaacgcctcctggcttgacaggttaggtgcctgtgttgacaacggttgctgagagctcaaggtgaaaagagggatagttccaggaaatgataaccctggtgataaactatccctgccctccctatcttcattgtacaggcctagaaactcgtgacgacagaggttaggtgacacctgcgtggcacagttcgtctggagggtgacaggggcaagccttcatcactagcagggccaaaaatccctaaagcctcaggactggggcaggcctcagagcactcgttcacagtttgtttccatcattttatttttttgcggagaagggagtctcgctatgttgcccaggctagtctccaactcctggactgaagcgatcctcctgtctcggcctcccagagtgctgggattacaggcaccgcactaggggccacacgcggccccatcattttaataattcataattaccacgcttagaaacctgcctcagattcattccccccgcagcaacacccaccatccaccctcctgtcccctcccccatgcacagcccttacatctgctcttcagggatctcaactagggcacatggtctggccagtgaggagccttcaactagtgcggccagaacgctgaaggccggatacaaggagcctcggtgtccaggcaggggatttggggttgcctgagattggggcggggaaagccggagacagtgggcacagatggcgaggggttcacctccccaacacccccaacccagcccagtctccgaggcccgagtggctgctttttgcgccacctggcggccgtctccagcgagcggagcgcgggtgaccgtgcctgcgggacccggttcccgtggggcgagcgggcgtggggcccgcccagcttggagagccgggaaccgcgcggcccagggactggcaagactccggattcaacccctgcgaggccccgcaacccggtgcccgcggtccctggcggcggcgcccgcgtgcccgaggcgctgcggggcgctgcggggcgcgcggcggttagagcgagcgtgtgcgcacgcgcccaccccacgccgcgccccgcaccgccgcgcgcgcgcacgcacgcccgacgctggcctgcgccggccgctctcccacgcggggtctcgggggctcctgagccggccgcctccaggaagcaggcgccgcgcggtattgccgcatgcacctcggtcgtggggaccccgctgcagcagccctgtccacacgggtgaactcctggagggcggggcggggggcaatctgcgcgggtcaggcccctcggagcaggctgggggcgcccgagccaggccgctcccacctgccagccgcgtggccaatgaatgctaggcct

SEQ ID NO: 38911 - DNA, 2300 bp, Homo sapien
tcatcacgcctgactgctgaggtagctccttctggaagtttccttttctatgctgtctctctgcctcttcacctagtcctcactccatgccctttgaagtcattagtgtgtgagcttagcctgtttctctttggtgttctctgggcagttttttgtttttgtttttgtttttgtttttgtttttgatggagtcttgctctgtcacccaggctggagtgcagtggcaccatctcagctcactgcagcctctgcttcctgggttcaagcgattctcctgcctcagctacaggtacacgccactacgcctggctaatttttgtattttgttttagtagagaaagggtttcaccatgttggtcagactggtctcgaactcctgacctcaagtgatctcctgccttggcctttcaaagtgctgggattacaggcatgagccaccgtgcctggccctctttgttcagctttccctgtctcctggtttttgtgatgcgccccctgccaggacatggctgggttctctctttttctctttgaaagcggagtcagcccagacagcagcagggtgccgggagaagcagtggtgggagcagaaggttaatggggggatgggagcactccaggcagtagcagggggaggagaggaaggggcagagggaggaggagcctgggtgtgaccagaggagggaagggaggggagggaggctctgcccagctcggctatatcaggacaggaggacctgccatgacaaggccaaggcccggtgaggaatgagggctcccatgccccactgctcccctaggagcagacaggcagtcgtctccagcaccacaaagcacccagctccaagctgcctctgatgcaggagtcagctgtaatatgccctgccctctgtgatgctgcctggaaaatgggtgagtgagtagcttacatgagtgatgtaacaaaatgacccacggatttaccagtggattcctctgctctgccgccaatgcaggaactttatccacggccacatccatctctcaagtgcctttccccagagcagaagcagccagcgctgtgctcagcaattctccacactccagagacctggctgggtggccacttggtgtcccccagctcgcctctcctgctcctggccacagggaaaatgcacctatgacactcactacctccccccatgacacactcatctctgaaacattgctcaactctccagtcagttccaacacctcaaccaccccgacgtccaagtttgccttcaaggttgaaaccactccacccaccgtgttggtctattcagccaccactgagtgcgtgtatccaacgagctttataatcaccatctcccaccccacctccatctgtgtgaccacgacgcaggtggccttcaccagctcttacacctcgactcccgtgacacagaagccagtgaccaccgtcaccagtacttactctatgaccactactgagaaaggaacgtcagccatgacatcttctccctctaccaccactgcaagggaaactcccatagtgacagtgacaccctcctctgtgtcagccacagacacaaccttccacactacaatctcatctacaactagaaccacagaaaggactcccctgcccactggaagcatccatacaaccacgtccccaaccccagtatttactactctcaaaacagcagtgacttccacttcccccatcacttcttcaatcacttccacaaatacagtgacttctatgacaacgaccgcctcccagcccacagccactaatacattgtcatcacccactaggaccattttatcttccacacctgtcctgagcacagaaacaatcaccagtggtatcacaaacaccacccccctatccaccttggtgaccacactccccactaccatcagcaggtctacacctacatctgagaccacctaccctacttctcccaccagcactgtcacagactccactaccaaaatcgcctactccacaagtatgacaggtacattgtccacagagacttctctcccacccacctcttcctctctcccaaccacagaaacagccacgactcctatgacaaacttggtaaccaccaccactgagatctcctcccacagtactcccagcttctcttcatcaaccatctactccacagtcacctcacacagtactcccagattcacttcttcaatcaccactaccgagaccccctcacacagtactcccagattcacttcttcattcaccaataccaagaccacctcacacagatctcccagcttcacttctt

SEQ ID NO: 38912 - DNA, 2300 bp, Homo sapien
ggctgcctttccttggggactggggaactcatgccctgcccccacccacggggctccaggggtgagagaaaggggtgaatggagaatccggtggctgggtgatggggaggaacagcagctggggtatttagggctgggggagtaggggcagaaccaccgatgaatggacaggctcagaaggggagaagatacaaggaatgagagcaagagaaacggggaattgagcaacggggtgaggggggaattaggagctggggtatttaggtcagggggagtcgggggcagaaccgatgaatggacgggctcaaaaggggaaaggatacaaggaatgagagcaagagaaacggggaactgggcaacagggtgaccgagggaacagcacccggggtatcctaagacacagaggctatctataccttgctagggaccaggatgtgaggagaggagggaggatttagggctgggggactggggtgcaggatggatgaaggaacggggtcaaaaggggaggacgtctaaggaatgagagcaagagatgcagcagggagttagatcaggagagggcaggagatgggatggggctgcaggctgcctccaggttcaaagtaagaaacaggcagtagggaattgagagaaaataagaaccagggccagagaccaggtgaaggacgtgaggattggaggatccgagagaggcaatggcaacacgagggctgagacgggagggcagagtaggaccgagaattgaccaagtctatgtggttttcacaacgacggcgtgagctatcatacaggaatgctgtacccgttttgcaggtgaggaaactgaggctcgttactgacttgcccaagattccacagtggaagagcctggacgtgaactgcgtctccaggtgggtttcagccaagttggaaggagaaggatgggatttgggggaacagtctcatcttgcccaagaacagcaggagcctgggctgcccgcgtcctggggccacctcttgaaatggacgcaatgcagacccttgtgtccggggcagggcggagggggtggtgaaggggccccgcagggctcacactgaggacgaggtcatctcgggtctcttgatgtgcacctgtcagagtcacagtgagggacgggaacgcggagccactggtttgggctgacagggaggtcactgctgatccgagcccagccccctccctgccctggtgggggtcggggagggattctggaatggaggctgggagagttccttggggtccccctctttagcccctcaccttcatagtggtgtccacgttctccaaggccacatggaaatttgtatccttgtctagagagagagaggagcggagaaatagaaggggagagggaggggacggaagggagagggggacagagtaaatgcgaggaaggcaaggagggcgtctgtcctcgcagtggtgcccaggaaagcctctgcctgcttccccaggaggcaggactcacctgttccgtcgtcctcgaaaccccagtttgaaaaagtgcccacgacttcctcatcccaggtctcgaaccatttcctgtcctggtcccaggacctaggtggggccgccgcgcggtcagacagagccggcccgcctgggaccccttggctgccctcgccccccggccccgccccccgcacgctcaccggcctcggcgctggccgccccaccatccggagcgcaccgcccggacgcccagcgccagcagcagcagcaccagcagcgcggcgccggccgtcaggcccccgaccagcgccctccagtggacggccacctcgcagcgcgggccagagaaccagtgcgtgtcggtggagtagcagctgcgggagatcgcagggtcagaccctcttcacctccgggctcggggtccacgcgtgcacctgggccccgcgggggcgggtgagggggcggggctccagcctagggcagcgggggggttccaccctagggcaagctggggggttccaccctagacaagcggccggaatccaccgtagaacaagcggacgggtctccaccctagaacgagggggcggggctctaccctaggtgagggggcgggattccactttagatcaagtgggcagggcttcaccctaaaaggagggggcggggatccaccctagaacaagggggcggggctccaccccagaagaagggggcaaggttcagccctagaacgaaggggcggggccccaccctagaatgagtgggcggggtctatcccagaaccaggggattggactcaaccccatcaaggaggcggggctac

SEQ ID NO: 38913 - DNA, 2300 bp, Homo sapien
caagcatgagccaccacgcctggccccgtcagccatttaactggtggggattccccgggtgcacctgaggctactccaagtcaagagatgatactgtcacacacccctctggactccctctctcccgaccagggctagcagcatgtgcagtgcctccgtgaggtttggaaagacccatccctccagcagataaagcccccaggatgagggcaggcagagatgactgtctatgtgacaaaagccccttcatcctcccggggggagcctggagagcagaagctgtggatttcagccgcccctcagccaggagctgtgtgcagaccatcccctgcacaaccacaggcacccacaggtctccacagtgacctcttcagcacccccaaagcaagatgaggtcacagcacgggtctccagccctgtggcagccccttgccatgcaaaggggaggaggccacctgcagccctgctgcctgaggcaggggcatgtactattaccacccaggagcactggacctggagcatcagcccaggagcactcacctggtgtcactgtagtaacggacgcgcagagccggagagccagcgtcagaatccagatcaccagcatctcccagggaacgggcccctggctgcccgtcttccctcgtcaggagggaccaagaaatgaaagcttcccaggaagggatcagctataaaaaggaccccagagaactttgccttgaagcagagcaaagtgcctggacagtgcctgtcccagggtagaggtgaggtgatgctgttgggtcggtggcacgtggtgaccacagggagttggacaaagtgcagcctgtccaccctcctcccttataagtcctggagcagtgaccgccctcagccagggtccctctctttcagcggaagtcagagccactgggggtggggcagtgcaggagggagggacggaggctagaggtgtgagcacaccactggtgacaaaaggtgggggccaagaagcaccggggagcaggtgaccatggagggagaagttcagaacggtggaaggggcagctggcaacaggccagaccaagtgaaggactctccactcccacccccgagaagcccctctctcttccagccatccctccccatcccccacctcaacatggtcctttccaaatgtccagggctttccctggggtccccagtttccagcccttctcctgggcggggtgcccactcacacctcagactttatggtcctggtccccacccctggccagacacagaggtgacgaaatgccatggcccatccctgcccagggcaaagatcacaggggcctctcccaagcccacaccaaaagacccaaggggacacgttatttctgatcaccctcgactcctcaggcagccctgactgcccacaacagcaggaacagaagggcctggcgccagcatagacaggctctgctgtgtgagtttgctatcagggtttgggggccttgtgggggatcaagatctttggggaggctcagctttacccatccttgcaaaaggtggctggaacaggcagccctagccgctgggccaccccactccctgacccaacaccagaggtctaattgctccctaagcccccagtgtcaaggtcagggcagtggtgggggtggggagagcacagatgacaaagaccaaggggcccctgccccgagtcactctccaacaaaatgggttccccctcaacctctgtgttttctatgaggaatgtcgtggcccccaagggctgcccacagaccttcctccctgggagacacgggtgctcccaggatcctcctacagtgccacctctggaaatccctgttctccaaccaagtggagaccactgaggggataaaaaggagacagagagctgctgctttttacaataaactctatattgtgcacatggagacctggagatgtgccgacttcctgttcccaaagccaatcttccccgccaaggagactgaggatttcagggctcagagttaccgcaggaatcgagttgacaccagggagagaggggggaggaggggaatcggaggggatgggtttaaaaggcagaggggagggagatggaagggaatgaggaggagggagactgagggggctgcctttccttggggactggggaactcatgccctgcccccacccacggggctccaggggtgagagaaaggggtgaatggagaatccggtggctgggtgatggggaggaacagcagctggggtatttagggctgggggagtaggggcagaaccaccgatgaatggacaggctca

SEQ ID NO: 38914 - DNA, 2300 bp, Homo sapien
caggctcaacggatacaacactgttacctgccagcaccaccacctcaggccccagtcaggaatcaacaacttcccacagcagctcaggttcaactgacacagcactgtcccctggcagtaccacagccttatcctttggtcaagaatctacaaccttccacagcaacccaggctccactcacacaacactcttccctgacagcaccacaagctcaggcatcgttgaagcatctacacgcgtccacagcagcactggctcaccacgcacaacactgtcccctgccagctccacaagccctggacttcagggagaatctactgccttccagacccacccagcctcaactcacacaacgccttcacctcctagcaccgcaacagcccctgttgaagaatctacaacctaccaccgcagcccaggctcgactccaacaacacacttccctgccagctccacaacttcgggccacagtgagaaatcaacaatattccacagcagcccagatgcaagtggaacaacaccctcatctgcccactccacaacctcaggtcgtggagaatctacaacctcacgcatcagtccaggctcaactgaaataacaacgttacctggcagtaccacaacaccaggcctcagtgaggcatctaccaccttctacagcagccccagatcaccaaccacaacactctcacctgccagcatgacaagcctgggcgtcggtgaagaatccaccacctcccgtagccaaccaggttctactcactcaacagtgtcacctgccagcaccaccacgccaggcctcagtgaggaatctaccaccgtctacagcagcagccgaggctcaactgaaaccacagtgttccctcacagcaccacaacctcagttcatggtgaagagcctacaaccttccacagccggccagcctcaactcacacaacactgttcactgaggacagcaccacctcgggcctcactgaagaatctacagccttccccggcagcccagcctccacccaaacagggttacctgccacactcacaaccgcagacctcggtgaggaatcaactacctttcccagcagctcaggctcaactggaacaaaactctcacctgcccgctccaccacctctggcctcgttggagaatccacaccctcacgcctcagtccaagctcaaccgaaacaacaactttacctggcagtcccacaacaccaagcctcagtgagaaatcaaccaccttctacactagccccagatcaccagatgcaacactctcacctgcaaccacaacaagctcaggcgtcagcgaagaatccagcacatcccacagtcaaccaggctcaacgcacacaacagcattccctgacagcaccaccacctcagacctcagtcaggaacctacaacttcccacagcagccaaggctcaacagaggcaacactgtcccctggcagtaccacagcctcatcccttggtcaacaatctacaaccttccacagcagcccaggcgacactgaaaccacactcttacctgacgacaccataacctcaggcctcgtggaggcatctacacccacccacagcagcactggctcgctacacacaacactgacccctgccagctccacaagcgctggccttcaggaagaatctaccactttccagagctggccaagctcaagtgacacaacaccttcacctcccggcaccacagcagcccctgttgaagtatccacaacctaccacagccgcccgagctcaactccaacaacacacttttctgccagttccacaaccttgggccgtagtgaggaatcaacaacagtccacagcagcccaggtgcaactggaacagcactcttccctacccgctctgcaacctcagttcttgttggagaacctacaacgtcacccatcagttcaggctcaacggaaacaacagcgttacctggcagtaccacaacagcaggcctgagtgagaaatctaccaccttctacagtagccccagatcaccggacacaacactctcacctgccagcacgacaagctcaggcgtcagtgaagaatccaccacctcccacagccgaccaggctcaacgcacacaacagcattccctggcagtaccaccatgccaggcgtcagtcaggaatctacagcttcccacagcagcccaggctccacagacacaacattgtcccctggcagtaccacagcatcatcccttggtccagaatctactactttccacagcagcccaggctccactgaaacaacactcttacctgacaacaccaca

SEQ ID NO: 38915 - DNA, 2300 bp, Homo sapien
tcaacgcacacaacagcattccctgacagcaccaccacgccaggcctcagtcggcattctacaacttcccacagcagcccaggctcaacggatacaacactgttacctgccagcaccaccacctcaggccccagtcaggaatcaacaacttcccacagcagcccaggttcaactgacacagcactgtcccctggcagtaccacagccttatcctttggtcaagaatctacaaccttccacagcagcccaggctccactcacacaacactcttccctgacagcaccacaagctcaggcatcgttgaagcatctacacgcgtccacagcagcactggctcaccacgcacaacactgtcccctgccagctccacaagccctggacttcagggagaatctaccaccttccagacccacccagcctcaactcacacgacgccttcacctcctagcaccgcaacagcccctgttgaagaatctacaacctaccaccgcagcccaggctcgactccaacaacacacttccctgccagctccacaacttcgggccacagtgagaaatcaacaatattccacagcagcccagatgcaagtggaacaacaccctcatctgcccactccacaacctcaggtcgtggagaatctacaacctcacgcatcagtccaggctcaactgaaataacaacgttacctggcagtaccacaacaccaggcctcagtgaggcatctaccaccttctacagcagccccagatcaccaaccacaacactctcacctgccagtatgacaagcctaggcgtcggtgaagaatccaccacctcccgtagccaaccaggttctactcactcaacagtgtcacctgccagcaccaccacgccaggcctcagtgaggaatctaccaccgtctacagcagcagcccaggctcaactgaaaccacagtgttccctcgcagcaccacaacctcagttcgtggtgaagagcctacaaccttccacagccggccagcctcaactcacacaacactgttcactgaggacagcaccacctcgggcctcactgaagaatctacagccttccccggcagcccagcctccacccaaacagggttacctgccacactcacaaccgcagacctcggtgaggaatcaactacctttcccagcagctcaggctcaactggaacaacactctcacctgcccgctccaccacctctggcctcgttggagaatccacaccctcacgcctcagtccaagctcaaccgaaacaacaactttacccggcagtcccacaacaccaagcctcagtgagaaatcaaccaccttctacactagccccagatcaccagatgcaacactctcacctgcaaccacaacaagctcaggcgtcagtgaagaatccagcacatcccacagtcaaccaggctcaacgcacacaacagcgttccctgacagcaccaccacctcaggcctcagtcaggaacctacagcttcccacagcagccaaggctcaacagaggcaacactgtcccctggcagtaccacagcctcatcccttggtcaacaatctacaaccttccacagcagcccaggcgacactgaaaccacactcttacctgacgacaccataacctcaggcctcgtggaggcatctacacccacccacagcagcactggctcgctacacacaacactgacccctgccagctccacaagcgctggccttcaggaagaatctaccactttccagagctggccaagctcaagtgacacaacaccttcacctcccggcaccacagcagcccctgttgaagtatccacaacctaccacagccgcccgagctcaactccaacaacacacttttctgccagttccacaaccttgggccgtagtgaggaatcaacaacagtccacagcagcccaggtgcaactggaacagcactcttccctacccgctctgcaacctcagttcttgttggagaacctacaacgtcacccatcagttcaggctcaacggaaacaacagcgttacctggcagtaccacaacagcaggcctgagtgagaaatctaccaccttctacagtagccccagatcaccggacacaacactctcacctgccagcacgacaagctcaggcgtcagtgaagaatccaccacctcccacagccgaccaggctcaacgcacacaacagcattccctggcagtaccaccatgccaggcgtcagtcaggaatctacagcttcccacagcagcccaggctccacagacacaacactgtcccctggcagtaccacagcatc

SEQ ID NO: 38916 - DNA, 2300 bp, Homo sapien
tgttggagttgagctcgggctgccgtgggaggttgtagatagctcaacaaaggctgatgtggtagtaggaggtgcaggggtagtgtccttcgagttaggccagctctggaaggtggtagattctccctgacgggttgtagagccggcaggggacagtgttgtgtgtggcgatccagtgctgctgtggacgggcgtagatgcttcaaggaggcctgaggctgtggtgttgtcaggtaagagtgttgtttcagtggagcctgggccgctgtggaaggtagtagattctggaccaagggatgatgctgtggtactgccaggggacagtgttgtgtctgtggagcctgggctgctgtgggaagctgtagattcctgactgacgcctggcatggtggtactgccagggaatgctgttgtgtgcgttgagcctggtcggctgtgggaggtggtggattcttcactgacgcctgagcttgtcgtgctggcaggtgagagtgttgtgtccggtgatctggggctactgtagaaggtggtagatttctcactcaggcctgctgttgtggtactgccaggtaacgctgttgtttccgttgagcctgaactgatgggtgacgttgtaggttctccaacaagaactgaggttgcagagcgggtagggaagagtgctgttccagttgcacctgggctgctgtggactgttgttgattcctcactacggcccaaggttgtggaactggcagaaaagtgtgttgttggagttgagctcgggcggctgtggtaggttgtggatacttcaacaggggctgctgtggtgccgggaggtgaaggtgttgtgtcacttgagcttggccagctctggaaagtggtagattcttcctgaaggccagcgcttgtggagctggcaggggtcagtgttgtgtgtagcgagccagtgctgctgtgggtgggtgtagatgcctccacgaggcctgaggttatggtgtcgtcaggtaagagtgtggtttcagtgtcgcctgggctgctgtggaaggttgtagattgttgaccaagggatgaggctgtggtactgccaggggacagtgttgcctctgttgagccttggctgctgtgggaagctgtaggttcctgactgaggcctgaggtggtggtgctgtcagggaacgctgttgtgtgcgttgagcctggttgactgtgggatgtgctggattcttcactgacgcctgagcttgttgtggttgcaggtgagagtgttgcatctggtgatctggggctagtgtagaaggtggttgatttctcactgaggcttggtgttgtgggactgccgggtaaagttgttgtttcggttgagcttggactgaggcgtgagggtgtggattctccaacgaggccagaggtggtggagcgggcaggtgagagtgttgttccagttgagcctgagctgctgggaaaggtagttgattcctcaccgaggtctgcggttgtgagtgtggcaggtaaccctgtttgggtggaggctgggctgccggggaaggctgtagattcttcagtgaggcccgaggtggtgctgtcctcagtgaacagtgttgtgtgagttgaggctggccggctgtggaaggttgtaggctcttcaccacgaactgaggttgtggtgctgcgagggaacactgtggtttcagttgagcctgggctgctgctgtagacggtggtagattcctcactgaggcctggcgtggtggtgctggcaggtgacactgttgagtgagtagaacctggttggctacgggaggtggtggattcttcaccgacgcctaggcttgtcatactggcaggtgagagtgttgtggttggtgatctggggctgctgtagaaggtggtagatgcctcactgaggcctggtgttgtggtactgccaggtaacgttgttatttcagttgagcctggactgatgcgtgaggttgtagattctccacgacctgaggttgtggagtgggcagatgagggtgttgttccacttgcatctgggctgctgtggaatattgttgatttctcactgtggcccgaagttgtggagctggcagggaagtgtgttgttggagtcgagcctgggctgcggtggtaggttgtagattcttcaacaggggctgttgcggtgctaggaggtgaaggcgtcgtgtgagttgaggctgggtgggtctggaaggtggtagattctccctgaagtccagggcttgtggagctggcaggggacagtgttgtgcgtggtgagccagtgctgctgtggacgcgtgtagatgcttcaacga

SEQ ID NO: 38917 - DNA, 2300 bp, Homo sapien
cacccacccacagcagcactggctcgctacacacaacactgacccctgccagctccacaagcactggccttcaggaagaatctaccactttccagagctggccaagctcaagtgacacaacaccttcacctcccagcaccacagcagtccctgttgaagtatccacaacctaccacagccgcccgagctcaactccaacaacacacttttctgccagttccacaaccttgggccgtagtgaggaatcaacaacagtccacagcagcccaggtgcaactggaacagcactcttccctacccgctctgcaacctcagttcttgttggagaacctacaacgtcacccatcagttcaggctcaacggaaacaacagcgttacctggcagtaccacaacagcaggcctgagtgagaaatctaccaccttctacagtagccccagatcaccggacacaacactttcacctgccagcacgacaagctcaggcgtcagtgaagaatccaccacctcccacagccgaccaggctcaatgcacacaacagcattccctagcagtaccaccatgccaggcgtcagtcaggaatctacagcttcccacagcagcccaggctccacagacacaacactgtcccctggcagtaccacagcatcatcccttggtccagaatctactaccttccacagcagcccaggctccactgaaacaacactcttacctgacaacaccacagcctcaggcctccttgaagcatctacacccgtccacagcagcactggatcgccacacacaacactgtcccctgccggctctacaacccgtcagggagaatctaccaccttccagagctggccaaactcgaaggacactacccctgcacctcctactaccacatcagcctttgttgagctatctacaacctcccacggcagcccgagctcaactccaacaacccacttttctgccagctccacaacattgggccgtagtgaggaatcgacaacagtccacagcagcccagttgcaactgcaacaacaccctcgcctgcccgctccacaacctcaggcctcgttgaagaatctacgacctaccacagcagcccgggctcaactcaaacaatgcacttccctgaaagcaacacaacttcaggccgtggtgaagaatcaacaacttcccacagcagcacaacacacacaatatcttcagctcctagcaccacatctgcccttgttgaagaacctaccagctaccacagcagcccgggctcaactgcaacaacacacttccctgacagctccacaacctcaggccgtagtgaggaatcaacagcatcccacagcagccaagacgcaacgggaacaatagtcctacctgcccgctccacaacctcagttcttcttggagaatctacgacctcacccatcagttcaggctcaatggaaacgacagcgttacccggcagtaccacaacgccaggcctcagtgagaaatctaccactttccacagtagcccgagctcaactccaacaacccacttttctgccagctccacaaccttgggccgtagtgaggaatcgacaacagtccacagcagcccagttgcaactgcaacaacaccctcgcctgcccgctccacaacctcaggcctcgttgaagaatctacggcgtaccacagcagcccgggctcaactcaaacaatgcacttccctgaaagctccacagcttcaggtcgtagtgaagaatcaagaacttcccacagcagcacaacacacacaatatcttcacctcctagcaccacatctgcccttgttgaagaacctaccagctaccacagcagcccgggctcaattgcaacaacacactttcctgagagctccacaacctccggccgtagtgaggaatcaacagcatcccacagcagcccagatacaaatggaatcacacccttacctgcccattttactacctcaggccgcattgcagaatctaccaccttctatatctctccaggctcaatggaaacaacattagccagcactgccacaacaccaggcctcagtgcaaaatctaccatcctttacagtagctccagatcaccagaccaaacactctcacctgccagcatgacaagctccagcatcagtggagaacccaccagcttgtatagccaagcagagtcaacacacacaacagcgttccctgccagcaccaccacctcaggcctcagtcaggaatcaacaactttccacagtaagccaggctcaactgagacaacactgtcccctggcagcatcacaacttca

SEQ ID NO: 38918 - DNA, 2300 bp, Homo sapien
gggactccctccctccccctgggaccccttcccttccccctgggactccctccctccccctgggaccccttcccttccccctgggactccctccctccccctgggacccctcccttcccccctggattccctccctccccctgggaccccttccccttccccctgggactccctcccctccccctgggaccccttcccttccccctgggactccctccctccccctgggaccccttcccttcccccgggactccctcccttcccccgggactccctcctcccccaggactccctcctctccttaggactccctccctctccctgggacactctccctacccctgggactcccttctccccctaggactccctcccttctcctgggactccctcctcccccaggactccctcctcaccctggggccaccccttcccctgggactcccccctcccccgccactccctcctctccctaggactccctccctccccctgggactccctccctccccctggggttccctcctccccgccagggctccctcttcctcctggggctccccctttcccgggtctgccccttggcctcacctcttctctcccgtcccccagctccacatccagaggccggagatggtagcatccactgtgtgagccaacgggggcctcccaccctcatctagctctgttcaggagagctgcaaacacagagcccaccacaagcctccggggcgggtcaagaggagaccgaagtcaggccctgaagccggtcctgctctgagctgacagacttggccagtcccctgcctgtgctcctgctggggaaggctgggggctgtaagcctctccatccgggagcttccagactcccagaagcctcggcacccctgtctcctcctgggtggctccccactctggaatttccctaccaataaaagcaaatctgaaagctcagaatgagaagtgagaggtttccttctcctccttctgcagttggggtcaggttaggggtcagagccctcctgggatgggatttctcccaggactggctgctgaatggggcatggaacgaatgctctgggccccttcctgtgtctttgcagggagccccctccccggctccagtcaggacaggtctaggcctgcctctgctgaggtccctgtggcagaaaagcctaatgtcaggttctggggacaggagaggacctcagattcaaccccagttggccagggagtgagcacttggctctgctgagcttgcacaaggcagggtcactccagatggccatgggagctgtgcttacctcggaacccacagaccaaacccaagaactccctgcccaggcatggccatgtcttcagggcatactcataggacaataagaagggttattttatttatttatttttgccgagacagagtcttgctctgttgcccaggctggagtacggaggcacgatcttggctctctgcaacctccgcctcccaggttcaagcgattctcctgcctcagcctcctgagtagctgggattacaggcgcccgccaccaagtctggctgatttttgtatttttagtagagatggtgtttcatcatgttggccaggttggtctcaaactcctcatctcaagtgatcttcccgcgtcagcctcccaaagtgctgggattacaggtgtgagccaccatacccggccaataagaagggttagaaaagagacaaagggggtgtccctgctaggggttagggtcaaatgcaggtggtaccctcctcctttcccagctcaggcccagtccctcttgcccatctcccaccaccctcggtcgggggatctcatcagttcccccctggctcctacaggccctctgggctgcccctctgttggggtgataaagctgataaccctcatgcctatgggctgccgggccagggagaggcaccccctccctctgccctttggcctgaaacaggccctgcgccccaagtcatgagggaagcttccagactgactcaggctcaggctggcccctgatccccagtgtctcagggaccaaaggtctctggcacccatttatttatcagtttccttctctgaggctcatttcgccagctcctctgggggtgacaggcaagtgagacgtgctcagagctccgatgccaaggccagggaccatggcgctgtgtctgctgaccttggtcctctcgctcttgcccccacaagctgctgcagaacagggtgagtgacccccacgccccgctgcccaagaggcccccatcccaggggccagcctgctctgtctg

SEQ ID NO: 38919 - DNA, 2300 bp, Homo sapien
cattcctgaggctagcaccctttcaacaactcctgttgactccaacagtcctgtggtcacttctactgaagtcagttcatctcctacacctgctgaaggtaccagcatgccaatctcaacttatagtgaaggaagcactccattaacaggtgtgcctgtcagcaccacaccggtgaccagttctgcaatcagcaccctttcaacaactcctgttgacaccagcacacctgtgaccacttctactgaagcccattcatctcctacaacttctgaaggtaccagcatgccaacctcaactcctagtgaaggaagtactccattaacatatatgcctgtcagcaccatgctggtagtcagttctgaggatagcaccctttcagcaactcctgttgacaccagcacacctgtgaccacttctactgaagccacttcatctacaactgctgaaggtaccagcattccaacctcaactcctagtgaaggaatgactccattaactagtgtacctgtcagcaacacgccggtggccagttctgaggctagcatcctttcaacaactcctgttgactccaacactcctttgaccacttctactgaagccagttcatctcctcccactgctgaaggtaccagcatgccaacctcaactcctagtgaaggaagcactccattaacaagtatgcctgtcagcaccacaacggtggccagttctgaaacgagcaccctttcaacaactcctgctgacaccagcacacctgtgaccacttattctcaagccagttcatctcctccaattgctgacggtactagcatgccaacctcaacttatagtgaaggaagcactccactaacaaatatgtctttcagcaccacgccagtggtcagttctgaggctagcaccctttccacaactcctgttgacaccagcacacctgtcaccacttctactgaagccagtttatctcctacaactgctgaaggtaccagcataccaacctcaagtcctagtgaaggaaccactccattagcaagtatgcctgtcagcaccacgccggtggtcagttctgaggttaacaccctttcaacaactcctgtggactccaacactctggtgaccacttctactgaagccagttcatctcctacaatcgctgaaggtaccagcttgccaacctcaactactagtgaaggaagcactccattatcaattatgcctctcagtaccacgccggtggccagttctgaggctagcaccctttcaacaactcctgttgacaccagcacacctgtgaccacttcttctccaaccaattcatctcctacaactgctgaagttaccagcatgccaacatcaactgctggtgaaggaagcactccattaacaaatatgcctgtcagcaccacaccggtggccagttctgaggctagcaccctttcaacaactcctgttgactccaacacttttgttaccagttctagtcaagccagttcatctccagcaactcttcaggtcaccactatgcgtatgtctactccaagtgaaggaagctcttcattaacaactatgctcctcagcagcacatatgtgaccagttctgaggctagcacaccttccactccttctgttgacagaagcacacctgtgaccacttctactcagagcaattctactcctacacctcctgaagttatcaccctgccaatgtcaactcctagtgaagtaagcactccattaaccattatgcctgtcagcaccacatcggtgaccatttctgaggctggcacagcttcaacacttcctgttgacaccagcacacctgtgatcacttctacccaagtcagttcatctcctgtgactcctgaaggtaccaccatgccaatctggacgcctagtgaaggaagcactccattaacaactatgcctgtcagcaccacacgtgtgaccagctctgagggtagcaccctttcaacaccttctgttgtcaccagcacacctgtgaccacttctactgaagccatttcatcttctgcaactcttgacagcaccaccatgtctgtgtcaatgcccatggaaataagcacccttgggaccactattcttgtcagtaccacacctgttacgaggtttcctgagagtagcaccccttccataccatctgtttacaccagcatgtctatgaccactgcctctgaaggcagttcatctcctacaactcttgaaggcaccaccaccatgcctatgtcaactacgagtgaaagaagcactttattgacaactgtcctcatcagccctatatctg

SEQ ID NO: 38920 - DNA, 2300 bp, Homo sapien
atattaagaccttacgagattcacaacagggaatttaattttaattttaattttttttttttgtagagagagtcttgatctgtcacccaggctggagtgcagtggcatagatcatggcacatgcagccttgaagtcctgggctcaagcgaacctcctgcttcagcctcctgaatagctgggacttcaggtgtgagccatcaggtagctaatatatatattttttgagatggagtctcactctgttgcccaggctggagtgcaatggtgcgatctaggctcgctgcaacctctgcctcccaggtttaagcagttctcctgcctcagcctaccgagtagctaggaaggctaggttttgttttgttttgttttgttttttagtagagacgaggttttgccatgttggccaggctggtctcgaactcctggcctcaagtgattctcccaaagtgctgagattacaggtgtgagccactgcacctggcctgtttttctgtcttcaccttggttgcccgtctggttggtagcattcaacagtgctgaccccctcgtccttctagaagtgcagcatttcctgccttggcctctgtgaccctctctcttttggatttccacctacctctctggcatctatgtctcagcccctccacctttcacctggaccctgaggtcaggctcccttctgtcctctcggctgctgccagagtgagctcttacagcttcagtttcctacttaaattccgccatgtggataaaaaggtacaaacatgcataggtatgtcatgaattaattacggtaaaatgataattgtagaacagaagtggtggagatatgggtgttcaccgcaattctttcaacttctttgtgctttgaatttttcataaaatgaggctgtgcatgttggctcacgcctgtaatcccagcactttgggaggccaaggtgggtggatcacttgaggtcagaagttcgagaccagcctggccaacatagtgaaaccccatctctactaaaaatacaaaaattagctgggcgtggcagtgagtgcccgtaatcccagctactttggaggctgaggcaggaggatcgcttgaacccgggaagcggaggttgctgtgagctaagatcacaccactgcactccagcctgggcgacagagcgaggctttgtctcaaaataaaaattattttttcatgaaatgttgagggaaatctcctgcaatgattcttttgtcttttttgataaaatgcaggcttctctgccaacactctcgtatcctctccacacacatcatcctaaatggggatgtacccttgctgctcccagtacctggaacaggaacattcttctcagtgttctccagccctctatgccctcttactgttttattttttagacagggtcttgctctgtcatccaggctggagtgcagtgtcaccatcatggctcactgcagcctcgacctcccaggttcaagtgattctcctgcctcagtctcctgagtatctgggattacaggtatgcgctaccatgcacggctagcgaattttttatggagactgggtctcaccatattgcccaagctggtcttgaactcctgggctgaagcaatcctcccgccttctttaaactcatctcattgatgccttctccaggaagcctgtgctgttccctcagcaagaggcttcttacctgatcccccacagcctctcctacagctcagcaacggtttatggaatgaaaggcctctcttgaagctttgcaggcacctgcctgcctgaggtgttagcaaatctgcagacccgccctgaggccatgtgtctagttaccctggtctctgaatcacagatgagctctcatttcttcccacaaataaaccctgtgaccctccaccctctactcagagaacccgccctcaggtagttccctgtttgtgacatacacacacttagccctgaggctggactgacaggccgacctggctggtggactccagcccaagcctgccagctgcctgccggggtgggggccttggcgggagaggacggggccgggtggggaggaaggcggggcctgaggctgtgcgaggcgagtcggtgtgtccctggctgggacggaagttgcaccacaagtacaattagtttcagttttgtttcttttccaggcacccagcaacggcggcctccaggcctcaggccccctcaccatcctagaggtcaagatcagctctggctaggtaaggggtggggggcggcacagctataggaaggaccgagcggagggagtagggggaggggagtgga

SEQ ID NO: 38921 - DNA, 2300 bp, Homo sapien
ctgactggttttcgtatttttttggtggagacggggtttcactgtgttggccgggctggtctccagctcctaaccgcgagtgatccgccagcctcggcctccggaggtgccgggattgcagacggagtctcgttcactcggtgctcaatgttgcccaggctggagtgcagtgtcgtgatctcggctagctacaacctccacctcccagccgcccgccttggcctcccaaagtgccgagattacagcctctgcccggccgccaccccctctgggaagtgcggagtgtctctgcctggccgcccattgtctgggatgtgaggagcccctctgcccggctgcccagtctgggaagtgaggagcgcctcttcctggccgccatcccatctaggaagtgaggagtgtctctgcccggctgcccatcatctgagatgtggggagcacctcagccccgccgccccgtctgggatgtgaggagcgcctctgcccggccgcgacccagtctgggaggtgaggagcgtctctgcccagccgccccgtctgagaagtgaggagcccctccgcctggcagccgccccgtctgagaagtgaggagcccctccgcccggcagccgccccgtccgggagggaggtggggggtcagccccctcccggccagccgcgccgtccgggagggaggtggggggtcagcccccgcccggccagccgcgccttccgggagggaggtgggggatcagtccccgcccggccagccgccccgcccgggagcgaggtggggggcgcctccgcccggccgctgtcccgtccgggaggtggggggtcgcctctgcccggccgccccgtctgggaggtgaggagcccctctgcccggccaccaccccgtctgggaggtgtacccaacagctcattgagaacgggccatgatgacgatggcggttttgtggaatagaaaagggggaaaggtggggaaaagatagagaaatcagattgttgccgtgtctgtgtagaaagaagtagacatgggagacttcattttgttctgtactaagaaaaattcttctgccttgggatgctgttaatctaagaccttacccccaaccccgtgctctctgaaatatgtgctgtgtccactcagggttaaatggattaagggcggtgcaagatgtgctttgttaaacagatgcttgaaggcagcatgctccttaagagtcatcaccactccctaatctcaagtacccagggacacaaacactgcggaaggccgcagggtcgtctgcctaggaaaaccagagacctttgttcacttgtttatctgctgaccttccctccactattgtcctatgaccctgccaaatccccctctgcgagaaacacccaagaatgatcaataaaaaattaaaaaaaaaaaaaaaaaaagaaaaccaagaagatgggaaaaccatgcagaattgatttgacgaggaaagccttggtctctaatacatgcaatgactagaacagtatttggtcaaagaaccacataagctctgtaccctggaggaaatgtatgcaggcaaggactagtaaaataaaaaataataataattaaaaaaaaaaaaaagaaaggctggacgcggtggctcacacctgtaatcccagcactttgggaggctgaggtgggtggatcacctgaggtcaggagtttgagaccagcctggccactacggtgaaaccccatctctactaaaaatacaaaaattacccgggtgtggtggcgcatgcctgtaatcccagctactggggagtctgaggcaggagactcgcttgaacctgggaggcagagggtgcagcgagccgagttcaccccattgcactccagcctgggtgtcacagtgagactctgtctcaaaaaaataataaataaataattaaatccacttgcagtggtcaaaaataaatgttaaataaatgggtgagaaatcttgcggagaaatagactcctggcactataaaaatgatcctggagaataatttggctagactttgcaagaatgacaaaaatgattataagaatcagttgtctcactttggggaatacattctgggaaaataatgtaagagaaaaaatatttgcatacagacatttgaggctgctctgtatattacaggcaagaactggaaactgttcggctgcagggtgacagctaactagattgtggtttattaggggaatgagcctttctttgtgtatgacaactatgaaaactattgagaagaaatagttacgtgatacagtcataatcctcaaaaacggagaatcagga

SEQ ID NO: 38922 - DNA, 2300 bp, Homo sapien
ctgttgccatggattctcccaactgaaccccaccacatacactaaacccaacagtccgtggaccccaagtatgccatctctccaatacaggaccccctgggcagcaccctggccacccttccatccacaacatccagaccacacggccaagggcacctgaccctgtcaaaaccccaaatccagctgggcgcggtggctcatgcctgtaatcccagcatttgggaggccgaggcagccggatcacgaagtcaggagttcgagaccagcctgaccaacatggtgaaaccccgtctctactaaaatacaaaaattagccgggcgtggtggtgcacacctgtaatcccagctactcgggaggctgaggcaggagaaccacttgaacctgggaggcggagattgcagtgagccaagatagtgctactgcactcagcctgggcaacaaaataagactccgtctcaaaacagaaaaacaaaaaaaacaaaaaacaacaacaacaacaaaatccactagtctagccctacatgctcacccactgctagccagtttccaccctctacagcagaggtacccaacctctgggccaggggcccgtactggtccatagcctgttaggaaccaggctgcataacaggaggtgagtggcaggtgagtgaaatttcatctgtagttacagccactcctcatcactcgcattaccaccagagctccactccctgtcagatcagcggcggcattagattctcataggagctcgaaccctattctaaactgttcatgtgagggatctaggttgcaagctccctatgagaatctaatgcctgatgatctgtcacggtctcccatcacccctagatgggaccatctagttgcaggaaaacaagctcagggctcccactgattctacacgatggtgaattgtggaattatttcattatatatattacaatgtaataataatagaaataaagcacacaataaatgtaatgtgcttgaatcatcccgaaaccatcccaccctggtctgtgaaaaaattgtcttccatgaaaccagtccctggtgccaaaaacgttgaggaccactgctccacagaatctatcggtcactcttcctcccctcacccccttgccctaaaagcacaccctgcaaacctgccatgaattgacactctgtttctatcccttttccccttgtgtctgtgtctggaggaagaggataaaggacaagctgccccaagtcctagcgggcagctcgaagaagtgaaacttacacgttggtctcctgtttccttaccaagcttttaccatggtaacccctggtcccgttcagccaccaccaccccacccagcacacctccaacctcagccagacaaggttgttgacacaagagagccctcaggggcacagagagagtctggacacgtggggagtcagccgtgtatcatcggaggcggccgggcacatggcagggatgagggaaagaccaagagtcctctgttgggcccaagtcctagacagacaaaacctagacaatcacgtggctggctgcatgccctgtggctgttgggctgggcccaggaggagggaggggcgctctttcctggaggtggtccagagcaccgggtggacagccctgggggaaaacttccacgttttgatggaggttatctttgataactccacagtgacctggttcgccaaaggaaaagcaggcaacgtgagctgttttttttttctccaagctgaacactaggggtcctaggctttttgggtcacccggcatggcagacagtcaacctggcaggacatccgggagagacagacacaggcagagggcagaaaggtcaagggaggttctcaggccaaggctattggggtttgctcaattgttcctgaatgctcttacacacgtacacacacagagcagcacacacacacacacacacatgcctcagcaagtcccagagagggaggtgtcgagggggacccgctggctgttcagacggactcccagagccagtgagtgggtggggctggaacatgagttcatctatttcctgcccacatctggtataaaaggaggcagtggcccacagaggagcacagctgtgtttggctgcagggccaagagcgctgtcaagaagacccacacgcccccctccagcagctgaattcctgcagctcagcagccgccgccagagcaggacgaaccgccaatcgcaaggcacctctgagaacttcaggtaggagaaaagcaaactccctccaacctcttacttcgggcttaaggcagagaactcgc

SEQ ID NO: 38923 - DNA, 2300 bp, Homo sapien
agaaaatccagatgccccaatacccataacaatatgtgcctttaagataattatagttctggctgggtgtggaggctaaggcaggattgctttaggccaggagttcgagatcagcctggccaacattgcaaaaccccctctctactaaagatacaaaaattagctgggtgtcgtagcacatgcctacaatcccagtagtgagaccccatctctacaacaaaatatttttttaattaattggatgcactggttcatgcctgcagtcacagctacttgggaggctgaggtgaaaggatgtagctgtaatccagctattagggatgctgagacacaagaatggcttgaacccaggaggtggaggttgcagtgagctgagatcacgccactgcactacagcctgggcaacagatcaagactctgtctcaagaaaaaaaaaaaaggaagaaagataattaagttttgctttgatgtacttacctactagaatgtcaaggatagttaaattaacagaataataaattttgtcatgccattggcccatctgcacattgactcggcttagtttagtctctacaaaaacaagacccctatataagaaaaacttaaaggtcaggggcggtggctcatacctgtaatcccaacactttgggaggctgaggagtgtggataccttgagtccaggagtcccagaccagcttgggtagcatgacaataccctgtgtctacaaaacatacaactattagctggctgtggtggtgcatgcctgtagtcctagctacttgggagactgaagtgggaggatcgcttgagctcaggaggtggaggctgcagtgaactatgatcatgctactacactccagcctgggcaacagagtaagaccctgtctcaaaaaaagaagaaaaaaaaaaagaaagaaagaaaagaaaaacttaagacagtgtgttcctctgtttgctttctgaggacgccctactccgtaagggtgtagctttcaataaactctctcttctcatcgcactctacgacttgctttgggttccttcctgcatgagatccaagaattctctcttggggtctggatcgggacccctttttccagtaacatgtagacacacacacacattcagtttaaaagcccatattacaacgtacatccacctcatcttcacactgagatttgggtgacatctgtccctttttgagttttgacccaagttaaccttttaagacgctctttatttcttccccttttgcctcagttcacgttcctcccccttctccttacatgccttttatagcagcctctccttttctcttttattctttttctacacatttctcttactgtaaaatcagaagccaggcgcggtggctcacgcctgtaatcccagcagtttgggaaaccgaggcgggagggtctcttgaacccaagagttcgagaccagcctgggcaacatagtaagacccccgtctctactaaaaaaaaattaaaaattagctgggcatgacggtgtgcgtctgtagtcccagctactcaggaggctgaggcgggaggatcgcttgaggccaggagttcaaggctgcagagagtcacgatcccaccactgcactccaacctgggtgacgcggccagaccctgtctctaaaaagaaaaaaactagaggggtgtatctatcacgctttcaatagatattcagcttgggttctatacttttctcatgaccctttgtctttctgttttccaggtcactcctcctcccctacacttaattcccaccctgctcccttttcacggcccactccccttccaggagtcctgcctgctgcttcgaactccaatgatcgtcccattcacctctcaccccttttcccgcctttttgccccacaaggctccaaagcgcgaggaccttattgtcctcctcccccatcctccaaccagcccacaggacagccgcgttaccatgacgaccgggctcctagaagctgcagtcaaggacctggttgccatggtttccgcttctccgcctccagccccgcccgcgctccccgcggcgtcggcgcctgcgcagtgcgtggcgcgccgggagtcagagcctgggcgggacggggcggggcttcgggcgagagggagggcagcaggagaaaggataagaaagggagtgggactggcgcctacggtggccgaagtgggacgcgccgagccggaggctgcaggatggtaggctgtgcgaagagggaggggagggggaagcgaggggcgtgggctgcacctgcgggggtcctcgggggccgccctc

SEQ ID NO: 38924 - DNA, 2300 bp, Homo sapien
tcatcttgcaacttggtctctgatccccatcagccactcagtcagcccccttggctccctccctcccctctcccttctctcttggatggcttcccctccccctctccagatgtctgagccatctctctctgattcatcctcctcaggaaggtaacgtgaccccctccccatcccactgctctctgtatccaggctgggaagatgaaggggacatgggggcggggagaggaaggaggggaggccgtggttagttgtgcgtggggatgggaggcatcgcctcggggtctcctaccccctcttttccctcctttctttggaatctccactgtcaccttggttctcagtttttttttctcctttagcctgctccttctacctgttccagatcccttcattccttcctcctcccctgcccccatctcttctctcttttctccctctccactcctccccatttctttccccgcagagctgatgggctttcttctgggaaagtcgagccactgatggaagcgagaagccactgctggttatagagagaaagcacgtgagtgtgtgtgtagggagggggaggttagaaggagggtcagtgccaggaagaggtgaggaggggggcgaggaccgtttctgaaagagtctctaagaccctgacagacagccctgaccttggtttccagagtctcagggtgcgggtgccctgcgtgtgcccacgagcacccctatgtccgcagttcgtgtgtgtctggcgtgtgtcattgtcattccccccttccctgcccacgcccccgcaccgctctctgccagcaccgcagccccctccaggcttcctccctccctccccttcattcctgcagtggctgccccccttgccaccctctcctctcccctgccccctccccatttccgtcctcccccccacccccgcccacggctggtctcccttcaccggacccagctctctgatggattctctttgcgcaaatctgtgcgtcatcgccccccacccccggaacctctagctgtccaagcccccagccccaacctctctggcaggagatacggtcgaaggggctggtggcagagaggggctatctctgacgttgcaggtccccctcccatcgcgttcaaaccttccctttaagcggtggagagagctggagttgagtcaccccccccccacctgcgcaaccccctccccacctgctctggtctcgccctccaaacgtccttgggggaggggagcggcaggagggaaagcgactgggggagtgtgggaagagatgggccgaagggggcacagcggggggccttgacacaagcggcagtcaggggacagaaggacagacacacctttttctccagacacagcacggatcgtgaaacagacacgacccagaggcacacacatcctcattctttcccttttctcttccgactcggacccttcccgatgggattaccaaaaccgcaagatccacccatctgcccctgtcagggggctgccacccgcactgccgattcgcggacagcgcccgcaggcgtgcagatctgtccctctgcactcaggttcacgccgtccttgggcgcgtggtctcggggtggggaacccggccccctggtcggctcttgaatctttatccttcccctccccagtattgagctcccactggtgcccagtcagacgctgggactaccctttttctattccactcagcaacgcgggctccatccagcagctccaagttgctctgcaacccaccctcccgccttccagcgcctctgcatccacccttccattcattctcccattcattcattcatccttttctcctcgtccctccttcattcattcatagccccccgccctgcccgcttcagcatttcattcattcattcattcattcatttcccggagctccgctagcgcacaccccttcagccgaaggccccagcgcgcaggcgcaggccgggagaggcaggcaccctccaatcgtcgggcgtccttcctcctccgggcggccgcccgcttccccatgaatgaacattgacgtcaatggggcggggcgcgcccacgtgaccccgcgcgctcccctttataaggcggtggaggcgcgggcgctgtccagcgtgctgaagccggagcgagctagccgcccggagccgcgccgacccagctgagcccagcccacgggacgccagacctcgaccgtcgctcctaccccggccaccgctcggagccgaggcggacgcgtcccgatcttcccctgtccccaccctgccccgaccctcctctccacctc

SEQ ID NO: 38925 - DNA, 2300 bp, Homo sapien
atttttagtagaaacggggtttcgccatgttggccatgctggtcttgaactcctgacctcaggtgatcctcccacctcggcctcccagagtgctgggattacaggcatgagccaccgtgcccggccaggccaggctaattgttgtatttttagtagagacggggtttcaccatgttggccaggctggtctcgaactcctgacctcaagtgattcccccgcctcggcctcccaaagtgctgggatcacaggcttgagccaccgcacccagtcttgagctcactttataggtgggatggagaaccttgtaggagttaagagcctgggccaccgccttattagagcaggggcagcgctgcacccacccgggtcccagctccacacttccctcttcctccccagccaccaggatcagcgtggggtgcagcgcctcctgagtgcagaggtctgtgtgaatgtgcctgggtgtgcgctgtgtacctggaggtctttctgcctgctgtcccgtggggtacattgtggatttaggggccttgtgcacccggggaaccagggtgctcaggcacccacgcagtggtgagaagatggagagatcttggcctccctctgcccttttcagcctttcaacttctgtctcttgatgtctcttcgccttcccggtgttctagggtttctgattccctctatcagtttccggggacgaaggctcggagtccccttcccagccgctcttataatggagagaggagattccattgaggggtggctcctggaggaggggtacttcagggcagtgggggacccccggacagagaacggaggtgctgggcgtggggtggggagataactaagccagcaacaccagcatcaccaccaccaaaacccgagacaccaccatcctcagtcccactccccagccgggacacagggcggagtctcgccagtagggcttgaggccacccagctgcccagggcgcaccccgacccccggccccgccagcagggcacgagtccgctccggatccgtcccgggtttcttccgcgtcgccggggtctccgcccctcgaagctgccgccggagcgtcgccgggggagccacgcgtgccacccgaacccctgaaccgatgggcgccccggcccgcgtcgccaacggagctgcggcgctgccccagcgctgaccgacgttagagtcgggctccgacagcgcggccgagtccccgcgcgtcatcctcctttgactcttgggggctccaaagggacctctctcttggcaccgggggtgtctgcgcccgccgcccgccccgcttggctttgcggcatctcggccctggctccagctccggctccggcgaggtaggggggcggccgggcctggggactggggagggggctagcgtgctcctccaccgcagaatggggcagcagaaggccaccgcccctcagggggaccaagcggctgcgcccccttctgcccagcccctcccagtccgaagacccagaaaactgagtcagaggctgcgcttcaggtgtccagaagcgctcccccgcccccctctgttgccatgtcgctcccacctgtccccagggtccggcgcccaggggaacccccgccaagcagatcgctccctttgcaatctccctctcccccaagcccaagcccccaatccggggtagaggcagagggaagaccctcactcgggaagaccctgcaggacagcccccccttctccactactgtggccctctggggccctccccccaccccctttggctgggccatcttcctcggcccctgcctctgcccaccccctaggccttctctcccgcccccacttcatcgcctctccccgtctctgtttccaaggttgttctcttacggccttttttctgactttcttttccccttgaccccttcccctccacggatccccgccccccataccccggggcgaagggggtgtgtcacgctgctttctatttacagtgtcccaggggagggggtgcgtgctaggattttttttttttcatctgctgggcccagagtcacgaggtgtcatgtctgtgattcggtgtcgaagcctcctccggcttccctgcctgtcccctgcggccgcatctcctgtccgcttttgtctgctctctgcctccattcccgtccttttcgctctcatctttgggcgctttgtgcagctgccttctttgtctccgcctctccggcgactgggctctcccttccctccctctcctccctcccccagtgtcaagaagccatcggcctcaagggcatcgatatttcaggtgt

SEQ ID NO: 38926 - DNA, 2300 bp, Homo sapien
gtgtgttagcactttcagagatcagaaatggggggaagtcctattaaaaaatgttgagtaacttgtcagttgcattttgccctgcctcagcctagaagtcgggattctcatccctttaacccttggtgttattcctgtttagccctttaaccctcggttggaattcctgtatgtgggattccaggaacatgaccttccttcttattgcattggcacatccaatgggatcagtttgcctgattatgaagttatcacctcggaaagtaaagaaagaaaaaatggaataagatgggtgaacaatgaattttggggtgggggagagggtagggggagcatgagagctgggcggcccctggagagaggactccagcagaccttgaaaggccttaacattattccctgcatcggccgggcacggtggcccacgcctgtaatcccagcactttgggaggccgaggcgggcggatcacgaggtcaggagatcgagaccatcctggctaacacggtgaaaccccgtctctactaaaaatacaaaaaattagccgggggtggtggcgggcgtctgtagtcccagttactggggaggctgaggcaggagaatggcatgaacccgggaggcagagcttgcagtgagccgagatcgcgccactgcactccagcctaggcgagagtgagactcctctcaaaaaaaaaaaaaaaaaattattccctgcatctccaaagcagtttacagttgctaaagggctttgtccatcactttcctggctccttacagggtagaactgaaggtgttctgatctcactttatttattattttattttattttgagttggattctcgctctgccgcgcaggctggagtgcagtggcacgatctcggcgcattgcaatctctgcctcccgggttcaagcgattctcctgcctcagcctcccaagtagctgagattacaggtgcaggccactgtgcccggctgatttttgtatttttagtagaaacggggtttcgccatgttggccatgctggtcttgaactcctgacctcaggtgatcctcccacctcggcctcccagagtgctgggattacaggcatgagccaccgtgcccggccaggccaggctaattgttgtatttttagtagagacggggtttcaccatgttggccaggctggtctcgaactcctgacctcaagtgattcccccgcctcggcctcccaaagtgctgggatcacaggcttgagccaccgcacccagtcttgagctcactttataggtgggatggagaaccttgtaggagttaagagcctgggccaccgccttattagagcaggggcagcgctgcacccacccgggtcccagctccacacttccctcttcctccccagccaccaggatcagcgtggggtgcagcgcctcctgagtgcagaggtctgtgtgaatgtgcctgggtgtgcgctgtgtacctggaggtctttctgcctgctgtcccgtggggtacattgtggatttaggggccttgtgcacccggggaaccagggtgctcaggcacccacgcagtggtgagaagatggagagatcttggcctccctctgcccttttcagcctttcaacttctgtctcttgatgtctcttcgccttcccggtgttctagggtttctgattccctctatcagtttccggggacgaaggctcggagtccccttcccagccgctcttataatggagagaggagattccattgaggggtggctcctggaggaggggtacttcagggcagtgggggacccccggacagagaacggaggtgctgggcgtggggtggggagataactaagccagcaacaccagcatcaccaccaccaaaacccgagacaccaccatcctcagtcccactccccagccgggacacagggcggagtctcgccagtagggcttgaggccacccagctgcccagggcgcaccccgacccccggccccgccagcagggcacgagtccgctccggatccgtcccgggtttcttccgcgtcgccggggtctccgcccctcgaagctgccgccggagcgtcgccgggggagccacgcgtgccacccgaacccctgaaccgatgggcgccccggcccgcgtcgccaacggagctgcggcgctgccccagcgctgaccgacgttagagtcgggctccgacagcgcggccgagtccccgcgcgtcatcctcctttgactcttgggggctccaaagggacctctctcttggcaccgggggtgtctgcgcccgccgcccgccccgcttggctttgcggc

SEQ ID NO: 38927 - DNA, 2300 bp, Homo sapien
tgccttgttggttccatctcctcttcttccaggactacatcatgtcaggtggtgagaagaggaggaccttgctgctgtctcccgccccaccatcctcttcccaggggacactggggcccagctctcctttccccatgtcctctccactcttctttccaagtcccaggctttggctgggtgcggtggttcacacctgtaatcccagcacttgggaggcgcaggcgagaggatcgcttaaggccaggagttcaagaccagcctgggcaacacagtgaaaccccatctctacacaagaaaaaacaaaaacaaaaatttagccaggtgtggtggtacacacctgtggtcccagctactgggaggcttgaggtgggagggtcacttgagccctgaaggtcaaggatgcagtgaaccaagatcaggccactgtactccagcctgggcaacagagcaagactccgtccctaaataaataagtaaataagacccaggcgttgggtcccccagcttctgccctccccccaggtttggtctcctttgtcaaggccccgctgcctcagtggtggccaggtggctgtcctggcgtgggagggcccctgcaggcgctggaggcaaaacccggacaactgagcttgccgattcggaatcagaagagattggttaagtcagctctggaactcgggtgaggacccgagcgtgacccggtggggacgccccagggctgccgggccggggaggaggagagtggcgccacccgcggaccccggggccaggagtcagccgcgccatgctctcctgcggcctccctagtgcctgtcttctccagggagaatgagctcttccagcagttcccgaacccgcagagctcgtgggtgcagaggacgcaggaggctctgcgtccgctgctaagcgtggccctgcagctgttcctgggccgccggggcctcccgctgcccttccgcgcgcccatccgcaccgtaggtgagccccggcctccgccccgcgatcctggcccagggcccgctccctccccgtcccgggttggggccacccagactggcctttggccaccgcgccagccctgaactctgttcccgcctatccccaaggaggaaaagaggaggagaaccggggatcccagcccagatcgcctcccgtcccgcccgcagtggggtcggcgattcccgtgcagcagagccccccgcccagtccggcccaggtggacacgctgcaagcgcgctacgtggggcgactcacgcagctcttcgaggagcaccaggcgcgctatggtgtccccgccgacagacacctggtcctcacggaggcgcgccccaccgcctggcctcgcctgtccgctgggtgactgcaggtggggaagtgaaattaaagactggcggcagggcacggtggctcacgcctgtgattccagcactttgggaggccgaggcgggtggatcacttgaggtcaggagttcgagaccagcctggccatcatggtgaaaccccatctctattaaaaatccaaaaaaaaaaaaaaaaaaaattagccagacgtggtggcgcgcctgtaatcctagctactcgggaggctgaggcaggagaatcgtttgaacccgggaggcggaggttgcagtgagccgagatcgtgccactgctctccagcctgggtgaccgagacgtgtgaaaaaaaaagaaaaaaaagaaaagaaaagaaaaagaaaaaaattaaagtgggaaacagacctgcagcctgtgtgtgtttgtgcatggcgggggaggtccaggcaggggtggtgaccttgacattcctggagatgccccggaccaggccctgcccccaccccgactggaggtcaaatagtctcagcagggcttctggccccttccagcacctgggacccagtgggtggggctagccagatcactcttgtccactccaacatcaattcctgaggcactcgggtgtcacctctcccttgcacaccccttacgcctcccagccccacccagcagccagcccagactggtgactgacaggaagttcaaagatcaggctgagaaaaaacccagagacatctggggctctggatccaaagatctccccactcacacacctacggacacacgctactctgggaggtgatttgcgacttagccaggcccccaaagctgggctcctgtagggagaaagtctgcccaggtccacatccaagccttcatcgtttgtcctccgggttctgggatcctgctggaagaggggagcttctgcaatgggagttgccacaaccctgcagcccccaacc

SEQ ID NO: 38928 - DNA, 2300 bp, Homo sapien
cctgctgctgctgccgctgctgctgccccctgcggcctcagcctccgaccggccccggggccgagacccggtcaacccaggtgagatcccggggaggcccggcacggccgagggggcagaggctggcgtgcctgccagcctggcccggagagggtcggaggctcgaggaggtgtctggcccgtcccccgcccagcgtgctcttgaggctgagtcgcgccaagcccctcgcccatcactaccctgaactggggtttccagcctccctatgcaaagggactcggaattcctgggcaccactcccaccctgccctccttggggtcagagtgttcctgggtgagaagagtttaagaatgggaaggaagaaagggagggaagtcgagtgagagggaggacagcaaagcacgtgaggcccggagctgggcggtggatctcaagtgccatttccctctggtaacagagaagctgctggtgatcactgtggccacagctgaaaccgaggggtacctgcgtttcctgcgctctgcggagttcttcaactacactgtgcgggtgaggagagggaaaggcccctgggagggggtcccagcaggaggggtgggctgaagtctggatgcccaggtccccacggtaagcctggtcaggagttccccccacaactccccaccccttgcctggcacggggcaatcttctccacagaccctgggcctgggagaggagtggcgagggggtgatgtggctcgaacagttggtggaggacagaaggtccggtggttaaagaaggaaatggagaaatacgctgaccgggaggatatgatcatcatgtttgtggataggtaacggggctggggatagggagcggggtaaggatgctgaggttcccagtggacccctgcccatcctccccttcctcacccagctacgacgtgattctggccggcagccccacagagctgctgaagaagttcgtccagagtggcagccgcctgctcttctctgcagagagcttctgctggcccgagtgggggctggcggagcagtaccctgaggtgggcacggggaagcgcttcctcaattctggtggtgagtggcagagtgcccaaggcagaggggccaagagcggtgggacacagagtgttaaaggcgcctgagggctggagacagcctgggggacaggccctgggaccctgggagtctcgaggtcaacactccccctccccgccaggattcatcggttttgccaccaccatccaccaaatcgtgcgccagtggaagtacaaggatgatgacgacgaccagctgttctacacacggctctacctggacccaggactgagggtagggaaggcagaggagtgggcgcatcccgcagctctgtgggagtggaggcctcaggctgaatgggatttggggagcaaagggggttgcaaagagaaaaatgtgtgcctgggcgtggtggctcacgcctgtcatccaagacttttgggaggcttaggcaggaggattgcttgagtccaggaatttaagaccagcctggacaacatagttgagacctcatctctacaaaaaaaaagaaagaaaaaattagccaggcttcatggtgtacgcctgtaatcccagctacttgggaggctgaggtgggaccatcacttgagcccaggagtttgaggatgttttgcaccactgcattccagcctgggtgacagaatgagactctgtctctcacaaaaaaaggaaaaccatggtggctcatgcctataatcccagcactttgggaggctgaggcgggtggatcacctgagattgggagtttgagaccagcctggccaacatggtgaaaccccgtctctactaaaaatacaaaaattagccaggcgtggtgacactctcctgtagtcccagttacttggaaggctgaagcaagagaatcaattaaaccgggaggcagaggttgcagtgagctgagatcgtgccattgcactccagcctaagcaacaaaagcaagagaagaaaaaaagagagagaaaagtgagaaatgatgtcctttccactccttccattttaaccactccatcgcatctcattccatttaggagaaactcagccttaatctggatcataagtctcggatctttcagaacctcaacggggctttaggtgaggaggaagacagccgcaggtgggcgatgcgcagcctctgcagctaggggtcttgagctgggagaggcttctggaggagctgggctgatccaagcccacctctatgtggttttgtcaggcgtctgagtggctggttgtgt

SEQ ID NO: 38929 - DNA, 2300 bp, Homo sapien
cccacctcagcctcccaagtagctgggattacaggcgtacaccatgaagcctggctaattttttctttctttttttttgtagagatgaggtctcaactatgttgtccaggctggtcttaaattcctggactcaagcaatcctcctgcctaagcctcccaaaagtcttggatgacaggcgtgagccaccacgcccaggcacacatttttctctttgcaaccccctttgctccccaaatcccattcagcctgaggcctccactcccacagagctgcgggatgcgcccactcctctgccttccctaccctcagtcctgggtccaggtagagccgtgtgtagaacagctggtcgtcgtcatcatccttgtacttccactggcgcacgatttggtggatggtggtggcaaaaccgatgaatcctggcggggagggggagtgttgacctcgagactcccagggtcccagggcctgtcccccaggctgtctccagccctcaggcgcctttaacactctgtgtcccaccgctcttggcccctctgccttgggcactctgccactcaccaccagaattgaggaagcgcttccccgtgcccacctcagggtactgctccgccagcccccactcgggccagcagaagctctctgcagagaagagcaggcggctgccactctggacgaacttcttcagcagctctgtggggctgccggccagaatcacgtcgtagctgggtgaggaaggggaggatgggcaggggtccactgggaacctcagcatccttaccccgctccctatccccagccccgttacctatccacaaacatgatgatcatatcctcccggtcagcgtatttctccatttccttctttaaccaccggaccttctgtcctccaccaactgttcgagccacatcaccccctcgccactcctctcccaggcccagggtctgtggagaagattgccccgtgccaggcaaggggtggggagttgtggggggaactcctgaccaggcttaccgtggggacctgggcatccagacttcagcccacccctcctgctgggaccccctcccaggggcctttccctctcctcacccgcacagtgtagttgaagaactccgcagagcgcaggaaacgcaggtacccctcggtttcagctgtggccacagtgatcaccagcagcttctctgttaccagagggaaatggcacttgagatccaccgcccagctccgggcctcacgtgctttgctgtcctccctctcactcgacttccctccctttcttccttcccattcttaaactcttctcacccaggaacactctgaccccaaggagggcagggtgggagtggtgcccaggaattccgagtccctttgcatagggaggctggaaaccccagttcagggtagtgatgggcgaggggcttggcgcgactcagcctcaagagcacgctgggcgggggacgggccagacacctcctcgagcctccgaccctctccgggccaggctggcaggcacgccagcctctgccccctcggccgtgccgggcctccccgggatctcacctgggttgaccgggtctcggccccggggccggtcggaggctgaggccgcagggggcagcagcagcggcagcagcagcaggaaccggggtccaggccccgaggaggtcatggtggggagcgggcccagacagcacccaggatcctgggatctccgctacgcgcctggatcccagctccggaggggagctctggaaagggggcgctcgggctgctgtgcggccgccgcggggagcagcttggctggggctacgccctgaaaaaaaggcgtatccggaggctacagaaagctccagatgccggcgccacagacaaggcgaggattgtcccgggcgcacgggaggcgggggaggggcggcggctcgggccggcgggcgggagacagggactctgggctgagccagccgcttgacacatgtggaagctgaaacctggacaggggaagtgacccctggcggagggtcgggcgggacgcgggggcgggtcctggccgcagccctgcccagagagtgcgggcggaagacggggagagcgagaggctggcggcgacagggagggaggaagcctaggagtccgccgcgggacggaggcctgggggaactgggagttcagctttctgcagagggccactaggaacctcggattgcccacggaagccagccactttctttgacagtccagcccacctcctcttctgcccggagaagctccaggggctgcctttgtgatcacagcatcttc

SEQ ID NO: 38930 - DNA, 2300 bp, Homo sapien
tggtgaatgacctggctaggggagacagcggggtatttcagaccttgaggccaacatgaaaaaactgatggctgggagactgcgatgcctttgaaaaactgagagggccaagcgcagtggctcatgcctgtaattctagcattttggggggccgaggcgggtggatcacgaggtcaggagatcaagaccatcctggctaacatggtgaaaccctgtctctactaaaaatacaaaagataagctgggtgtggtggcgggcgcctgtagtcccagctactccagaagctgaggccagagaatggtgtgaacccgggaggcagagcttgcagtgaaccgagattgcgccactgcactccagcctgggggacagagcaagactccgtctcaaaaagaaaaaaaaagaaagaaagaaaaactaaaagggccaagcgcagtggctcatacttgtaatcctagcattttggaaggccgaggcaggaggatcacatgagctcaggagttcaagaccagcctgggcaacatagtgagacacccatctcaacaaaaaatataaaaactagcccagcatggtggcctgcacccacctgtagttccacctactcaggtggctgaggtggaagaatcacttgagcatgggaggttgaggctgcagtgagttatatagaaccactgcattccagcctgggtgacagagcaagactctgtctaaaaaaaaaaagtctttgctggctctccagtgtttccctacagagttcaaactcctgggcagtgtgtataatgcctttcaaaatgtaacctttccccagccttcgatcctttcttattactctgtaagatccaaactgtgaacttggcttcctaagcgacttgctttttcttgcttcactgcctttgcacgtgaggttcccactgagagaaaccctaactagactttcaagactcaattcaagctttttcatttttccttcaagctttcacagtcccctgcctcccagaacctgggctagatgccacgtctccctgttcccaggcgctgtgcttccctctgccatagcacaaatcacaaatcacagtaaaatacagtgttaggtctgcgtttctgccccccttccagaaaaagccaatgcttggataagaggggtctttctcctcttcatccccagcgcccggcttggagcaggcaccaataaaacgtgaatgaagggtcaacgccaggacccgagggctgaggaagggatttacgaggaatagctggggccgggcgcggcagctcacgcctgtaatcccagcactttggaaggcccacgcaggaggatcgctttgaggccaagagttggagaccaacctgggcaacatagcgagagcccgtcaccacataacaaattaaaaattaaccaggcgtggggcctcatgcttgcagttccagccactccggaggctgaggtgggaggatggtttgatcccaggaaatcgaggctgcagtgagctatgactatgccactgcactccagcctaggcgaaagagcgagaccaaaaaagaggaatgactaggtaagaaaattctaggactgacttgggaaggggaagggggcgaaccgcgggggctcacatacccgaagttttcttctccaccattggcacaacacaactgtcggaagaaactgctgcgcacgcgtactaaccccaaggctttagtaggggcgccatcacttccggtagcttgtacttctgcgcgtgcgccacagctttgactcattacgtggcgtttccttggagacaagaaagcttttcgccatgttttataggggcaaaaccacttccggcctcagtgtggaggtgtaaatcttgtgggagccacgaaatgggtcattttaaagatgtggtcacggtgttcttacaagaaatcttattttcctttggtccttgtgaagatgctgtgatcacaaaggcagcccctggagcttctccgggcagaagaggaggtgggctggactgtcaaagaaagtggctggcttccgtgggcaatccgaggttcctagtggccctctgcagaaagctgaactcccagttcccccaggcctccgtcccgcggcggactcctaggcttcctccctccctgtcgccgccagcctctcgctctccccgtcttccgcccgcactctctgggcagggctgcggccaggacccgcccccgcgtcccgcccgaccctccgccaggggtcacttcccctgtccaggtttcagcttccacatgtgtcaagcggctggctcagcccagagtccctgtctcccgcccgccg

SEQ ID NO: 38931 - DNA, 2300 bp, Homo sapien
tagtcattcctcttttttggtctcgctctttcgcctaggctggagtgcagtggcatagtcatagctcactgcagcctcgatttcctgggatcaaaccatcctcccacctcagcctccggagtggctggaactgcaagcatgaggccccacgcctggttaatttttaatttgttatgtggtgacgggctctcgctatgttgcccaggttggtctccaactcttggcctcaaagcgatcctcctgcgtgggccttccaaagtgctgggattacaggcgtgagctgccgcgcccggccccagctattcctcgtaaatcccttcctcagccctcgggtcctggcgttgacccttcattcacgttttattggtgcctgctccaagccgggcgctggggatgaagaggagaaagacccctcttatccaagcattggctttttctggaaggggggcagaaacgcagacctaacactgtattttactgtgatttgtgatttgtgctatggcagagggaagcacagcgcctgggaacagggagacgtggcatctagcccaggttctgggaggcaggggactgtgaaagcttgaaggaaaaatgaaaaagcttgaattgagtcttgaaagtctagttagggtttctctcagtgggaacctcacgtgcaaaggcagtgaagcaagaaaaagcaagtcgcttaggaagccaagttcacagtttggatcttacagagtaataagaaaggatcgaaggctggggaaaggttacattttgaaaggcattatacacactgcccaggagtttgaactctgtagggaaacactggagagccagcaaagactttttttttttagacagagtcttgctctgtcacccaggctggaatgcagtggttctatataactcactgcagcctcaacctcccatgctcaagtgattcttccacctcagccacctgagtaggtggaactacaggtgggtgcaggccaccatgctgggctagtttttatattttttgttgagatgggtgtctcactatgttgcccaggctggtcttgaactcctgagctcatgtgatcctcctgcctcggccttccaaaatgctaggattacaagtatgagccactgcgcttggcccttttagtttttctttctttctttttttttctttttgagacggagtcttgctctgtcccccaggctggagtgcagtggcgcaatctcggttcactgcaagctctgcctcccgggttcacaccattctctggcctcagcttctggagtagctgggactacaggcgcccgccaccacacccagcttatcttttgtatttttagtagagacagggtttcaccatgttagccaggatggtcttgatctcctgacctcgtgatccacccgcctcggccccccaaaatgctagaattacaggcatgagccactgcgcttggccctctcagtttttcaaaggcatcgcagtctcccagccatcagttttttcatgttggcctcaaggtctgaaataccccgctgtctcccctagccaggtcattcaccagttaggccttaacctagacttaccttcttctgggaagtcttccctgactactccaaggccaggttgggtgtttctgtcctgggctctgcagcactttatacttccgtatcctagcctactccatgctgtacttactgtgtttgtttcattaatcatttgtgtttgccactggactgtaagctttggcatccctaaaacctagagcactgcctggcatttggaggggagacagagtagtacagtgatcataatcatatttttttttgtttggttggttttgggtttttttttttttttttttttttttgaaacagggtcttgctctgtcacccaggctggagtgcagtggcacaaacacagctcactgcagccttgagctcctgggctcaagcaatccttgcgcctcagcctcctgaatagctgggactacaggtgtgtcccactacacctggctaatttttgtattttttttgtagaaacatggttttgccatgttgcccaggctggcctcgaactcccgcgctcaaacaatccacccaccttggcctcccaaagtgctgagataacaggcatgagccactgcgcctggcaaggtcatgctttttgatgctgggtagttctttgactcctgacctggccacttgttagctatgtgaactttggacacatttcttaatctctgaatgttggtaaattggggatgatgatactgtcccatacagctgttgtaagggttaaatggttcaagtg

SEQ ID NO: 38932 - DNA, 2300 bp, Homo sapien
ggctcactgcaacctccgcctcccaggttcaagcgattctgctgcctcagcctccagagtagctgggactacacgcacacgccaccatgcccagctaatttttgtatttttagtagagacagggtttcaccatgttggccaggctggtctcaaactcctgacctcaagtgatctgcccacctcagcctcccaaagtgctgggattacaggcgtgagccaccttgcctggccgtaacactccactttttaatgggaggacaaagatttttgagccatcttgaaaaaccacctcacctggattgtctctgaatcctgacatcagccccccaacatgaagctgacaccaaaaccagtactgcctgcccagctgcaagtcttcagagaaagggaggcagttcctcaagaaaaccctggggaatacttgagccaacccccaggaaagtacccaaaagtgaaggcctaacatggtgactggccaggcacggtggctctcacctgtaatcccaccactttggaggccgaggcgggtggatcatctgaggtcagaagttcgaaaccagcctggccaacaaggtgaaaccccatctctacaaaaaatacaaaaattagctgggcatagtggtaggcgcctgtaatcccagctactcagaaggctgaggcatgagggtcacttgaacctgggaggtggaggttgcagtgagctgagatggcgccactgcactccagcctgggcaacagagcgagactgcatctcagaaaaaaaaaaaatggtgcctaacgttgactttgctggatctctctaatatcttaatgaggccatctgttcaatggatacttactaagcacttgctttgctatgaggttaacagggttctgggccttaatacagcaaccaaaaggaccttacgagattacagcttgcaattcatttagacaaggtatgggtataagaagttcacatgagtcacagcacccagggccacccagaccaggggcctctaatccaggggtgtccactcttttggcttctctgggccacattggaagaagaattgtcttaggagacatataaaattcactaacattaacgatagctgatgagctaaaagaaaaaaaaatcgcaaaagaatctcataatgttttaagaaagtttatgaatttgtgttgggctgcattcaaagtcatcctgggccacatgcaggctgcaggttggacaaatttgctctataccatgaattcccccatgtttcccagaaacttctgggttttccgtactgctaataacttcacacactgcagcccctggtaacaggggcttcctaaggacaactgctccctcagtctggcagcaccaaggacaaggaccactcccctttgcctaagtaccttgagaggaagacaggccaaggtccctccgcggtaccattctgcacatgttccacagtcctcccgccacctccctgtcacccatccctggaacctagctgtactttgaaaatatagcaactggagaaataaaaaggaaaaacatggccgggcgcagtggcccacgcctataatcccagcactttggtaggccgaggcgggtggattacctgaggttgggagctcaagaccagcctggccaacacatcaaaaccccaactctactaaaaatataaaaaaattagttgggcgtggtggtggccacctgtaatcccagttacttgggaggctgaggcaggagaatcccttgaacctgggaggcagaggttgcagtgagctgagaccgcaccactgcactccagcctgggttacagtgcgagaccctgtctctaataaataaataaaatagtttaaacaactaaatcaataaccaaaaagacttaaagaagcagccaaggagggcaggggctcgggggtggcaggaaaatgggacagaatctctcgcgatcagggacacagaggggcggacggtggcaggggtgagtgggaggcaggaggaagagagacagagccgtgagcaggagagacgggtgacccattaccatcacctcaaacacaccacgaccaaacaggaaggcttccggcacgaggctttttattctaacagcactggggggcccagcctacctgccagacagttcccaggagtgaggctggtctttcctggcagataagacacagttttgttgggtgaatgagcggctcctcccttggtccaggaagagctccccctgcattgggtgatgaaattctgtctttctgaaggccgggcagtgcacagcggcccttcctctctgggaatgcccaggctcaca

SEQ ID NO: 38933 - DNA, 2300 bp, Homo sapien
gggctcctgacactgtccctttccttccccagatggactcgtgggcatggccatcgtgggaggcatggccctgggtgtggcgggactggccggactcatcggacttgctgtgtccaagtccaaatcctgaaggagacgcgggagcccacggagaacgctccaggagggcctgtccatcctcgctgtcctttccctgttctccccctgccccccgtctctatcctctgtggccttcagctaatttctgctcccctgagattcgtccttcagccccatcatgtgctttgggatgagtgtaaataaaacggggctgtggcttgggaacccccgtgtctgcgttgaggggaggggtgggttctgaacgctgggcacagggggcggagacgtcactcctggtcctctcctgcccctgccctccaggttggcacggggttctttgtccaccccgcagcccagagcccacacccttccttcctccctttcctgaagccatgtccttgagagtgccgggcagctcggagacatggggcttttccatggtcccagagtcctgggagaaggcagtgacctgagcatgggcgggcagaacttcggggccaggccgggcttcaggcctgcattctcctctgacccactcagctacttctgtggagttttccacagcaggcccccttggcttcctcctccccaccctcccctccctttgtcttcctgtggcctccccttcctcctacctcctcctctgggggagggggagcccagtaggggaaggaatcctgcatctggcatggagtaggcgggggtcccgggagaggtcagagcccagggagccccagctctcgcctgtgggctggaaggtcaggactcagccccacctagccagcttcgccccctcgtgccaggctcggcatgggcctgttttgcttcaccgcatacctctcgttccacagcccaggccagcacaggagtagggaggagacacctgaggggaggccggagaagcccagcagggccgtggggccagggaggtgcgcagccagcgctgatggcccccagggacagagccctagggaaccggagcaggagatgagagtgtctgctctgggacaggtgctctgcactggctcgggatggggaccagaggctgctaatccatcatcattaacgaatagagtgggtgacagtccctgataactgggaacaggttgcagagcttagccacaggatcacgctccaggctgttggccagcaggaccaggctcgatgctgagtcaaagatcaacttaggaggaaatttgagttttgggtgagagcgactccctggtggcctcagccctgtgacactcacatccaggacagttcccggtgccaagcgctggttatgtgtggggggcttgactccctggtcccaacgaggtctcagtgtgttgcccaggctggtcttgaactcctgagttcaagcaatcgtctcagcccagcctcccaaagtggtaggattacaggcgagagccactgcgcccggcccctggtcccagttctcaccacagcccctgcagtaagcagtcgggtatgtcactgacagagcagaagctcaggggactaaaactccccgcctgagttccctggtgaatggatggtggggccgagttccattccaggctggatggagcccagagctgtgggtctcctaccctcccatcccctcattccagcttgatcttccttaagagactcatacgccccaaccccttggtctgagtatcttagattgttctcgtggttcctccgtccttcaccactgaaggctgctgttcattctctctccgtctctgtcccttattgctctcacgtctgtctctgtcatcttttcactccttgtccctcttactccgttctttggcccccaatgaaagctgagtcagagacagacgcttcccctcagttcccagtgcctcccttgggggcccctccttggctgtatccgtcagtggctccagggtaagtctgccccccccaccctcgtggggcggggagcccggggcagcccagaggctggggggagggggtggacttttggcccgtttcggttattccctccatctcgtcaacagctgccgcgcgcaggcttagctcattcctctgacctgccaggaagcagagagacccacagagcaggagggaggcagaaagtggagacggacctgagcccgaggaagaggcaggcagaggctgaggctgattccaccccagcctgcctggacaaccctccttagccgcagccccttccagttccctagggg

SEQ ID NO: 38934 - DNA, 2300 bp, Homo sapien
ctgcccctccccagagctgctgcccaaagggagcaaggaggaacagcgggattacgtcttctacctggccgtggggaactaccggctcaaggtgaggtggggaccccgttcccttcaccctcctctggggctgcaggaccttcttactgtgtcctccagggtggagccctggacagcgggaaggctgaaggggtgcagaggtgcagagcggtgtcagatgaggactccgagggaagatcagagtggcgagggggtggggaggaaggtgacgtcaagagactgggtgcaggcccaagccttgcgctgttatctcccgcagagttggggttgtttgtggactctactccgtggggtggggctggagggagggagtgggtggaggtcgagggaggagcccccagggctgaagaagggaaggcccttcacgtgggcagggggagtggtggatactgaggtgtagccggcccagtggctcacgcctgtaatcccggctactcaggaggctgaggcgggaggactgcttgagcctgggagtttgaggttgcagtgggctgtgattgcgacgctgccgtccagcgtgggcaacagagcaagaccccgtctcttattaaaaaacaaacaaacaaaaaaacactgcggtgtgtatgacgcgtgcgcgtttccccgagcgcaggaatacgagaaggccttaaagtacgtccgcgggttgctgcagacagagccccagaacaaccaggccaaggaactggagcggctcattgacaaggccatgaagaaaggtgacagcctcggcccctttgttcagccccgctcttccccacgcctgggcactttggtctctctgtaaatgaacccctccaggcagcccctcagccccaccccttccagttcttagagccccttgccctgcgactccaggtaggggtgtgcctctgttgaggggcagggctggcggaaggggacggtcagggtttccgcaggggccgggctcctgacactgtccctttccttccccagatggactcgtgggcatggccatcgtgggaggcatggccctgggtgtggcgggactggccggactcatcggacttgctgtgtccaagtccaaatcctgaaggagacgcgggagcccacggagaacgctccaggagggcctgtccatcctcgctgtcctttccctgttctccccctgccccccgtctctatcctctgtggccttcagctaatttctgctcccctgagattcgtccttcagccccatcatgtgctttgggatgagtgtaaataaaacggggctgtggcttgggaacccccgtgtctgcgttgaggggaggggtgggttctgaacgctgggcacagggggcggagacgtcactcctggtcctctcctgcccctgccctccaggttggcacggggttctttgtccaccccgcagcccagagcccacacccttccttcctccctttcctgaagccatgtccttgagagtgccgggcagctcggagacatggggcttttccatggtcccagagtcctgggagaaggcagtgacctgagcatgggcgggcagaacttcggggccaggccgggcttcaggcctgcattctcctctgacccactcagctacttctgtggagttttccacagcaggcccccttggcttcctcctccccaccctcccctccctttgtcttcctgtggcctccccttcctcctacctcctcctctgggggagggggagcccagtaggggaaggaatcctgcatctggcatggagtaggcgggggtcccgggagaggtcagagcccagggagccccagctctcgcctgtgggctggaaggtcaggactcagccccacctagccagcttcgccccctcgtgccaggctcggcatgggcctgttttgcttcaccgcatacctctcgttccacagcccaggccagcacaggagtagggaggagacacctgaggggaggccggagaagcccagcagggccgtggggccagggaggtgcgcagccagcgctgatggcccccagggacagagccctagggaaccggagcaggagatgagagtgtctgctctgggacaggtgctctgcactggctcgggatggggaccagaggctgctaatccatcatcattaacgaatagagtgggtgacagtccctgataactgggaacaggttgcagagcttagccacaggatcacgctccaggctgttggccagcaggaccaggctcgatgctgagtcaaagatcaacttaggaggaaatttgagttttgggtgagagcg

SEQ ID NO: 38935 - DNA, 2300 bp, Homo sapien
gaggtgcattttttgtatttttagtaaagatgggatttcatcatgttggccaggctggtctcgaactcctgacctcaggtgatccacccgctttggcctcccaaactgctgggaatacaggcgtgagccactgcactcagccctagtgtcctttgtgccaccccaaggcccaggcaaaattaggtgctgtatacttctctgaatgaacatgaagttttccccttgaggcttatgctagtgggcagccagttccccaacctggggattctctcaaggcttacagagcttactgtatcagtcatttcaaccatccacgccaaatagggaagaataactcttgtctttctaactcacgagactattatgaggagaaaaatattagaggcttggctgggcacggtggctcacgcctgtaatcccagcactttgggaggccgaggcagtctgatcacctgaggtcaagagtttcagaccagcctagctgacatggtaaaaccccatctctgctaaaaatacaaaaattagctgggtgtgatggccggcgcctgtaatcccagctacttgggaggctgaagcaagagaatcgcttgaacccaggaggcggaggttgcagtgagccgagattgtgccactgcgctccagcctgggtgacagagcgagaaactgtctcggaaaaaaaaaacaaaaaacaaaaaacaacctgggtgtggtggtgcacacctgtagtcccagcttcttgggagactaaggcaggaggattacaggagctcaggaggtcaaggctgcagtaagctctgattgtgccgctgcatgcactccagcctgggccacagaatgagaccctgtctctaaaaaataataaaaattaaaggggctttgcaaacgcggaaggtgtctggatgattatcccctgcatgtgcagtgccttgtttacaattaatttgctttttccgtgtttattcaacaaatatttattgagccctcactctctgccaagccctgtgctagatgctggataagcaaggtaagtctctgccctcaaggaacttacactccaatgtgactcaaggggaaaagaatttgaaagttgctacttacccagtcccctcactgcacagaaactgaagccagaggtgtccacacctttctccttcccatgctctgatagctcctcactgctaagctccccattgcccgtgaccccatgtggcaggtttcccgcctggggtgcactcccaaaatggtttatgtaaataatattgaaaattggaccttctctgccaataatggggccgttgctttttgaaaaacttcccgttgatagtgtctcctatgactacccctgtgtggctgtgtggtttacagatccagttgcctctgctcttgcattgtgagagtcagcagaggcccaagaaaccccgatactagtttgctgctgttggtgggttttttgagacaaggtctctgtcgctcaagctggagtgcagtggcgcgataactcactgcagcctcgaactcccggactcaagcgatcctcctgcctcagccgccccagtagctgggagtacaggtgcacgccaccacgccggttgatttttttaaaaattttgtagagatagggtctcgctatgttgctcaggctggtcttgaactcctggcctccagcgatcttcccgccgcggcctcccaagttgttgggcttcggacgtgagctacgcgccgggctcccggttctagttaagattttgttgcaggcgatgaatagtcacgtggcctccaaggtcctagatttctgaggggcgtcagcttggcaccctaatgtactgtgatctctggtcagctacccaccctctttttgctgttttcatcctgggggctaaccgccaagacatggcctccagtttccctagggaagcctccacagaggaaggcaccggctgaggcacctgggaagaccaacctggggaaggtctccctgcgcgcagtctgcgggctggagggaccggccgagcctgcgcactagcgccccgccggcgctgctgaactgagaggaaggggcggggcgtcgccaggtcgtgccagcatccgccggacgccggaagtggttctccgcccctgccactgggccatggagactgtggcacagtagactgtagtgtgaggctcgcgggggcagtggccatggaggccgtgctgaacgagctggtgtctgtggaggacctgctggtgaggcctggcccggacagagggaaagggaaggtcggagggcgggtcctgaggagagtcaggtaggggccgaa

SEQ ID NO: 38936 - DNA, 2300 bp, Homo sapien
gtgagggcgtgtgttgttaagatttgtagcacacaaactacctcccagtgcaatgaagtaaacgctgaggtgaggaagcctggactctggacctggcaagaggcacaaccattactgtacatagaggggaaatggcatctttacacatagaaaggagaaccgggctgggcgcggcggctcacactgtgatcccagcactttaggaggccaaggcgggcggataccatgaggtcaggagtttgacaccagcctggccaacatggtgaagccctgttgctactaaaaatacaaaaattagccaggcatggtggtatgcgcctgtaatcccagctactcgggaggctgaggcaggataatcacttgaaccgaggaggcagaggttgcagtgagccgagatctcgccactgcactccagcatgggcgacagagcaagtctccatctcaaaaaaaaaaaaaaacagaaaaaaagaaaagaaaggagaactggagctgctgaaagcccatggttcccgcctcctccctgacatcaatttaggatactcatcacttcgccttactgtaatagctccatttgcaaatgaaaattaaactgtacatgggggtgggatcagtggctcaggcctgtaattccggcactttcagaggctgaggcgggcagatcagaaaggacttgaggtcaggggttcaagaccaacccagccaacatgacaaaaccccgtctctactaaaaacacaaaaattagctgcatgtgatggcatgtgcctgtaatcccagctactcaggaggctgaggcaggagaatcacttgaacccgggaggtggagtttgcagtgagccgagatcacaccactgcactccagcctgggcgacagagctagactccatctcaaaaaataaaataaataaaataaaataaaaataaaaataataataaaaaaaaacctgtgcatgggaatgtgcatgggaaaacacttgacaagcggcactctgcagggtggtctccccatctggcctagaatctaccaggacgaagggactgtgcagaacctcaagtgatccacctgcctcggcctcccaaagtgctgggattacaggcctgggccaccgcggccagccaagtagttcttttcaatacaaagactatgtaactatgttaccgaaggttaaagatttgatacggggttgactagaaatttttgtcatttcagcccttttatgggctagcatattttgtaccggcactctcggcacatagacatttaatatcatggcttatccaaaattctgacttgactctgtattttcagactgacctaactgattgaatttagcagcaatgtttctagacacctgcactgactaaacgattccagtcatcatctctttggtttctcctaggtcagacgaatgatagtgagtggtgaatccttttacagaaaccagactttcacctgattttttctgagctgtgccacggcagtgataaatcggctcccaggtggacggccacagtgatatcatgccacagtgataaaggagtcaaggcctggttccaaggccagcttggcacttgtatggcctgtctgagctctcgggattattgggagaaacaaaggtttggaaacggccattccgccccctcctggagtcttgctttccgcgtctctaccgagactggtggaacgggcctgcagtcccagaattttgggaggtggagatgggaggatcatttcagcccaggagttcgaaaacagcctgggcaacatagcaaaacccagtcttacaaataaaaaaattttaaaaattagtcggacgtgatggcacatgcctgtagtgccagctactcgggaggctgaggcagaaagatcgtttgagcccaaaagttggaggttgcagtgacccgagatcgcgccactgcgctccagcctgggcgacagagtgagaccctgtctctaaaagaaatacaggccaaccctgcagaaccgcgtctgcagcccgggctttgtggcttctctccgaccccctcccagtcgcagacgcgcccgctttccgccccgcgcgccggaagtggccgagtcccgtcggccctgcgggcctctctccgtcgccatggaaacgaaagcggccaagtagagctccgtcctgacgcgccgcctcccgtgggctccggccggctaagccgcggcggacaactatgctgaaagccaagatcctcttcgtggggccttgcgaggtaagtcctggcccggcgcggcagagggagcggggagcaggcctcggggcctgggcgagcgcaggtc

SEQ ID NO: 38937 - DNA, 2300 bp, Homo sapien
tcagcctcccaaagcattaggtctttgttgttttgttttttgagacggagtctcactctgtcccccaggctggagtgcagtggcatgatctcagctcactgcaaccccgggttcaagcgattcccctgcctcagcctcctgagtagctgggattacaagtgcatgccactacgcccagctaattttttctatttttttagtagagacagggtttcaccatgttagccaggctggtcttgaactcctgacctcaagtaatctgcccacctcaacttcccaaagtgctgggattacaggcgtgagctactgtgcccggcttccaaaggattaggattactgaagtgagccattgccactggcctctacaatccttttgcaaaatgtgctccagtccagcaaacacttccatatttgatggtttttctccatcctgtaggcattttacagacaggagttttcaactggtcacaggggcagagcaagcctcagggcatctgcacccttaggttgcttttggaagaattaggaaaaaagctcccaggccgggctaggtggctcacacctgtaatcccagcactttgggaggcggaggtgggtgaatcacctgaggtcaggagttcgaaaccagcctggccaacatggcgaaaccccgtctctactaaaaatacaaaaattaacccgaaatggtattgcttgcctgtaatcccagctactcgggaggctgaggcagaagaatcacttgaacccgggaggcagaggttgcagtgagccgagatcgcaccactgcactccagcctgggtgacagagcgagactccaactcaaaaaaaaaaaaaaaagaaaaagaaaaaaaaaaaaaggaacaaaatgctcctaacccgggcgagtagagtacgggctggatttctggtcccacctgggcctggagcagggtccaagccctatgggaatcctgcaacatagaaaagaccaaaacttgggtccaggctggccttgggcccagcatgggatctaggactctgcttttctgtttataaaaggtgggattgtcctacatcttcctgaagcccttttctggataggatgtctcatgaatctgtgattctagctacaacttttttctttttttgagatggagcctcaccttgtcatccaggctggaggccagtggcctgatattggctcactgcaccctccgcctcctgagttcaagtgattggcttgcctcagcccagcctgtagttgagattacaggcacctgccaccacactaggctaatttttgtatttttagtagagacgaggtttcaccatgttggccaggctggtctcgaactcctgacctcaggtgatccgcccacctcggcctcccaatctagctacaacttctcaccccaactgacccttccgcccctcccaaagcttcttacctggaagagacagcggggcaggtgggggctggaggttaaaggggaaggaggagaatcctgggaagctctggtcagtttctcacgggaacgcagcgctttgatccaaagagccctgcacaaggatcggaagactcgcatttgtctggcttaactttctccagcctcagtttccacttctgaatgggaccatcgagggcagtgtggcgaggattcaccaacatcgtccaggtgaaattggcagacacagaatgggcgctccgaaagcattcgcggacccgaagaaggtttggtttcaaaggttctaaggtgtgtagcgggggcctgggcgcgaggtctggctttcggggtgttaggctccagggacctcctgcggagctcgcaccctagctctgccgccactgccgcctcctcggccccggaccgccgagggttaacaaaaaagccccacgccccctttgacggcttagagcccacctcgccgaatttgaaaaggcggccccggagaggcgtgggcgccccccacacatttccagctcgcacccgggctccgaccgctcgccccgctcctctcgctgtgctcccggccggtgccgcgggttcggtccgggcgccggtgcgctcctgccggtcctcgtgcccgggactccgggtccccgcgggctgctgcgcacgatgaagctggccctgctcctgccctgggcgtgttgctgcctctgcgggtcggcgctggccaccggcttcctctatcccttctcggccgcagctctgcagcagcacggctaccccgagcccggcgccggctcccctggcagcggctacgcgagccgccggtgagtagctcggggccgaggggccggggggtggggggaggg

SEQ ID NO: 38938 - DNA, 2300 bp, Homo sapien
ctcagaaggtgcacatgcatagagcaggaagcctgtcccctggcctcagcagcctgtgcagagtggcagggagccaccagcagggcccggcagcctctccctctgcagcctcctaatgctcactttggttccttttgttggagaggctgaggtggaatgatcgcttgagcccagaagttggaggcagcagtgagctatgatgacactactgcactccagcctgggccacagagcgagaccctgtctctaggggaaaaactaaaaaaagaatttgtggctcctgattgctttgggccactttggaaacctcaggagtcagtgagttagaactgtaacatccgggagagctcccaaaaaggtgcatgagcattagtgcccagatcctgacacctcctggggccatatctgtacctgtgtcacctgccagacagattacctggagatgagtttagctcgcctcttctggacaggcaagtgtaacaggtcatggcaggtctgtttgattaaattaatatattaatttatcagcaacactgttccatagaccagctttccttcagaccagccatgaatgggagatgtccccagaatgaaggtgtgagtatagagggacgagactctttcaggatcaagtacttcttggccctccgttggggacagattggggtccccacagctggggatgcttggatgaaggaagctgggttacaatgtgctcggtggagagatttcaagtcttccaggaatgtccctcaggacttgacggggatttcattgcaacaaaaataagtgatcagtcccagcagttgtttggggcagcaaggataccaggagaggggaacatcactgtacatgtttatcttgccggtttcagcgattcaattgcttctcttgggtggatttctgaggatcgcattgttcatctgaagttattgcttcaagtgctctaaccctttcttcctcatccagaaagaaatcataaataactccagggccccgcaaagctggcagctggccccgcctgggcctgaaagatgacaccaagtgcagggggagacggactctgtggttcctgacccacttggacacggggagttggcgctgccattgctcttcatcactgggaaagaatttgtcttaatggtgctccaagcccaaggtcaaggttcaaagggtcatgaaacaaagctggcagccttggagcctccaggctgtggtggggtggggagcggcctgacactgccaggcactctgaaccccagagggctgaggggcacccacagccttgggactaggtgaggcctcatcttcctgtagcacccactggtcaaggctcaggaggaggcaatcgcctctcaaggaacagacaaattcccaaaaatacagcaagatgcgggcaaggttctctggccattggggctttcagagagaaatggcagcagagttttaaaaacaaaagacaggctgggtgcagtggctcacacctgtaatcccagtactttgggaggtagaggtgggagaatctcttgagccaagaagttcaagactagcctaagcaacttagcaagacatcgtctctcaaagttttttagaacaagctaggcctgggtggtgcatgcctgtagtcccagctactcgggaggccgaggtgggaggatcgcttgagtccaggagttcgaagctgtagtgagctatgattgcaccactgcactccagcctgggacacagagcaagacctcatctcaaaaaaaaaaaaaaaaaaaaaaaaaaaaaaaaatgcggggagaagggaagcttctctgactgcagtgggggaagccctggagcaccccaaccctgtcttccagcccagctatcttctatcccctgggatcaagatgggcaagagatggtgaaatggtttggctgtgtcctcacccaaatctcatcttgaattcccacatgttgtgggagggacccagtgggagctaattgaatcatggggcaggtctttctcatgccgttctcgtgatagtgagtaagtctcgcgagatctgatgattatataagtgggagtttccctgcacccagcacaagctctctcgtggctggggaagtctcacaatcatggcggaaggcaaggaggagcaagtcacctcgcagtgattgtgaggctcccccagccacgtggagctgtaagtccattaaacctctttttttctgtaaattgcccaatcttgggtatgtctttatcagcaacgtgaaaacggaccaatacagatgggcaggcaggtgtcagagccccattgcccaggttccta

SEQ ID NO: 38939 - DNA, 2300 bp, Homo sapien
gcaaaccaaaacagtgacctaccacttcatgttcactaatttgcctaaaatttaaaaaggcaataacaagtgttgatgagaatatagagaggttgtggtcctcatacattgatggtggaattgtaaaatggtgcagccactttggaaaatagtctggcagtgtttcaaaaagctaaacagagagttaccaaatggccctgccattccactctaagatagctatccatgaaaagcaaaaacatgtgtcaacacaaaaacgtgtacaaaaatgtacatagtagcattattcataatagtcaaaaagtagaaagagcccaaacgtcaatcaactgaggaatggataaacaaaatctggtttatctatatggtagaatattatgcagccataaaaatgaataaaattttatttatttgtttttaacatgggtgaatctttaaaatatgctaaatgaaagaagccagacacaaaagaccacatattgtatgattccattgatataacatgtctagaataagcaaatacttcccagccgctggcaaccactaatctactatctgtctgtctgtctctatgagtttccttgaatgtttggtagaattcatcacttaagcaatctgaggctggagttttctttgtgggaatgtttctaattatgaattcaatttctttagcagatataaaagtatatcaattttttattttttcttataatgattttagtacattgtatttttcaatgaatttatccatttcatctaattttttttttttttttgagacagagtctcactctgtcgcccaggctggagtgcagtggcatgatctcggctcactgcaagctctgcctcctgggttcatgccattctcctgcctcagcctcccgagtagctgggactacaggggcccgccatcatgcctggctaattttttgtatttttagtagagacggggtttcaccatgttagccaggatggtctcgatctcctgaccttgtgatctgcccaccttggctttccaaagtgctgggattacaggtgtgagctgctgcacccggccatttcatctaaatttttaaattattggcataaagctgttgacaatatccttttgctgtatcatgaaagtcttggggatctgtagtgatgtctcctggcatggctaatttatgttttctcatttctttttcttgatccagcctgctaagtatttatcagttttattaatcttaatcgatgtgtggcttttaaattttctctatacatttgcttttgattttattcatttctgccattatctttattatttcctttagttttccttctcctttttctaaatatgctgttttttctttagcatcttgagattaaagcatagatcattcattttctaccttttttcttttctaacatattcatttaaagttgtaaatattcttagaagagctgtgctaactgcatcccacaaattttatacgttacatttttatttccatgaatttataatttatgttgtgatttcttctttgacatattgaattatctaaaagaatgtggattatttccaagggtttgggatattttctatttttttttgttattagtttctagtttaatttcaatgtagtcagaaaacatattttattattttaatcatttgaaatttgttgagatttatttatggctaggcatatggtctattttggaaaatgttccatgtacactttaaaagagcacatattatgcaattggtaggcgtgtgttctatatattgtccattgggtgaagctggataactgtatgcttcaaatcttctatagtgatcttttattcaaaatgtgctgcttataaacagcatatagttgagattttgaaaatccaatctgaccctcgtctctttgggctgttaatagccctagctcatcacattctcccattctcccttctggttcttctgcagcccacccacacctttgaaaatagtctccttgaaattaaatcttcctcaaattatcctaaattaagtgtaccatgtgtttcaaattgcagcctcaactggctcactgccttctttatcccagcctccattgcagtgaggttgggggccatatgactagtgctgcccaatggactgtgaacagaaatgacagcatcactcgcatggagactcctccatctctgtcttccctgttgtgacagtctcagagcctacgttctttcaatggctgggctacaagatggtgacaggctgcccaacctggtaagtacttactttgtgtgagtaagaaggaaacattgcaagg

SEQ ID NO: 38940 - DNA, 2300 bp, Homo sapien
tcccctggctgggagcagagacctctcagagtgtctctgaccccaagaactggccctggccctgtggtcagttgagtcaaacagtgtgacccagccacgacaactgactcattgcagtgtcacctgggtgagggggctgcagcttggagaggctgcaagttctgtcaaggactccatctacacagggggaaagggggacaggggaaggctctgccctccaaaccccaggccgatgaccccaaagcccacctccttccaatggcactaagcttcccgatggcagcctcaaggggtcctggctgctggcaccatttctcagatggggaaaactgagggtcccactgtgggtgcagaactcacggctcccccttctcaaggccactgcaccctcacacttcccgccccccaggaacaaacatctcccaaccatctcaccccggggttttcacgtctctaccagatttctcaccggttcttcctgcctccggtcctatgaaggaggaggccaggggaggaaatccactcagactaatttgtaagcccggtgtgattcaccagcgccgcttcccctcctccgggcaggcgggggggctctccgcttgctcaggcctgtccccggcctttgggagcccctgccacggtcctgggcgtgctccccggaggcaagagcccttgcttgcagaggcctcagggcagcaggaagccagaggcaggaagcaggagttataggtctgctacccactctgtaagcccagagccaggaggccccagggccaggctcacagaccgggcatggaaagcctgcaccctagccactgtcgcggtcacacaggcccccttctgtagcaggtccaggcggctgggactggaatccaggctcccgtccccagagctgggttctcctttccgcctggcttgttgaacacctgtggaacgtgtggtttttctccccggagaggaacgccaggacaccaggagagcagccctgtcggggaaactgaggcacacggtttcctgctgcagaaagcgggctgcacagcatcatggctggacctggccccagctctgggaggagcactcagtcacaggagtttagggacatcagaaatagctgtagtcagggatgactgggagggagcaggaggaggggagagtttggatgagcagaaccttttggaagcttccttctggaaacactagaaagaggggctcttgtcctggccctccctctctctctctctttttttttttttttttttttgttttagaaatgagaccttgatctgttgtccaggctggagtgcagtggtgcaatcacagctcattgaagcctcaacctcctgggctcatgtgatcctcccacctcagcctcctaagtagctgggcctgcaggcatgtgccactgatacaggaggggggacagggaagtgctgagaggagaaaggcagggtccctggcaagggctccacccttgggcctgtgcccacggacctaggtgaggacaggcactcctgtttatatgcccaaatgtcacattttccaagaccaccctggcccaccacgccccccgcccccccgcccatcctgtgcctatgaaaaccctgagaccccagtgggtacacacacaggtggctggacatcaagaggagcagaggatcggaagagcacaccgacagcactggcagatgctggcaggccatcgactggctgaataacacaaatgcccaggggaatttggctggggatggtcagaggagagtctggctgctgagcaccttgacttcaggggaaaaatcaccttcccactccatcccccttctggctccccatcatctgctgagagctacttccaccactcaataaaacctcgcactcattctccaagcccacatgtgattcaattttcacagtacaccaaggcaagaaccccaggatacaaaaagccctttgtccttgcaataaggcagagggtctaactgagctgatgaacacaagccacctacagatggcaaaagtaaaagagcatcctgtaacacacgcccactggggcttcaggagctgtaagcatccacccctagacactgccgtggggtcggagccccatagcctgcctgtctgcatggtccgcctagaggtttgagcagctgggcatggaagaagcgagccacacccccatcgcatgccctatgaacgggataagggaactttttcacttcaccactatgcctgactaattttttaattaaaaaaaatttttttgtagaaacagagtttcaccatgttgcttaggctggtctcaa

SEQ ID NO: 38941 - DNA, 2300 bp, Homo sapien
attgagaacatctgcatcaaatccaaaccatttccctgatccttccttgagccttccccatgggagggatttctttttttttttaagcccctgcacattttgtctagccacctttagcgcaattcctaggtctcgcctgcctgccaccgcagaaatagacatgccaggggaaggcggaagcacccccccccccacccccgccgcctccccgagtgtgcaggcatccttagaagtcgcatttccccgggacaggaatgtccctcggtggcaatgccgcttcccgccagaagcctgactccgggacagggcgtggcaggcgcgggggcctgggcgcgccggtgggcacgtgcgcggggacccgaggacccgaggacccgagtgtcggggcgccgctgccctctaccgggcggcgcggtcggagctacagcgcggcggccggccgactgagcgcgcgggccggggcgccccacacggaggcagcccttggccacccgagatccacagtgccctgctgtgcgcggcgtcaccgcatctagggtggaggctcgcaacgtgccccccgacgccagcgcgctcccacccaccggcgagtcaaggttgcgttggggagacagtgaaccccgttcccgacatcaggggcctccccttggggaaactgaggcccctggccagctgcgcaagacctggggacacgcgtgttctctaaatcttgggactttcatttccagcctcttcctccaaaaatgccgaattcactgcgccaaccctcgaactcacttgaaaagcaattgttttccacttgcgcgttttattttgtatcctatgcagattctatttacatatgcattttgagattaaggaatttggggacttgttttaactaattactcgttcagtgaagtacgggagagtcaaagaacagtattcctactggaaactccaagtcacacgtgtgtataatcaatgaaagatgacgatcataaaacgtgtgctttcgccagctttccgcgaggagagaaatcaaaagagaatttattttttggtttgcattttagcatttctgtaaacttgggaccacgctttccgttttcagtgagtgcacccacactttccaactttctgcgcccaaagttgcaacaaaccaaggtgtctgaaccacaggaagtttcttgggctgttccgctgaagcggcgcggggggacacagaactgggctcccagacttttcctgtcgtggcctaaactggaacggcttgggcgaatgggggctgccgggacccccagcgctaccgccgttggggtgcgttcgggtgcgacgctggcaccgccgctgtccgggtgtggggcatccacgcgcgcggccccctgagagggtcagggctgtttccccctcaactccactcctccaaacatgccacgctgttcctggtcgtgtcggtgtcccggtcctcgctgggcgcagagggatcagagtgttgccgtccaccgtcggggcgcctcccacgcacgctgctgcggggggcctgggccacgcaggggtcgggtgtggggggtcccgggcaggtggtagcggcgtctccgcgctctgtacactaaccactacaggggcgctccgacgttccccccaaccggagtcttgaaggcgctgcgctcggccaccgcgggcgatcgcgatcccagcgggagaccccccccacccccgcagccctccccaggtgcgcggtgccgggggaccccgggcgctgccctccagcgccccctcggggccgggtctgtggccggcgcgaccgcggactttggggggggttgtcccgaggggcgggggtcgccggtcggcccgcggaggggagggggagggcggcggtgggggggttgggggagcaggggccggggccgcgcgcgcgaggccgggccgcggccgccgcgccctggggctgcgactccggctccggctcgggctcgccatggctgcggcggtgccgtgaggaggagtccgcgtcctcggtggcggcggcggcggccggctccaggccgggttttggcgccgcccgcctgctgcctcctggcggctcctgaactccagccccctctctatcagccgctcactccgtctcaatatgtctcaagatggcggccaatgtgggatcgatgtttcaatattggaagcgctttgatttacagcagctgcaggtcaggctcctccgcgctcggcctcgcgcccgggggtgggggctgcgggcggtcgcggcctccgccgggggccccgggctggcccagccgccggggggcccgcggcggcgg

SEQ ID NO: 38942 - DNA, 2300 bp, Homo sapien
actacaggggcgctccgacgttccccccaaccggagtcttgaaggcgctgcgctcggccaccgcgggcgatcgcgatcccagcgggagaccccccccacccccgcagccctccccaggtgcgcggtgccgggggaccccgggcgctgccctccagcgccccctcggggccgggtctgtggccggcgcgaccgcggactttggggggggttgtcccgaggggcgggggtcgccggtcggcccgcggaggggagggggagggcggcggtgggggggttgggggagcaggggccggggccgcgcgcgcgaggccgggccgcggccgccgcgccctggggctgcgactccggctccggctcgggctcgccatggctgcggcggtgccgtgaggaggagtccgcgtcctcggtggcggcggcggcggccggctccaggccgggttttggcgccgcccgcctgctgcctcctggcggctcctgaactccagccccctctctatcagccgctcactccgtctcaatatgtctcaagatggcggccaatgtgggatcgatgtttcaatattggaagcgctttgatttacagcagctgcaggtcaggctcctccgcgctcggcctcgcgcccgggggtgggggctgcgggcggtcgcggcctccgccgggggccccgggctggcccagccgccggggggcccgcggcggcggggaggaggggggtgccgggcaccgcggggccgagtcggggccgagtccctcccgctccccggcccccattgatcactcgcttgatcggaaattgatcctctttgttcaattcatcgatcagcccaagatggcgccgggagccgccgccgccaccactgcccccggtgtctgcccccaccccgggcgcccccccgggccccgcgccgccgccgccgccagcgccgccgccgccgttgccgccgcgggaccggggagggggcggccccggcggcccgcggggtgcgcgcgcgagcggggagcggggagcgggcggcggggggcgggcggcggcgggcgccgggagggggccgcggcccggcggtggcgcccgcccgcccgctcgccccgcgcccccggcccgccgtattcccggggaaagtttgtggggagttgctgcggggggtgaagcgcctgcctctccaggaggagccgccgccactgccgccggcgcggcggagctggggctggtggcgctgtggtgccgccggctcgggggagggtcagagcggccaccggcggcggcggcggcggcgcggcccggctccggccaggcgggcgggtggccgggcaggcgcccgcgctcgctacccccggccggccccggccgccgcccccggctgtcaccggcccgggccgcgccgccgctccggcaccccgcgtgtggctcccggcgcggacccccgggtttgtttacgtcccggggagcgccccggggccacccgcgcacctcgcggccgccgcgctcttttgtgtgcctgtgtcggtgacgcggacctgttcctccgtggcggacccccgcgggggctctttggggaaacttggcgaggggcggcgggggtgccccgcgcgcagtgtcgctgggtcccggtgtcccggaccgccgggtgcgggcgcgggaggaggaggctgcaactttcccctaggcaggccccaagctgttcccccgggtgcccgggcagtgtacgctgcctccccgccgccggtccgagccgcgatcgccgcgcgcctgggggctccggcggcccccggtgacctgcggcgccgggtcccttccttgcgtcccctcggggcttctgccctctctgcagggcccgccatggagcgcgcggcgggtgcgctcggagatgccttctcgggccgggttctcgaaagcagagccccgggggcccgttgggaccgtggcatgccgggcggtggtccgcgcgcggagtccccggcgccgcggggggaccgtgccggggctccccggcccgcgcccgagtcgccgccgtgcccaaggggcgagtgcctgcctgccaccccccgcccggaggagcggcgcacccttagggtccgccccgcacgtgccagctcggcgcccgcggcgccgggacagccccgggactctgccaggtggatgttgtgcgtagccggagccaggttgaaggtgagcggcgtgtgggccagaagtcccgaggttgcaggcgcggagggaaccggggatgtcggggggtgcccgggtcccgcggcttagaatgctctagggcggcctggtgctctgggaggggataggagggtt

SEQ ID NO: 38943 - DNA, 2300 bp, Homo sapien
ttttatcagttacggcttctacaagtttgctaatttagacttctttattgccatatctttaaactaacaatagatgatttcggtatatatatatatttttttttgcttatttataggtgctgtattttattatctgattgttaggaagggatgaaaggggcaaatattctttagagggatagactgccggcagtattgggtataatttacaagatgtagttgtcatactgtatattactgattgaaaactttttgaccgtattgtgtatcattgaaacctttgtcttaggtcaacatctttggatgacattttaatggtgcattcattatttcttaagtttaattaatattacttttttttttatttggggggtgggagggagttataattttaaaggtatgctctggctgttccacctccgtgtgcttgttaattaacttgtaggactttgactgtaagatgtgaaaccacgtttcttgcatgatgttttagagattatttcatttacagtcttttaacctgcagctgcagcacttagttcacgttttcacaaatttcaagagtcactacactaaagacaatgccttttcatgaataagaagttttcagaaggctctagggggctgggaggcaggctgttcgtttgtcttttgttgggggtatcatttctgaacttgaaatccagttcagggagaagagaattcaaaattagaggagcttaaggggacacgggtcaacatctagctcgattcaggtgcattgagaagagtgagttcacatcggtgacccttaggacagtgagtggcagagccctgacgactgtggtgtcctctccacaaaaccctcaagggacttttgtcatcatgtgtgatgaatctttaaatatcgtctaattttcataagaatgaaaagaagttaacaggaaatagtaggctagggtttagttttaaaggcatgactgttatttacaaaggtgttaaatctgaggaaattgacaaatacagatttgtccattctagtggccaaacagtaacagtctaaaatgcagtcattttgaccctcccaagcaatttagtcatatgtgttgttttctcttttctgtttttacttcttagatttttaactaggttactgttggttcccattctgtcttttttgccagacttacatctggtgccagatacaatcagttggttaaattttgcttgcagttctgtgtattttttttcctctattatttatttttttaaaaaaaatagagatcctaaccttagatctttgatgtgaagctagcactgtctgtaatacttctaagagctgccactaaaataatacagcaatccgtggccaggggagcaccccctcctggttgggcccctcagttggagtctaagggttaatctctcatcttgctaagcagtattcaagtgccttgaacagtgtcccctcggcatggctccccttcagcaggctggcattccaagcagtggcccccgcaggcagccgacccccttcctcttcacgctctatgagtttaaaaagctgatttgtacctctcccctgggggaaacggttccatataaaacactaacacttaattacaagctccattatgccattttaaatggcttctttttgttaattggaggcattgttcataacttaaggcttttgccattaacttagctggctaagcagaggctcggggtaaaatcagtgtttgcatttagcctcttgacccggagttccggcccaagctcccttgtgatagccgagatggcaggtgtgtgagttctgtcctagacctgtgcccaactcacttccaccccagaggagtcttctgtcctcctccccaacccccgagctccctggtaacctcctcttgaacttctgtatcagtgaagacatctgtggtttctgctcaccagacctctctttagaaagggttatcagagccatggagcttagctcaattggattcttctagacgatcttaggaggcatcttggcatgaggcagcttctaagcgtctcctgggacaggattggggtgacagcccagggatgcatgcatgggagaactctctgagaaatgccaggatcgtggctcacagggacccaccatcaaaacctgctactttgtgcaagtaattgaggcaaaagataccagtcgacagcctccctggggtagatcccttgtacctccaaagtacaaatacctccctgctcagtttccttcctgtcgccatctttgttttcttcccattgaaaaaccatcctgtctgatgtggacgttcagg

SEQ ID NO: 38944 - DNA, 2300 bp, Homo sapien
cccaggagtctgtccccatggtcccagcacggttcttggatgtgctcctgtttgtggccaaactgaagcatcccctcccttggtccaggaccttcacctctattaatgtgacccaaggccccattagctttctggtggtttcctctccctacatctcacaaccgctgtccacctcccatcctaagcatgagtggccggctctgccatcccatcccacaggccaggacccaaggactctgtactcaggccaggagggcatggtatttatcgtctctctggacctctcccctttggggtctccttaaagtccctgcaggtggcccagggccagccccaaccctgcccccgacagtcctccctccaaggccgggtcctgccttcaggtcctgcctcttccctcatcccctcctcacttccgcagataccaccttcctgccagggacccaggggctcagtgaatgtctgaaggaagaaatccatttaggggcccagtgcggtggctcacgcctgtaatcccagcacattgggaggttgaggcggacagatcacttgaggttgagaccaacctggacaacattgctaaaccccgtctctactaaaaatacaaaaattaactgggcacggtggcaggcgcctgtaatcccagctactcaggaggttgaggcaggaaaattgcttgaaccttggaggcggaggttgcagtgagccgagatggagccactgcactccagcctgggtgactgagtgagactctgtctcaataaaataaaataaaataaatccattcggggcctgaacgaggcgagactctggtgtgagcaagggcttagacagagctgggggtggatgccttgggtttggtcccaggtcgggaagcctccgttctttgactgtaaaatgtgaatcgtcttttctgactcatctataaggacttggtgtgcagtgggaacccaggagcatgtggaggtgaggctgggctgccccatcctggcccaggacactgagcccagccagggcaggtatgacagccggtcagcaggccgcgcagtcagggatgagtccacggaggaggccgcacataccatttccctggcactgcccacagcctgcagcctttgtgcatttctgaggccacagtgccccctggcggctgtgcagcctaccccaaaggacagcgtcctgggtctcaggcctcagtctccctctctgcggccccaacagctcaccctaaacaaggtttattgttaccatgttacatgtcaccatttgggaccagaaagggggatccagtggccctgagccgcacagtcaaccagaaacagggccaaacctcaccctcagggctgcctggctcctgggtcactgaagtcctgcctggcaatgcgtgcttgggtctgggtcccttccccgacatctctcaccctcctgcagggcaggaaagtcacagtttggatgctttgttataaagatgaccctggcacctggaggagggagagacagacagggctgtgggtcgggggactccttggggaccacgccaccccaaccactgcagctggagcctctgttgggggcgggaccaagcacctctgttgtcagcccagaggtggcacccctacgcgctccactgcacccccgcggctttctctgcctctcctacccccaggcttcccactggacattatcccagaacatcagctaggaagcaacctgagcctccttgcccctgcctgacaagcaaagtgaggcccagagagggaaaggggctggccagggccccccaaacagccgtgggcagagccacgttgcaccggtttctcctaatccctgacctgagctccttctcctacccaggggatttcatcaatccagagagtgcttggggccaggagtgcctctgacagtcagggagggcttcctggaggaggccctaggtctaatggggtcttctaggcagtggtgagttgggagggaatagccagcactctcacagcatccaggcagccctgcttccagaccgtgggttggagaggcagaaccaggggagggcaccaagggtcccaccaggctccctctgacggccatgtcttcctttggccacaggacgctgtgcagagctgcaagtccgtatcactgaggctgtggccacagccactgagcagagagagctgatcgcccgcctggagcaggacctgagcatcattcagtccatccagcggcccgatgccgaggtgagcccacccccctgccccatgcccatctcgctacctgcccaactgacttagcctctgcaaacactg

SEQ ID NO: 38945 - DNA, 2300 bp, Homo sapien
cggggctgcggctggtgacttgtggcagtgataccccggggcctcccccgtgacagtgacggctgcgcctccaccccgactgctcagtgcatctaatcacttagactcccctgaagaatcccccatggaaactgcccttatccgctgtccagcagctgccagaggccccaggtcacctcgggtccccttgaaagaatgtctcggtcacatcaggcccgctaggtccagagagcgagcccccaatgcccggccaggctaagccgcagagaccctctcagcccccacctcaggttagggctctgcccgcagcctgacctctagccctggtggcagaggtccctcagctgcgaggctaattgggtgaccaccgattccagctgcggttaatccagcttgggcctgtctgcactgcgatcctcttgggctctcctaggatccccccatgccccgtaagaggtggaagacgcttccttccaggacagcaggctttgagtccagcacccccagcctgcctttgccaccagccccaccctgcagagtatatgaggcttgacagagtctgccccctcccccactgcaccccaagagagagagccccagccagcggaacagtttctattaccccctccctgcccccagacccatgtgatttctgctttcttctttagcaagatattctggtttctagataaggaagagtctctaatgagcccccgagccccagtctcttcagactcatggattggtctgaggggtctgaacgtctcctagccaatcagaactggctgtggaccaccctagcacggccacctctcagggccactggcaggccttcctgagttagatttgtagttgcatatttagctttgcacatttgaaataaaccacggttgcagccaccctggtgccctgtgctctgggacgctggagggactggaggctggtggggatgcctgcggtgccacccctgggagctggggctggcctcacagctgggcacacagaacattcctccccctcttctcatctccaggaattccatgagtacattcagagctctgctgaaacccagatccagtgtccgagtgcttttgagaggacaagtagcaccatcaaaaagggaaacccattcctttattcaaaaaccacccggggccaggcgcggtgggtcacacctgtaatcccagcgctttgggaggccgaggcaggtggatcacttgaggtcaggagttcgtgaccagcctggccaacatggtgaaaccccgtctctaccaaaaatacaaaaattagctgggcatggtggcgcatgcctgtaatcccagccactcaggagggtgaggcaggagaatcgtttgaacccgggaggcggaggttgcagtgagctgagatcgtgccagtgcactccagcctgggaaacagagtgagactccatctcaaaaaaaaaaaaaaaccacctgtcgggctgtggttgggtgtatgacgtgtcttggtccacgtcagttcctggggaatctctgcttccctttctgtgctcccctttcccatgggcccccgcctgccaggggctgcaaagcccgtgcccatcaatccccctgagcaccagcctcgcatgggaaccccccgagacacaggttctgggccacctcacctccagcccagcctcagatagaggagcgcattctctgggtctggagtgggtgcattaactcattgtccagctgtcacaagactggctgcaaacccaggtcccccactgcagcccaccaggccagggtcccctgtgctacctctgtctccattttagttctgaacagtctaaagcatgtgtatccaggggcctttctttggggtccccgtcccagcacccctcatctcccccatgaggacttcttccaagcccctcaagcctcctgccctcagggacccaggatggacctttcctccctgaccttcattcctatccccagcgaggcgacagctgctcttggccaaccacgccccctccacccccacagccacttccacatctccatcagttcctccttgtgggtccgaggcgctctgccgccggcccctcctcacttcttcctccctggggatggatccaagctattgtcctgcccatggcttcccatctcaggacgctctctggccgctatcatcccagcagtggagttcagcccactactctgaaccaggttagtccaccgcgggtcaggctctcccctctcccgggagggtggagaccacaaccaggccatgtatggagcttccctttctcccactctcgggcaccccct

SEQ ID NO: 38946 - DNA, 2300 bp, Homo sapien
aataaatatatttaataaatatttaaataaataaaataatatttaaataattctatacccatgtttttcaaaataaaccaataaaatagatagtatatattagacgtgttagtatatatatctgagacatgttaaaaatcacaactgaattctcacaattcagtcacaaacctaaacagcaaataaaaatttctatcaccagaattatgtatttttctggtggggaactaccaatagctataaatagaagagattattatggaagtatcatagataaaaagagtgctcgcttcaggagcacatataataatacagaaacaaatttaaagataataaaatatttaggataaaagaattgtctcttaaaaatgaaaagaaaattatctttatgtatatataacaactataactctcatcaaaaaactacaggaacagcatgttttcaaaagtacaacaatttccaaactatttgaaataaatctatgaataattcaatggccgacattttccaaacaaaccaataaaatgcagagtgtgcatgaagctatctgttacaatctgtggcactgatatttcacaaaagaattctgtcccaatctgagcccctgcattgtgccttcaaatcctcctggactgcaagtccgtaagaaacaggacctccaggttccgccccagggaggttggaattcagcaatataaaaagggtggtggtgccgcaggaaagggtggaactggaaacgctcctggtttcttacttttctccaaggactcctagaaggaccccacccccctccccccacccctgctcctaggaggacaacgtgatcactgtattcagctccatcaagaatggtccaggttcttctagatgatctgcacaaatggttcctctcctcctgcctggtgtctgccattagcattggaataaagttcctgctgaaaatccacatctcccctgggtccagtgttctggaggcgagagagacaatgtcacacttcaaggaggcagctctctagacaggaaagttattcacgtcccatgtcaattgagaaatgcaattttatctgctgcctttcattctataccctgcttctgaaccatcgtgttcaactgtgaaactcacactttggtgaccacgactccaaaactcacttaatacacccaaggtcagccccagtgatctgcttcatagcaaggactttgggtgggtctgcccagggagtagggcaccctcagagaatgtggctttggactttatcacagctggggccttttgtgtcacttaagatctaaacttgtaaccatgctagatgtgtttctaatgtgacaacatcacgaaccacgagtccagaagcctaatccttaatcctacctcctcatgatgaagtctcatgctctgtgctcaacgtggttagctgcacaagatgtaaaccaaagcttcactgaaccctcgacccaaatcagtaactcaagtgcgtcaatcataatgaacctccccaaactcagtttttatgattatttttgaggcagggtctcactctgtcgcccagactggagtgcagtggcaggatcagggctccgtgcggccccgaccttccaggctccagcgatcctcccgcctcagcctcctgagtagttgggagtagagatgcgtcccacatcgcctggctaatttttgtatttttgtggagaggggatctcgccacgttgcccaggcttgaagccagatcaagcaattgggttcttcggatttccgaaatagaccccaatattctgcctttaccccagaggatgcagatgtaccttctctcaggccgatgacctcaggcctccccggtccctggagctctaggaaaggtgagcgcgatctcgcgcccacacccagtgctctgggtcataagcctggatctggaaaaacaaacgccctttgagaagacggggactcgccaggatacccctctctcccctcatccagcctccagcccacccaattcctccccacctcctccacctccccaggccccactcacctcctccaactcctctggggaaacccaagccctgcagctcatggaacagaagaagtggaaccgtcgtttctggaacaggactatctgagagcggttcttcctggccctcgagttcatggaacggtataactggaaccgacgcttacggagcaagggtatgcgagagcggttcttcctggccctcgggttcgtggaacggtataactggaaccgacgcttacggagcaagggtatgcgagagcggttcttcctggccctcgggttcatgg

SEQ ID NO: 38947 - DNA, 2300 bp, Homo sapien
atctcccctgggtccagtgttctggaggcgagagagacaatgtcacacttcaaggaggcagctctctagacaggaaagttattcacgtcccatgtcaattgagaaatgcaattttatctgctgcctttcattctataccctgcttctgaaccatcgtgttcaactgtgaaactcacactttggtgaccacgactccaaaactcacttaatacacccaaggtcagccccagtgatctgcttcatagcaaggactttgggtgggtctgcccagggagtagggcaccctcagagaatgtggctttggactttatcacagctggggccttttgtgtcacttaagatctaaacttgtaaccatgctagatgtgtttctaatgtgacaacatcacgaaccacgagtccagaagcctaatccttaatcctacctcctcatgatgaagtctcatgctctgtgctcaacgtggttagctgcacaagatgtaaaccaaagcttcactgaaccctcgacccaaatcagtaactcaagtgcgtcaatcataatgaacctccccaaactcagtttttatgattatttttgaggcagggtctcactctgtcgcccagactggagtgcagtggcaggatcagggctccgtgcggccccgaccttccaggctccagcgatcctcccgcctcagcctcctgagtagttgggagtagagatgcgtcccacatcgcctggctaatttttgtatttttgtggagaggggatctcgccacgttgcccaggcttgaagccagatcaagcaattgggttcttcggatttccgaaatagaccccaatattctgcctttaccccagaggatgcagatgtaccttctctcaggccgatgacctcaggcctccccggtccctggagctctaggaaaggtgagcgcgatctcgcgcccacacccagtgctctgggtcataagcctggatctggaaaaacaaacgccctttgagaagacggggactcgccaggatacccctctctcccctcatccagcctccagcccacccaattcctccccacctcctccacctccccaggccccactcacctcctccaactcctctggggaaacccaagccctgcagctcatggaacagaagaagtggaaccgtcgtttctggaacaggactatctgagagcggttcttcctggccctcgagttcatggaacggtataactggaaccgacgcttacggagcaagggtatgcgagagcggttcttcctggccctcgggttcgtggaacggtataactggaaccgacgcttacggagcaagggtatgcgagagcggttcttcctggccctcgggttcatggaatggcctaactggaaccaacgcttacggagcaagggtatgcgagagcggttcttcctatacaggaagtggaagatgttttgtttggagtcctcgtcgtcctcctccatgtcattggccaggtagctgaggacagaaatcaggttgctgctcaggggcaccaccaggagaggcctccggctgaggtcagcttcccagagaggaaggtaagggaccgtccctagctcaggactggcacccaccctgcagagagccatgccttcctcaggagggctctgctggacagagacctgatcaagggcgtctcccactccttcaggatggagacaaaaacccaactggtggccgagagtggtggcttacgcctggaatcccagcacactgggaggccaaagcaggaggatcacttgaggccaggagtttgagacgggcctgggcaacatagcaagaccctcgtctctattaaaaatgtaagaaatatgccagacgcggtggctcatgcctgtaatcccagcactttagaaggctgaagcaggtggatcgcttgagaccaggagttggagaccagcctggtcaacacggagaaaccccatctctactaaaaatacaaaaatgagcctggtgcggtggcacacccgttaggcctagctactcaggaggctgaagcacaagaattgtgtgaacccaggaggcggaggttgcagtgagttgagattgggccactccattccagcctgagaggcagaacaagactctgtctcaataaacaaacaaacaaacaaactgtccaggtgtggtggcacagccctgtagtcggagctaataaagaagctgaggtgggaggatcgcttgagcccaggatatggaggctgcggtgagctatgatctcaccactgcactccagcttgggggacagggcaagtctgtctcaaaaaaataaaagaaattg

SEQ ID NO: 38948 - DNA, 2300 bp, Homo sapien
atccaaaataaacatggaaaactaatttaggtcatgatgggaaggagggggttggacatgccttgtcataattctcctcccgtcagagtttaggcacagctgaccaacattatgatctctattagaatagagatcataggactgacaaaacaggctctttttatcagtaagatacccatctccaaccagactctgatatagcatcacatgacagatagcagtccctgaagtaaatcacagtattttaccccgtaacatattttctttgacaaactttaaaatagtcctgcaaagccatctctttgggggaaatttgcattctgtagagaatctctttcccttacagaaaagactccaggtcttttctggagagtctgacaccttttaagatccaataagagatatttatcatctattctctctgaagcctgttctgaggcttcacctacataacaagaaccttggtttccacaatcccccttatcttaactcaaacttttctttctttttttccctccctctttcttttccttccttccttcctctctctctttctctctctctctctctctctcttttcttctctgttgcccaagctggaatgcagtggtgccatcatggctcactgtagcctcaacttcccaggctcaagcgatcctcccatctcagcctcctgagtagctgagtctacaggcatgcaccaccacacctgtataattattttttttgtagaagtagggggtctcgctgtgttgcgcaggctgtccttgaactcctggcctcaagggatcctcccagctcaccctcccaaaatgctgggattacaggcatgagccactgcaatggcccatttctttatgtagtcttccagctgttcagccaacacttaactctgaaccaactgccaatctttcaatctactagtgacctgaaagcctttcctggctgacccaacatatacttcccatgtattgatttatgtctttgcctgtaactactgtctccctaagatgcataaaaccaagctgtaacccaaccactttgggctcacgttttcaggaccccctgaggttgtgtcaccagccatggtcactcaaataggaggcccagaataaaactctttacagactttgactctttttggtcaacataacctaaccctaaacataatcctcctggggaaggtaagatcacaggtatctcttcttcattcaatttgtgtgtgtatgtccttatttctctacagtttttaggcattcactgtgtgatctagaaaagctatggagtctcgctttgtcgccaggatggagtgcagtggcgtgatctcggctcactgcaacctccacctcccaagttcaagtgattctcctgcctcagcctcccgagtagctgggattacaggcacgcgccaccacgcccagctaatttttgtatttttagtagagacagggtttcatcatgttggccaggatgatctctatctcttgaccttgcgatctgcccgcctcggcctcccaaagtgctgggattacaggcttgagccaccgcgcccagctacaaattctattttctttttgttccttggaaagcatcgctgggcatttatcctgtcccagtatttgagtgaaacttctcagcatttcagagcagtgaccatgatacaccctttcctttccttctccttatgggaaacttggttctaacccagaggacttgggctccaggacccagtaacgcagccctggacttgaccctaaaagggagtaaagacaaaggtgaagttcagtccggggttcagggttgccaaagctcatagcctggagcttcttcacctttaggcggggtagagacatttaaaatggcccctaaacttggagggcgcgtaaagctcataggctggagcttcttaacctttaggcagggtagagacatttaagacggcccctaaacttggggagcgcataggctcatgggaaatagagtccgttacttgtcctgggaccggtggtgggtgtcccgggaggcggacttccggtgcactcctgcgcgtgtgcacctctccctgcgtgcgtgttcgcgcgtgcgtgcttgcacatgcgcgccacctccgcactgccctggcttcctgcgcctcttcaggtcatcgcttgctctcgttcccaggctttggcctctagtggacgagaatcaccgagtctgcggggctggacgctgactgcccgggccagcacctaggcgggcgggagctgtgcggcccagggttcacgcgggccgggtagaggctcgagccgggacccccg

SEQ ID NO: 38949 - DNA, 2300 bp, Homo sapien
agccaaacagcctatggtctgtaacaccaaatgtatgtgagcaacagcttttctctttctctttctctctctaatttttttttctttttctttttcttttttttagacacagagtcttgctctgtcacccaggctggagtgcagtggcacgatcttggctcacagcaacctccatctcccagtttcaagctattctcctgtctcagcctcctgaatagctgggattacaggcacacaccaccacacctggctaatttttgtatttttaatagagatggggtttcaccatgttggccatgctggtctcaaactcctgacttcaagtgatctgcccatctcggcctcccaaaacgttgggattacacgtgtgagccaccatgccgggccttttctgtttctcaatgtcaactaaacaaaaaatcaggcttttaaaaaattaaggttggttttttgcaatcttactgaggactgtaaccagggaaagtctttcacagagtttgttaaactgctccaaaacagagtttcagcacacatttatatatttatatttatatacagtttatataaaaacatttatatacagttggtggtgccctgcatgtgctcagaagttatatcaagctgggcgtggtggctcatgcctataatcccagcactttgggaggctgaggcgggtggatcacctgatgtcaggagttcgagacaagcctggccaacatggtgaaactccatctctactaaaaatacaataattagccaggcgtggtggcgtgcacctgtattcccagctactcaggagactgaagcaggaggatcacttgaacctgggaggcagaggctgcagtcagccgagattgcatcactgagctctagcctgggggacagagtgagactctgtctcaaaaaaaaaaaaaaaaagttatatctaatgtgctcagaagttaacaatagagcaaaatttcatcaaggctgtgtgtgagggtattatctagttacagattacagaggcttggctgggcatggtgacttaacacctataatttcagcactttcggaggcccaggcaggaggatcgcttgagcccaggagttcaagaccagcctgggcatcacagcaacaccttgtctctgcaaaaaataaaaataaaaaattaactgggtgtggtggcatgcgcctgtagtctcagctactcaggaggctgaggtgggaggagtgcctgaacccgggagttcaaggcagcagtgacctatgatcgagcccctgcactccagcctgggcaaccaagcgagaccctgtctctaaaaaaaaaaaaaaagttatagaagcataatcattaatcccgtcagagattatgtacaggaagaggcaggggctaggatcattgaacttgtcttttctaaaaatgcagtgttcaggcaagagaggtggaaacctgtgttctctctcgctcttcccagcttattgttcagggcgttattggagagggctgcgctcagtcaccgagtcacggcctttgtgaaatcctgctcgcaagcagaatgagcagacatggttccttaggtttattactgtgcctcacactacgagacggtcattcattggcagaggtgtatttgcggggggccaggtatagagtaattcaaggcggacaaaggaggaatgtcccagtcttcaggaagctcagtgacatgtttgcgctgtcttatgtaaacaggagattgtcagaaatggaggagggggcaccagatccaaggaagtgcccggacaaagccgggaggcgaggagagccgacggggaggaggtgccgagagcatcagcggggctgctcggtggcacgaagacgcccgcggggactggagaggtcggctagggccaggctactcaggcacggagggccacctccccttcagggacgtgagcatctagctgcactgatttgttgttcaggaacaggaaatgaaaccccgcagctttgaacacaataacccacgccagcctcaggctcatgaatattcagcaggctgcttgcgccttgcaaccccgcctccgttcccctctgcggagactgcgtatgcgtcgccggcgcgcggctgtgtcgtcatacttgcgcgccgacgccgccgctcgcttgtgaaactggaaggctgccatggctagcccagccgcctcctcggtgcgaccaccgaggcccaagaaagagccgcagacgctcgtcatccccaagaatgcggcggaggagcagaagctcaagctggagcggctcatgaagaacccggtgagacgaggcccaggctccacgg

SEQ ID NO: 38950 - DNA, 2300 bp, Homo sapien
tacccctgaaattcaaatgttccctcacccatagccattgatgggggtggcaggaggagggccagtaaggaaccctgggatttgcttatgtccatgttagggcctaacttgccttttaggtcagtaacccggagggggaaacctggtttattagactaagtgtcctcctggtttcattctggctgtcagcagtagcctgtaaaagacaactcgaagtgtagatggatttaacctggcgtccgtaacatctactcttccaattgtcataaaatgtgggctggctgacatgagtggaatttttccttcgtttggataaatgtgtcacggtccaatgctgttgtgacagatggaaaaatcctatgtagggcacgcagcagcctacccggcatggaggaaggactccaagggaccgtctggcaccgccgggctgataggaacccatcttgtctgtctgtgaattattcatgtgctgcacttcctgaaaagaatgctcctgtttgactgcctcgctcgtaaaaccgcagagaattcaccgttaaaggtgagaggctccctgcagtagggagtggaaggggccagggcacagcagaaactctttgctgctgtctgcgaacagcatgagaaggacagcacgctgcactgaagttgggaccccaggggtctcgctgggtctgtgagtggcagtgcactctgggtggcaacccccaattagctcagtgcaagctcttcatggtgccatccaacaccctgggcaggggccaagcaaggtggcccatgcctctatgcccagcactttgggaggctgaggtgggaggatcacttgagcccaggagttcgagaccagcagaggcaacatagcaagacccatctcaatttttttaaaaaatttaaaaattagctggacattgtggcacatgcctgtaatcccagtgctttgagaggctaagagaggattgcttgaggccaggagtttaagaccagtctgggcaatacaggaagactctatctctaaaaaaagaatttttttttttttttttggctgggcacagtggctcacatgtatcatcccagcactttgggaggccgaggcaggcaggatcacctgaggtcaggagttcaagaccagtccggccaacatggtgaaaccccatctctactaaacatacaaaaaagtagccaggctagtggcgtgcacctgtagctcggaggctgagacaggagaatcgtttcaaccccggggtcgggggttgcagtgagccaagatggcaccactgcactccagcctgggtgacagggcaaaactccctctcaaaaaacaaacaaaaacaaattttttaaaaactaccacggtgtggtggctcctgcctacatgtagcctcagcactttgggtgactgagggcagaggatcactcgagctcaggaattcgaggctgcattgaaccgtgatcgcaccactgcagtccagcctgggcgacagagccagaccctgtctcaaaaaaataaaaaaaaaaatcctgtgaaaactcgggcgtggccagacggattctcccctccccaccttcctttcccctccactgcccacctgcacccgcccgccctgtccccactccccgcccctctacgcagccagcgtccaatgctgggcaccccccgaggctcaccctgccaagcctggggctccccttttgcgcccggacccaggggcagggaaagcccagctcgtggtctgtgggtagccggacccccgatggggcggtggggggcctcgccttgactcccagagctggggccggggacaggagctggggcaggagggatgcgcgcgggtcggggtcttcccacctcccctgctcctctccctcgcgcgatcccggggtggttccaggtgaggcggggacccccacccccccactctccgaggaggcgccgccagccccgcccctcccggcccggcgggtgacgtggccgcggctctcccgcgggtgggtcacgtgttggcggcgcctggttgccttggcagcggctgcggcggccgcgggggcggggtggaggcggggccgggggaccccgcgcgaccggcggaaggagggagggggccgcgctcggcgccccggccgggccactgggccacaggccacgcggccacgcagtccgagcgggagccgagccgggcggggcgagggcagctccggtgagtgtggcggcgcgggggcctggcgcggggagcggggtccctgcggctgggggggccggaattggaccggggacgctcggcggggaaggggacgactgtaggctg

SEQ ID NO: 38951 - DNA, 2300 bp, Homo sapien
cagaagtacagggctccatcctgccccaccccaccccctgcctgggatccagtgtgaggcccagactctgtccctccccctgggccaccgggcctggcacacacagttggcattgggaacataaaggatggatttgaaccccctcctgggctgctccttcgagacctggagacctgtctcaagacccagctccaggcagacagacatcgtttcctccacaatcccacccactctggggacatctgcagggcctcaccgatggggcatgggaggcctggcggctcccaggaagccaccctcagccctcactgccctgagctcttcacctccactctcagacctgagcccagcccacccttactgatggggcatccctcttgttcacccttccttcctttggaggccaccaggctctcccttgcgtcccactcctgccagtcggccagccatttccctgggttgaactgtggtcccaaaccagaatgatctagcagtgcccagaccgttccactcaccaatttcttccattctcctgtggctggacgcccagtcatgctgcccagaccctctggctcattccacagccccaggctccaagtgtcttccacccacatctccctgccccctccaccccccaggtggcagccagtcttccctccatatctcctggacaaggagagccaccccacatgtacacctggagtggccttcccgtctctcggaatccttccatgcaggcagcatcttgtctttgaggaaaggtccctcttttttaaaattctttttagaggccaggcgcagtggttcatgcctataatctcagcactttgggaggccaaggtgggcggatcacttgagctcaggagttctagaccagcctggccaacatagcaaaaccctgtctctaccaaaaataccaaaaattagccaggtatggtggcacacacatgtagtcccagctactcgggtggttgaggcgggaggatcgcttgagcctgggaggtagaatttgcagggagctgagattgtgccactgcactccagccttggtaacacagcaggaccccatgtcaaaaaaaattatttttagagacagcgtcttactctgttgcctaggctggtctccagctcctggccgcaggtgatcctcccaccttggcctcacaaaacactgggattacaggcatgaggcactttggcatgcaaagggccgctctgtcccctccccggtgttacctgcaagcaccttttcctggccttggtgtgaggcagccagtcctctgctccctgccctccattgaagcctttagctcagtggatgaggattgcccccccctcttttttttttttttttttgagatggagtctcgctctgttgcccaggctggagtgcagtggtgtgctcttggctcactgcaacctctgccaccacacccagctatttttttttttttaagacagagtctcactgtgtcacccaggctggagtgccgcggtaggatctcagctcactgcaacctccgcctcctgggatcaggcaattctcctgcctcagcctcctgagtagctgggattacaggcgcccaccaccatgcccagttactttttgtatttttagaagagacaggtttccaccatgttgtccaggctagtctcgaactcctgacctctagtgatccgcccacctcagcctcccaaagatgacaggtgtgagctactgctcctgacccacatccccttaccttgctcccctactgggaggccatgaattctggcctctttcatcttggatctttaagtaccaagtgcgctaagcacctgtgtgatggaggagggaggacggagggagcaaaggttagcgtctcacccctccagtctctgtatactgcggtcatcagacctgcatgctcaattctgttaactatgggggtggggggagaggaaaaatgcagtttccaaattacagcattttctattatgtggagctaacctacggattgcagcgtttctctgaattctccccaagggaaggaacgtcccagggatggaagtgcttggatgcggtgctgctggctgcggatgtgcgcaaggagatgggatggagagcctgagttggcattcgtataaatgacctggtaattggcatcccctggcagaaatagcacagaactgttcccagaggtcttgttggccagggaaggctgtggctttgtagccttgttgagaacaaagggaaaggcgacactgttttccacctccagcaccttcctgcgtaatttccaaattggggcattttcaat

SEQ ID NO: 38952 - DNA, 2300 bp, Homo sapien
tgtgactaccctacgtagctcacacaacaggaatcatgcagtatttgtcttctgtgactgcttccttaacttagcatcgtgtccccaaggttcgtccatgctgtaacatatgtcaaaatgtccttttttttttttttttttttgagacagggtctcactatgttgcccaagctggagtgcagtggcgtgatcacagctcactgcagccttgacctcccaggctcaagcaaccctcccacctcagcctcctgggtagctgggactacaggtacgtgtcaccatgtatggttaatttttttgtagaggtgggatttcaccatgttgcccatgctggtctcaaactcctgggctctggcaatctgcctgcctcggtctcccaaagtgctggaattacaggtgtgagccactgtgcccggcctgtccttcctttttaaggctgaatagtattctactatgtgtatgcaccacattttgtggatcaagtcatctctttttttttttttttttttttttttgagaaggagtcttgctctgtcacctgagctggagtgcagtggtgcgatcttggctcactgcaacctctgcctcctgggttcaagcgattctcctgcctcagcctcccgagtagctgggattacagatgtgcctcaccaagcccggcaagtttttgtaattttagtagaggcagggtttcgccatgttagccaggcaggtctcaaactcctgacctcaggtgatctgcccacctcagcctcccaaagtgctgggattacaggcgtgagccactgaacccggcccaggtatcttgatagatgcttggtttgcttccatctttgggctgtcatgaataatgtcgtgaatatgaacatgggtgtgcaaatatctcttccagaccctgcttttagttcctttggatatatacccagaagcaggattgcggatcatgggtaattctatgtttaattcatgaggcatgccatgctgtttccataggaccttgggcacttttaccatggacgttggggcagtcttcactggcttaccagcctccacaccttcatatctgcccgttcccttcccaggatctttctaaaattcacatttgacttcatcactcctttaaaacccttcaagagctctccagggcctttgggacaagtccagcctgctcagctgatgcaccggggagcatctgtgatcagacctccccccccccacaacctctccagcctcatctctctcacctgaggcatcaccaatccaccttcctaccccacgcagttttctgggttggaatgcccttgcaaccaaccacagtccttccatgccagcccaaaggcgctgagttctttttctttttttatttattttctttttgtgagacagagtctcgctctgtcgcccaggctgaagtgaggtggctcgatcatagctcactgcagcctccagctcctgggttgcagcgatccttgagttccttttcgttagttaactggaattcactgtctccttgcccattgcagtccacggccttcaggcaccgttggactggtattcagcaccctcgatcgaccctttccgtgtcatctccctgcaggcccgtgaagctcccagcgccagacccgagaggctacgtcgaggtttacaggcagatccccccagagtccccgaggtgacctgtaatcgaacccacccacgttccagctccttccccactcccaagcccgctccttaaagccctcatctcctcaccctgcatcacccctaccgtaagggtccctcacaggcttcgatcccggcccctatcatggccaagctggacctcagtttccccagatgcagagcgacgtttgtgggcgcggcccctctcccaccccttaccgctgggggcagctcccagggcgggtcactgccgcgctgccgctcgcagatcagacaggtccggatgcccttgcaaccgcattcccgaaggacttcgggggtctcggcggcagccgccgccatcgcgccgtccgcgtggccagtgcgcaggcgcggccgtgggggccgctgggagttgtagtccgcgccgggcgggggcacgaggcctgggttccgcttccttccggtcgttaacgcccacgggctcgcgcggcgccgcctcctgggctcagttaccgcggacgccagtgccgggctccaggagacgcagggcgacgccacacgccggggtggccgactgggtcagcgcgggctgcgcctcctcgccatgggccccctctcggcgcggctgctaatgcagcgcgggcgccccaagagcg

SEQ ID NO: 38953 - DNA, 2300 bp, Homo sapien
tatatacccagaagcaggattgcggatcatgggtaattctatgtttaattcatgaggcatgccatgctgtttccataggaccttgggcacttttaccatggacgttggggcagtcttcactggcttaccagcctccacaccttcatatctgcccgttcccttcccaggatctttctaaaattcacatttgacttcatcactcctttaaaacccttcaagagctctccagggcctttgggacaagtccagcctgctcagctgatgcaccggggagcatctgtgatcagacctccccccccccacaacctctccagcctcatctctctcacctgaggcatcaccaatccaccttcctaccccacgcagttttctgggttggaatgcccttgcaaccaaccacagtccttccatgccagcccaaaggcgctgagttctttttctttttttatttattttctttttgtgagacagagtctcgctctgtcgcccaggctgaagtgaggtggctcgatcatagctcactgcagcctccagctcctgggttgcagcgatccttgagttccttttcgttagttaactggaattcactgtctccttgcccattgcagtccacggccttcaggcaccgttggactggtattcagcaccctcgatcgaccctttccgtgtcatctccctgcaggcccgtgaagctcccagcgccagacccgagaggctacgtcgaggtttacaggcagatccccccagagtccccgaggtgacctgtaatcgaacccacccacgttccagctccttccccactcccaagcccgctccttaaagccctcatctcctcaccctgcatcacccctaccgtaagggtccctcacaggcttcgatcccggcccctatcatggccaagctggacctcagtttccccagatgcagagcgacgtttgtgggcgcggcccctctcccaccccttaccgctgggggcagctcccagggcgggtcactgccgcgctgccgctcgcagatcagacaggtccggatgcccttgcaaccgcattcccgaaggacttcgggggtctcggcggcagccgccgccatcgcgccgtccgcgtggccagtgcgcaggcgcggccgtgggggccgctgggagttgtagtccgcgccgggcgggggcacgaggcctgggttccgcttccttccggtcgttaacgcccacgggctcgcgcggcgccgcctcctgggctcagttaccgcggacgccagtgccgggctccaggagacgcagggcgacgccacacgccggggtggccgactgggtcagcgcgggctgcgcctcctcgccatgggccccctctcggcgcggctgctaatgcagcgcgggcgccccaagagcgaccggctggggaagatccggagtctggagtaagagccgggcagcgggtgaggctgtgtcctcggggccgggcggtcggggagaagagcggggaccctccccaacggcccgcttgtccccgttatcgccctctgggttcggcagagtggtccaaatgtcttcttgttgggagatcgtggccccacccgctcgccgggagccccgaggggcctcatcccctgaagggagcccggacagttaggggcacagcctgccgctatcgttagagggcctgggaagcacagacgagcccccgaaggatcaggaagagcatcctagagggggctaggatgcccccgagtcctaaagtagttgcagcttttttttttttttttttttttttttttttttttttgttaagtggtgtggagtcgggagtagtggcgcgcgcttctagtcccagctactcgagaggctgaggcgggaggatccctcagcccaggagttggaggcagctgtgagctatgatcgcgcctaggcgactgagtgacaccccgtctctaaaaataaagtaacggggggatgggcggggcggctacacttgtacgagaaatgtcaggtgaaaaagccttctgaggtacccggggcagattggtgtagggtgcaaagcctgcccgccccctaagccttctgcccccaactccagcctgtcaggattggagctgctttccgagcacctggaccccaaactcctgtgccgcctgacgcagctgcaggagcttgacctgtctaacaaccacctggagacgctgccggacaacctgggcctgtcccacctgcgtgtcctccgctgcgccaacaaccagctgggggatgttactgccttgtgccagttccccaagctcgaggaactcagcctggagggcaaccccttcct

SEQ ID NO: 38954 - DNA, 2300 bp, Homo sapien
acaaaaaattttaaaatgatccagacgtggtggcatgcgcctaaagccccagctattcagaaggctaaggcgggaagatcgcttgagcccaggagttggaggctgcagtgagatacgatcacaccactgcacttcaacatgggcagcagagcgagaccctgtctctaaaaaaaaaaaaaaaaaaaaaaaaaaaaaaaaaaaaaggtaaaaaagaaacaccccagaaaaagctacttagaagagtcaggccgggtgtggtgactcatacctgtaatcccgacactttgggaggccaaggcgggcagatcacctaaggccaggagtttgaggccagcctggccaacatggtgaaaccctgtctctactaaaaatacaaaaaaaattagctgggcatggtggcaggtgcttgtaatcctagttactcgggaggctgaggcaggaaaatcacttgaacctgggaggcagaggttgcaatgagccaagatcgcatcactgcactccagcctgggcgacggagtgagactccatctcaaaaaataaataaataaataaagtagcacatcaggctaggggctgttggggcaaagagcctctatcagtcaccctcctcaacatcctcctgatgtccaattctatcattctcccaatgcccccacagctcctaagcacacaataatcctctcatccccttaccctgctggtcagctcccgattcaggttctccacctgagagtaagttgaggacgcatccttgccattgaccttacggagcgtgggcaggagaaaggagactttcaggttgtcattgacctggggaagagagggtgaagagcagtggctcaggagatgctgagcctgagcccaacagagtcctggccccaggtatgaagctggtgggaggctcccacttaccgtcaggaaggggttgccctccaggctgagttcctcgagcttggggaactggcacaaggcagtaacatcccccagctggttgttggcgcagcggaggacacgcaggtgggacaggcccaggttgtccggcagcgtctccaggtggttgttagacaggtcaagctcctgcagctgcgtcaggcggcacaggagtttggggtccaggtgctcggaaagcagctccaatcctgacaggctggagttgggggcagaaggcttagggggcgggcaggctttgcaccctacaccaatctgccccgggtacctcagaaggctttttcacctgacatttctcgtacaagtgtagccgccccgcccatccccccgttactttatttttagagacggggtgtcactcagtcgcctaggcgcgatcatagctcacagctgcctccaactcctgggctgagggatcctcccgcctcagcctctcgagtagctgggactagaagcgcgcgccactactcccgactccacaccacttaacaaaaaaaaaaaaaaaaaaaaaaaaaaaaaaaaaaaagctgcaactactttaggactcgggggcatcctagccccctctaggatgctcttcctgatccttcgggggctcgtctgtgcttcccaggccctctaacgatagcggcaggctgtgcccctaactgtccgggctcccttcaggggatgaggcccctcggggctcccggcgagcgggtggggccacgatctcccaacaagaagacatttggaccactctgccgaacccagagggcgataacggggacaagcgggccgttggggagggtccccgctcttctccccgaccgcccggccccgaggacacagcctcacccgctgcccggctcttactccagactccggatcttccccagccggtcgctcttggggcgcccgcgctgcattagcagccgcgccgagagggggcccatggcgaggaggcgcagcccgcgctgacccagtcggccaccccggcgtgtggcgtcgccctgcgtctcctggagcccggcactggcgtccgcggtaactgagcccaggaggcggcgccgcgcgagcccgtgggcgttaacgaccggaaggaagcggaacccaggcctcgtgcccccgcccggcgcggactacaactcccagcggcccccacggccgcgcctgcgcactggccacgcggacggcgcgatggcggcggctgccgccgagacccccgaagtccttcgggaatgcggttgcaagggcatccggacctgtctgatctgcgagcggcagcgcggcagtgacccgccctgggagctgcccccagcggtaaggggtgggagaggggccgcgcccacaaacgtcgctctgcatctggg

SEQ ID NO: 38955 - DNA, 2300 bp, Homo sapien
aaacaaaatgttaagaaatgatctttttatgaggcaattggaaatttgaacactaatcaactataggatgattggaattattaattttgtaaaggtgtgataagatactgcacttggctgggcacagtggcacatgcctgtaatcccagctacttggcaggctgaggtgggagaatcgcttgagctcaggagttcgagaccagcctgggcaacgtggcgaaatccccgtctttacaaaaacaaacaaacaaacaaaaaagatattgcagttgtgttgtaagcgtccttatctttcagagctacatagtggaatgtttatggaatatttaggataaatgatataggcatttgggatttgctgcaaaatgacccagaggcaggggtcagggggagaggtagagatgagacaagaggtagaggggagaggtagaggtagccacgagctgataattacagacaagagatgcggagtatgtgggggctcattatcctgcatagtctatctttgtatatctttgaacttttcaagaataaaaaagcttaaaaagtatacatggcctggtcctaccagagactcacccaatgccagcctccagccagggagagccaagtttgcattttcacacgcatctcacactcctctgcactctcaacttggagagctccaaacagggaaaccccaagccttgctggcttctgccaaccccctgagcagaagcatgggtccccctgatcaccacctcaccaccctcatcctgatctcactgtacactccctttcctggtctgctaagtagcgggtgtttttccttgacactaacgctacagctagaccacggtgggcttggcaacaggtgtcttcccagatgctggcgttaccgctagaccaaggagccctctggtggccctgtccgggcataacagaaagctcgcactcttgtcttctggtcactcctcattgtcccctcagctcctatctctgtatggcctggtgtttcctaggttatgattgtagagcgaggattattataatattggaataaagaataattactacaaactaatgattaatgattcatatataatcatatctaagatctatatctagtataactattcttattttatatattttattatactggaacagctcgtgccctcggtctcttgcctcggcacctgggtggcttgctgcccacatccaccaagtgcactttgggaggctgaggctggaggactgctggaggccaggagttcaataccagcctgggcaacatagggagacccccccccccaccatctccaaaaataaaaaaaaaaaatagctaggtgtgatggcacatggctgcagtcctaactatcgggaggctgaggcaggaggatctctggagcccaggagttggaggctgcatgatggcgccactgtacttcagcctgggcgacagagggagacgctgtctctaaataataataataatatataaaaagatatacgtaaccctacgggctcccctctcactgctgtatacacctgcctccttctgcatccctcacccaattgtccctcccggctaacaagccagctgcaccccccaggcagaggtcctgcagcagtcggtataggcagcctgggcagggggcttgtcatagatctgcctctggccacgagatcttctgctccccctacggctgctagccgcagctgtccactaccccttagctttattctctctattcaggggcctcctgctgcgcactccaagggggtgcacgtttccaaagaaagatcaagggacatggggaaaggagaaaggtacagcttgaggttcccgctcagccaggactaggaggcctctgtaggggcagaacagccctgccggcgctctgagcatgcgccgaaaagcgcccacggggaaagccatgccggggggcggggtgcggggtggcgggggcgggggggggggcggtgcgctcgccactgacgcatgcgcagaggcactggtctctctcggggttttctcgcgcctgcgcaagatcctccagcccaacagggggcgatgagccgatccttgagcgggtttgccccgccggagtaatccggaagaggcctcttattagggctctggtggcggcggcggcggacccttggggtctggacgcaacggcggcgggagcatgaacgcccctccagccttcgagtcgttcttgctcttcgagggcgagaagaagtaagtgacgccggctgcggcgggccgaggtgcgcgggcctgcggctgtcgcattctggggtgtctcctgccc

SEQ ID NO: 38956 - DNA, 2300 bp, Homo sapien
catctcaaaaaaaaaaaaaaaaaaaatgggaccagaattaaataatgcccatgtagtcaaatctttcaaccctggcaaggaagatgtataataatcatctgagtgctttgggaggctggggcaggaggattgcctgaggccaggagtttgagaacagcctgggcagcatagcaagaccccatctccgcaaaaaaaaaagttaaagaaaattagctgggcttggtggcacgtgcctgtagtcccagctactcgggaggctgaggtaggaagattgcttgagcccaggagtttgaggctgcggtcagctatgatcgcaccactgcactacagcctgggtgacagagcaagaccctgtctcaaaaaataattatcatcatctgaggggtctttggtcggaaggggcgggcccctcatctggtgggacccctgagctggttgagaacagggtgggtgatgagctccttcacctactcctagcccgctctcacctgcccagggctaggctgggtactcctggaagatcatccccatagcctgcatgactgggggcaggtgtacagcaagcagtcaccaggtccatggaggaagtatgtcctcagcccttcctgggagaagagagcttgcaggagaggtgacccatgactcagagagggctgtacaaggtgatctttgagatcccttcccacgccaagattccgtgcttctatattcctgcctcttccaggaagcctcccctgtttgccctagcctcctactcatctagcagcccaggtgatatactatctttaataatatcatttgcctaaatagtactacctgccaggccctgggtcaggacccttagggagatcatctcatttaatcctcaacaacctggtaaggtcggatcaacttcctccatattcatttttttttttttttgagacggagtcttgctctgttgcccaggttggagtgcagtggcacgatctcggctcactgcaacctccgcctcccaggttcaagcgattcccgtgcctcagcctcccgagtagctgggactacaggcacccaccaccacacccggctgattttttgtatttttagtagagacggggtttctccacgttggccaggctggtctcaaactcctaacctcaagtgatccacccgccttggcctcccaaagtcctgggattacaggcgtgagccaccgtgcccggccctcctaggttctgacaagcagtacagatgccacacacctggctttcttctctgaccccgggggtacctcaagtgggctccaaggaaggggacaggtgccccacttgccggcctctcagagccccacttgccggcctccctccttacccaccttggagctgggcgtcttcgcgaagctgagggcctcggtagtgagggagaagtagagcttcttgaaggaggaggacatgagggggcccttgcccttggtcctgtggatgaagagtggcccctccttcacaggtggcgcctgcaaactcagcgtccgctgcaggtccagctctgccaggccagggagggaggggaatagagagcccagtgaatgagggcgggactggggggagcggagcagtgggaggggccatggggctcaagggctgagcaaatctgaacagcaggcagtggacgtagtcatggggctcaagggcggagcaaacatcaacagctggtggtgagcggggtgacaggtggactgaggaaggcagggccatgggcttggaggcgggacacgcgtcagtagcaggtggcggcggggctatggagctcaaggatggagcaaatgtcaacaggcgcagatgatgggggggtgaggccatgggtctagggctggggcaaacgtcaacggcaggcagtgggcagggtcacaggaagcacaaacagtggtgcgtgggtctatggcctaggggcctggcaaatgccaacagcaggcggtgggtggggccacgagaggaacaaacagcgatgggtggggccgtggggctcaagggcggagcaaacgtcagcagtaggctgtgggcgggtctgtgcagggcggcgctcaccgtccttctcctcgatgtccacgagcttggtgatgaagtccttcagctgcgccacgccctggtgcacggtgggctgcagcggctccatccaagcctccttggccctggaagccggcgtgtccatgttgcccacgttctggactgcctggaggtgacagcaggaaggaccaggttctgctaggttaggggcctagccactgcaccccctcccaccccccctccccaagtctttgctac

SEQ ID NO: 38957 - DNA, 2300 bp, Homo sapien
ccaggggcaacctgggctccttgcagctggaggtgcggctgcgggacgagacggtgctgccctccagctactaccagccactggtgcacctgctgtgccacgaggtcaagctgggcatgcaggtgagggggcctgggcagggtgggagggtccagtggcagtaggcctgtgcgcctgtccttctaaacccattctgcagagcagaaacctgaggtctggggatgtgaggagctggccagtgtccagggccccgtccccagccaccccttgggaaactgtcctctttccctgggatgctctgaggtcctcagagggaaaggttcgggatcccccgtgcctctccctgcagggcccagggcagctgatcccactcatcgaggagacaaccagcaccgagtgtcgccaggacgtggccacgaacctgctcaagctcttcctggggcaggggctggccaaggacttcctggacctgctcttccagctggagctgagtcgcaccagtgaggcctgggaaggagctgggcccagaacactgggaggtgtttgggggtgggtgggctcctcctgtaggaggcagatggggtcagagaggagggaggcaaggaacagagccaagggcagaggtgggacagtgggctgggaggtggcgaggaggccctttattgaggggccagcttagatcccccagccccaaggtcctctgtcctccccctcccccaaaagctttgtgccagccccctacccactgggacctctgtttgtaggtgagaccaacaccctgttccggagcaactctctggcctcaaagtccgtggagtcttttctgaaggtgaggttgcatgctatattgtcctcatcttgcaaacgacaacactgagcttcagagagagcgacagagggggctgggacttcgactccagtgttctatctccatattcagagccctttaaggttaagaatgtggctgggcatagtggctcatgcctgtaattgcagcactttgggaggctgaggcgggcggatcacttaaggtcaggagttcgagaccagcctggccaacatggcgaaaccccatctctactaaaaatacaaaaattagcctggcatggtggtgggcacctgtaatcccagctactggggaggctgaggcaggagactcacttgaaccaggagccagaggttgtagtgagctcacgccactgcactctagcctgggccccgtgctagactccgtgccccgcaccccccccccccccaaagagaatgtgtgtgtgattaaaatttaagttagagacagtctcactatgttgcccaggctggtctcaaactcctggcctcaagtgatcctcctgccttggcctcccaaagtgctaggattacaagggctaagaattctagtcattcattcactcactcattcattcattcatgaataaacagtttgccctgcatgtgtacctggccccctcctgggcggatacggcaggcaaacggtgcaagggcggctgccgggagaaggtgggcagctggagtgggactgggggagacaggatcaatgtgacctgcggtggtccccaggtggccgggatgcagtacctgcacggcgtcctgggccccatcatcaacaaggtgtttgaggagaagaagtacgtggagctggaccccagcaaagtggaagttaaggatgtagggtgaggccgggggtaactccgggggttgcggggtgcagcggcagcgggttgggatcaggccctgtcagcatgtgtgtttgtgcttctgcccacccgtgtattgtcccctgtgtccgtgtcctggctgctgtgagagccactgttcctgtcgtggccctggcgctgaccgcgacctcctctgccaacccgccccgttccacgcaggtgctccgggctgcaccgcccgcagaccgaggccgaggtgctggagcagagcgcgcagacgctgcgcgcccacctgggggccctgctgagcgcgctcagccgctcggttcgcgcgtgccccgccgtggtgcgcgccaccttccgccagctcttccggcgcgtgcgcgagcgcttccccggcgcccagcacgaggtgcgccctccacccgctgggctaggctgggccgggttggactgggctggggcgaggggtgaagagcggtggggaaccagggagcgctggggaggaccagggaggctgtgtcccagcgagggtcagggacggagcctaaggggagggggctgccaggagccctggtctgggggactccagcccgcgctcttccgcacccctccagaatgtac

SEQ ID NO: 38958 - DNA, 2300 bp, Homo sapien
ttgtttgttgagactgagtttcactcttgtcacccaggctagagtgcaatggtgcgaactgggctcactgcgacctctgcctcccgggttctcttgcctcccgggttctcaagcaattctcttgcctcagcctccagagtagctgggattacaggtgcctgccaccacgcccggctaatttttgtatttttagtagatatggggtttcgccatgttggccaggctggtctcgaactcctgaccgcaggtgatccacccacctcggcctcccaaagtgctgggattacaggtgtgagccaccacgcctggcctcgtttttgtttttgtttttggagacagagttttgctctgtcgcccacgctggagtgcagtggtgcgatcatacctcactgcagcctcccctcctaggctcaagcaatcttcctgcctcggctttctgagtagctcgaactacagacacacactaccatgcctggctaatatttttattttttgtagcaaaggggggggggtctcattatgttgccctggctgggcttgaactcctggcctcaagtgatcctccgatctcaagcctcccaaagtgctgggattataggcgtgagccgctgtgcccagcctcaaacactttttctttcaacgacattgacctatagtgaatatcaaaagcatgcactgaaactcaagagctgcctcctctcctgtgccaggatgcactgtaacttttgtgagccctaggcatgtttgacttatatgggttaagatattcaaatacggctaggcacggtggctcacgcctgtaatcctaacactctgggagaccgaagtgggcagctcacctgaggtcaggtgtttgaggccagcctggccaacctggtgaaactccatctctactaaaaatatagaaattacccaggcgtggtggcaggtccctgaagctctggctactcgggaggctgaggcaggagaatgccttgagtcagggaggcagaggttgcagtgagctgagattgcgctactgcactccagcctgggtgatagagcgagactccaccccaaaaaaaagaaaaaaaaaaagatattcaaatgtgtattttacaactgctttggcataaagactgactgataccagtcaggtcagattcattattacatattcattactattatactcctgtttgactaggcatggtgggctcacatctgtggtcccagccctttgggaggccaaggcaggaggataacttgaggccaggagttctagaccagcctgggcaacataatgagacccccccatttctactaaaaataaaaaaaattagccagtcgtggtggtatgcatctgtagtcccagctacatgggaggctgaggtggtaggattgcttgaacccaggagattgaggctgcagtgagctatgattgcaccactgcacttcagccaacagagcaagaccctgtttcaaatgcatacatacatacatacatacatacatacatacatacatacacacacacacacacaaaccaaccaatacaaaaaatacatattttttttcttctgattctaaaaaacataaaaacagccaggcacgatggctcatgcctgtattcccagcactttgggaggccgaggtgggcagattacctgaggtcaggagttcaagaccagcctggccaacatggtgaaaccccgtatctaccgaaaatacaaaaattagctgggcgtggtggcgcgtgtctgcaatcccagctacttgggaggctgagacagaagaattgcttgaaaccgggaggtggaggttgcagtgtcccccacccgctcctccaggggcgcccccctcgagccaccgcgccggctgcccggcgagtgtcagcgcctcctcacaggccccgcccctcacgccccagacggccaatgagagctgcggccccggccggcccctccccgccctggggaaccccggtcgcggattggccggcccgggcgcagtgtcccccgcacgtggggcgggggcggggtgagtggagtggcagcgaagccccgcccccgccgccccgcccccgcccccgcctcctccccggcccgccccccctgcggcgcccagtccagcgcccgccgcccgccaccccggaccccggtgtctggcttcccccgagccggcaccccgcgatggccaagcgcagctcgctgtacatccgcatcgtggaggggaagaaccttcccgccaaggacatgtgagcgcggccgggggtgggagccccaactttccggggaggggcactgccccccaggacgcct

SEQ ID NO: 38959 - DNA, 2300 bp, Homo sapien
ctgggcaacagagtgagacccgtctcaaaaaataataataatataataaataaaagagaccccagagagcttccttgacccttccaccatatgaggacacagctagaaggcactctctacgaaccaaaaacagacaccaactcttcctagtttttgtttttgttcttgttcttttttttttaagatggagtctcattttgtcacccaggctggagtgcagtggtgtgatctcggctcactacggcctccccatcctgggtccaagcgattcttgtgcctcaacctcccgagtagctggaattacaggcgcgtgccaccacgactggctaattttgtatctttagtagagacggggtttttccacattggtcaggctggtctcaaacttctgacctcagatgatccgcccaccttggccacccaaagtgctgggattacaggtgtgaaccactgcgcccggccagaagtttttcttgtgagttgaggtgaacatctgaatcccctcggggaactgaggtatgtccctttcagggaatggcccctcttcatccaaaaatggggcccacaggtgataatctgttgggtttcccagaatgaagacatctggcataattagagcgtgaaggtcaggctgacgggggctagtaccccgatccaggggagaggtggtcacaggtctcgctccacctgccctgagccccatctcatctttttttttttttttttttttttttgagggggagtttcactcttgttgcccaggctggaatgcagtgatgcgatctcggctcattgcaacctctgcctcctgggttcaagtggttctcctgcctcagcctcctgcgtagctggagttacaagaacaagccaccacgtccagctaattttgtatttttagtagagatggggtttcgccgtgttggccaggctggtctcgaactcctgacctcaggtgatccacccacctcggcctctcaaaatgctgggattacaggcgtgagccaccatgcctggacttccatctggtaattttctgtctcgaggaggaactaccctgccctgacagaggctggggatgaaggaggaagagacagccggtcccctggataaagaggtgagggggtgtgaagtctgggagcccccctcccagggccaggctacagggggacagcagggctataccaggagtgccacagagcttgcatttgggtgtgatctaatccccagtcctgccctgacctcctgggtgctcttagccaagccctcttccctgtgtgtgctagaaagtgagggtcactcccttccacacaagggagtgaattgagggtggggatctgagctctctgagcagcaaagctggacacaggccaaattgccaatcctgagtccctctgtcatgtggacctgggaagcttgtcctcatcctccatccttccccagggtggggcctgagaatctgagaaccttgagcctgggaggtcaaggccacagtgagctatgatcgcaccactgcactccagcctgggcgaaagagtgagaccctgcccccccaaaaaaaaaataataataaataaaagagactccagggagtttgcttgaccggcactccctatgaaccaaaaacagacaccaactcctcctaggttggttttttttttttttttttttttttttttttttttttttttttttgaggcagggtcccactctgtcatccaggctggagtgcagtggtgccatcttggctcactgcagcctcaacctcccaggctcgagtgatcctcccacctcaggtcctaaaggaagagtcgctacattggggactgtttggacaaggagatccacggggtagacttagcgggattgtccctggggcagcctggatcctgaggctgccccgcctccttcctcagcccctccctggtcaggcgctcctggtgggtggggggggtagtccaggcttgtcttgcaactgtatgttctcttcagacccctccctggcgatgccagattcactgggctggcagattctgcccccaaacctgtccaaccagttgtttgagaggagggggtagctgggaggggcagcaggagatgccaggaacagcttcccctagcacagcacagactacagacaggggagcctctggggctgcagacactgcagacggacggacagacagatggacaacagctggaggcttggcccggccatagggctctctgcgggacagtcccagctgctagtgtcgctgttgctgctactgacccgtgtccagcctgggacagacgtgggtgag

SEQ ID NO: 38960 - DNA, 2300 bp, Homo sapien
cggctcaagcctgtgatcccagtactttttgagaggtggagacaggaggatcatgtgagcccaacagttcgagaacaacctgggcaacatagtgagaccctgtttctacaaacatttcaaaaattagttgagcatggtggcatgtgcctagtcccagctcctcaggaggctgaggaaagaagattgcttgagcccaggaattagaggctgcaatgagctatgatcatgccactgcactccatcctggggagcagagctagactctgtctcacaaaaaaaaaatttgtgggtgccaagactcaagaccatgggagctggtcgggcacagtggctgacgtctataatctcagcactttgggaggccaaggcgggtggatcgcctgaggtcaggtgttcaggaccaacctggccaacatggcaaaaccccgtttctactaaaaacacaaaaattagccaggcgtggtggttcatgtctgtaatcccagctgcttggaggctgaggcaggagaatcgcttgaacccaggaggcatcggctgcagtgagtcaagatcgagacactgccctccagcctgggcaacagagcaagactctgtctcacacacacacacacacacacacacacacaaaaaaaaaaaaaaaaaaaaagactgtaggagcatctggtgggaggtggtggagggagaactgtgggtttggaagctgcgccctccccccagccatgcgttggaacaggaacagttacatggagaacaaccttaccttgtccgacaccctcagatctttgtcccaggccaagaatcttttaatgacaggatcctctgtgattagagagcagatgtcagtgtgagaagcaggacagggtttccgtgggagcagcagggcagggaggagaagtgtgcctcccggggggaagtctcaggattgtggccgcgggtgaggtggatgggagaggggagaatgactttcactgggcaagggagagaggctcctgctctgagactcccctgagaagaggccgaaggaggccctgggtgtgagaatctacaggatgtagagctgggaatcagccaggaccccctccagcagacacggagggaccactgcagagtcataaaggaattcccatcatttcctcatgagacagtcacatcagggtgtgaccatggccttggtatcccccactatggatggagacacttaggtttagaaaagtcagtaagagacattaagtttcagagggcacagctgaaaccactttctttgtttattgattttgtttttctttatttgatttttatttttatttatttattaatttattttgagacagagtcttgctctgtgggccaggctggaatgcagtggcctgatcttggctcactgcaacctctgcctcccgggtttaagcgattctcctgtctcagcctcccgagtagctgggattacatgcatgagctactgtgcccagccttggtttttcttttgagacagggttttgctctgtcacccaggctggagtgcagtggtgtagtcatagctcactgcagcctcaaagtcctgagttcaagcaatcctcttgcctcagcctcccaacgtgctgggatctcaggcgggagccactgcgcctggcccgaaaccaagctttcttatcccaagcgctgacctttatcaagttgacctaatcctttatcatctcctaagtgtccctcatgagtgatcacttcacattcctcccacatggagagctcacccactggggcctatttttcccattggaaaagtgtggttattggaagtttcctgtttttggaaagaacaggattggaggtgctctctggggtgtcctcctaccaagcagcctgttgaaggcctcgtggtgctcagggagcacgagcgacactcgccgtcgcttcagcttcatcttgaggccacacagcatctccgccacccagatctcctcaggctcaggggcgagcaccttccgtggctcctcctccaacgactcctcagattcgtcccaccactccatcttccttttccagcaaaaggacctatgcggggggctgggatctaccccaggggctgagtaaagaaaccaggccacggtgtaatgcttctgcagttgatcacactagagcccgacccaaaaccccaaaccactctccatcctccccagcctcgcagactgctggcttctccaagccatctttccttctgtctgtctcctctgctgagctgcatgtgccgctccttctcctccccattctcccgtttttctgtcctcagaacacttcctcat

SEQ ID NO: 38961 - DNA, 2300 bp, Homo sapien
atctcccctgggtccggtgttctggaagcgagagagacaatgtcacacttcaaggaggcagctctctagacaggaaagttattcacgtcccatgtcaattgagaaatgcaattttatctgctgcctttcattctataccctgcttctgaaccatcgtgttcaactgtgaaactcacactttggtgaccacgactccaaaactcacttaatacacccaaggtcagccccagtgatctgcttcatagcaaggactttgggtgggtctgcccagggagtagggcaccctcagagaatgtggctttggactttatcacagctggggccttttgtgtcacttaagatctaaacttgtaaccatgctagatgtgtttctaatgtgacaacatcacgaaccacgagtccagaagcctaatccttaatcctacctcctcatgatgaagtctcatgctctgtgctcaacgtggttagctgcacaagatgtaaaccaaagcttcactgaaccctcgacccaaatcagtaactcaagtgcgtcaatcataatgaacctccccaaactcagtttttatgattatttttgaggcagggtctcactctgtcgcccagactggagtgcagtggcaggatcagggctccgtgcggccccgaccttccaggctccagcgatcctcccgcctcagcctcctgagtagttgggagtagagatgcgtcccacatcgcctggctaatttttgtatttttgtggagaggggatctcgccacgttgcccaggcttgaagccagatcaagcaattgggttcttcggatttccgaaatagaccccaatattctgcctttaccccagaggatgcagatgtaccttctctcaggccgatgacctcaggcctccccggtccctggagctctaggaaaggtgagcgcgatctcgcgcccacacccagtgctctgggtcataagcctggatctggaaaaacaaacgccctttgagaagacggggactcgccaggatatccctctctcccctcatccagcctccagcccacccaattcctccccacctcctccacctccccaggccccactcacctcctccaactcctctggggaaacccaagccctgcagctcatggaacagaagaagtggaaccgtcgtttctggaacaggactatctgagagcggttcttcctggccctcgagttcatggaacggtataactggaaccgacgcttacggagcaagggtatgcgagagcggttcttcctggccctcgggttcgtggaacggtataactggaaccgacgcttacggagcaagggtatgcgagagcggttcttcctggccctcgggttcatggaatggcctaactggaaccaacgcttacggagcaagggtatgcgagagcggttcttcctatacaggaagtggaagatgttttgtttggagtcctcgtcgtcctcctccatgtcattggccaggtagctgaggacagaaatcaggttgctgctcaggggcaccaccaggagaggcctccggctgaggtcagcttcccagagaggaaggtaagggaccgtccctagctcaggactggcacccaccctgcagagagccatgccttcctcaggagggctctgctggacagagacctgatcaagggcgtctcccactccttcaggatggagacaaaaacccaactggtggccgagagtggtggcttacgcctggaatcccagcacactgggaggccaaagcaggaggatcacttgaggccaggagtttgagacgggcctgggcaacatagcaagaccctcgtctctattaaaaatgtaagaaatatgccagacgcggtggctcatgcctgtaatcccagcactttagaaggctgaagcaggtggatcgcttgagaccaggagttggagaccagcctggtcaacacggagaaaccccatctctactaaaaatacaaaaatgagcctggtgcggtggcacacccgttaggcctagctactcaggaggctgaagcacaagaattgtgtgaacccaggaggcggaggttgcagtgagttgagattgggccactccattccagcctgagaggcagaacaagactctgtctcaataaacaaacaaacaaacaaactgtccaggtgtggtggcacagccctgtagtcggagctaataaagaagctgaggtgggaggatcgcttgagcccaggatatggaggctgcggtgagctatgatctcaccactgcactccagcttgggggacagggcaagtctgtctcaaaaaaataaaagaaattg

SEQ ID NO: 38962 - DNA, 2300 bp, Homo sapien
gccaccgcgcccagcctatgtgatgcaattctgatgtcaactccctgatgttacctcaaatgccacaggttaaggccaccagtccccactaggctgccctcgctttagacacacctgcaggcttgggtgtcctcagaccacatgtacttctcaccaactggctgcaaatttggaggttcccaccatgccctcaagttcgataactcactaaaacaattcacagaatgcagaaaagcatgatactttctttctcttttttttttttttttttttttgagacggagtcttgctctgtcacccaggctggagtacagtgaccaccatgcttggctaatttttgtatttgtattagagacggggtttcgccatgttggccaggctggtcttgaactcctgacctcaggtgatccacccgccttggcatcccaaaatgctgggattataggcatagccaccatgcccggttgacttctagagtttcaataacagagatgtgattcaagaagggagacatgttttgtagatggcaggagcttcatgaaaagaagccaatgaagggcaggacgtgtagctgtctacctacaggaaaccagccaggagcctccccacagggacttcagcacagatggccgggaaaatctgcattcacctgagctctggacctaagagaggacaaggccttgaccatttctacagactcacaagatgcaatctctgtggtccatgcccgtggtgtgatctgggaagcagggggccttctaaatgccaacaacaaggaaatcaaatgtgcaacaaacagaaataacggcattgacgtgggccatggaaaggcctaaacagatgactgcagttcactgccaaggtcatcaaaggggtgactctgaaataataaatttcagacgccacggcccaaatagctgcatgaggtggggaagtcctccacatgcctctgcttccttcggtacctgtttatgaaatcagccgaggtacttccctggggaatttcctttctttctttctttctttcgagacggagtcttgctctgtcgcccaggctagagtgcagtggtgcaatctcggctcactgcaacctctccctcctgggttttagcaattctcctgcatcagacttctgagtagctgagattacaggtgcatgccaccatgcccagctaatatttgtagttttagtagagacagggtttcaccatctaggccaggctggtcttgaactcctgacctcgtgatccacccgtcttggcctcccaaagtgctgggattacaggtgtgagccatcaagcccggactttttttttattttttgagacgacgtttcactcttgttgcccacgctggagtgcaatggcacgatctcagctcactgccacctcctcctcccaggttcaagcgattatcctgcctcagcctctcgagtagctgggattacaggcacccaacaccaaacccagctaacttattgtatttttagtagagatgggatgtcaccatgttggccaggatggtcttgaacccctgacctctaacgatccacctgaattggtttcccaaaatgttgggattacaggcacaagccactgcgcccagcccctcccatacctcttttggccaaggcagcacaattcagaagaatcttgccagggaagactggtaaatggacgtcaacgtgatgcctatggctcctggtggatttagatacctcctggtgcttattgatatctttaccagttgcacaggggcttttccatgccagactgaaaacgcagaagatcaatgatcaaccttcaactatttactagcagaacactgaggggactgtgcggtcaccaatacctcctattgcacttggataaacacctcccaggaaatagagatgaatagaaaggacatagtcaaacaagcagaatggctgcattccttcaaccagaagggtccattagtctgttttcacactgctataaagaactatgagaaactgggtaatttatgaagaaaagaggtttaattgactcacagttctgcaggctgtacaggaagcgtggctggggaggcctcaggaaactgacaatcacggcagaaggcgaaggggaagcaggcacgtctggccatgttggagcaggagagacagagagagtgaagtgggagggctgcacgcttttaaacaaccagatcccacaagcgctcactcaatatcacgagaacagcaagggggaagtcggcccccatgagccaatcacctcccaccaggtccctcccacaacactgggaattacaatttgaca

SEQ ID NO: 38963 - DNA, 2300 bp, Homo sapien
ggaaagtcagattctgtgtggggctgttgcagaatgagatttcctcctgccagggtgcaagaactcaagtaggaaatgggccttcccagaaggggtagatgctccagatttcctcagcactgtagctgctgctcagccttggagaaacagctgccaaactgttagggccctggtagctcctctgagaccccagtccctgttgcttcaaacagcttaaggagggcctttatgctaaactgtagtctgcaaagcaaccaaaccaaaaagggtaagatacacttatccacctgtagggtccagccccacagggtcggtgggtttctctccatgtgcagagacgagagagcgcagaaataaagacacaagacaaagagataaaagacagctgggctggggggaccactaccaccaagacgcagagaccagtagtggccctgaatgccaggctgcgctgatatttattggatacaagacaaaggggcaggataaggagagtgagccatctccaatgataggtaaggccacatgggtcacgtgtccactggacaggggcccttccctgcctggcaaccgaggcagagagagagaggagaaagagagagagacagcttacaccattatttctgcttatcagagacttttagtactttcactaatttgctactgctatctagaaggcagagccaggtgtacaggatggaacatgaaggtggactaggagcgtgaccactgaagcacagcatcacagggagacggttatgcctccgggtaactgtgggcgggcctgtggaggagtagagtcttctctaaactcccccggggaaagggagactccctttcccggtctgctaagtagcgggtgtttttccttgacactaacgctaccgctagaccacggtgggcttggcaacaggtgtcttcccagatgctggcgttaccgctagaccaaggagccctctggtggccctgtccgggcataacagaaagcttgcactcttgtcttctggtcactcctcactgtcccctcagctcccatctctgtatggcctggtttttcctaggttatgattgtagagcgaggattattataatattggaataaagaataattactacaaactaatgattaatgattcatatataatcatatctaagatctatatctagtataactattcttattttatatattttattatactggaacagctcgtgccctcggtctcttgcctcggcacctgggtggcttgctgcccacatccaccaagtgcactttgggaggctgaggctggaggactgctggaggccaggagttcaataccagcctgggcaacatagggagaccccccccccccccaccatctccaaaaataaaaaaaaaaatagctaggtgtgatggcacatgcctgcagtcctaactatcgggaggctgaggcaggaggatctctggagcccaggagttggaggctgcatgatggcgccactgtacttcagcctgggcgacagagggagacgctgtctctaaataataataataatatataaaaagatatacgtaaccctacgggctcccctctcactgctgtatacacctgcctccttctgcatccctcacccaattgtccctcccggctaacaagccagctgcaccccccaggcagaggtcctgcagcagtcggtataggcagcctgggcagggggcttgtcatagatctgcctctggccacgagatcttctgctccccctacggctgctagccgcagctgtccactaccccttagctttattctctctattcaggggcctcctgctgcgcactccaagggggtgcacgtttccaaagagagatcaagggacatggggaaaggagaaaggtacagcttgaggttcccgctcagccaggactaggaggcctctgtaggggcagaacagccctgccggcgctctgagcatgcgccgaaaagcgcccacggggaaagccatgccggggtgcggggtggggggggggggggggcggtgcgctcgccactgacgcatgcgcagagacacgggtctctctcggggttttctcgcgcctgcgcaagatcctccagcccaacagggggcgatgagccgatccttgagcgggtttgccccgccggagtaatccggaagaggcctcttattagggctctggtggcgacggtggcggacacttggggtctggacgcaacggcggcgggagcatgaacgcccctccagccttcgagtcgttcttgctcttcgagggcgagaagtaagtgacgccggctgcggagggc

SEQ ID NO: 38964 - DNA, 2300 bp, Homo sapien
ctttcttccccccactcttctggggtcgggggttcctttcccttcccagttgctgtccctgggtcccctctttcatgtcccacaggccacagagcccagtgtgtccaaccagctgttctctcctcaaagcagcccccaagcaagtcccttctctagggtgtccctgaggacagcacagaggcgggactcagagaccccattcctcttcacgcagcccttaccccaagccctctagctgtgtggctggcagtgttggccacgtaggggctcccatccccccaccattgtgtcacatgggctgccaggctcagctcccagctgcgtccacagtgacctggatcagggtggggacaaggactggaccctccttctccagaaggccttcagctcttgccttgccatgcagtcacctccttccccctctgaccccagatcccaaaggtgcaccgttgccccagcccctttctggccccatggggtttctctgatgccttcatcatagaggcccggggctggtccgatggttggcaaaacttgactccggcccagtccccactcttggggacttagaacccctgctgtcctgggatctggcctgcctttctttggtcagtccctgtggtcccccaccagctccccctcccatagggctgcccaccaagccctgcccccagcccaagaggagcccccactgcctgcggggcagtgatgtctggccaccggctcacaccaatgacttggtcctggggtggcagaagcagcaggtgacaggagcagggcccctgtccctctcttctggccctgtggtacccaggccacacgttgtgcccgctcttggggctgaccggctgtagggaccaccagccgctgctactgtgggccgccccggggcagggtgggcagggcttttgtgggttatgaggacacagaagtccctgaggcccccagacctggctcagccaacctccttcctcccccggttgccccccactctaaagcctcctccctcccagcgtccactggctccaggctcctcacaacagcagctcatagacacggggcgtctccaggtggtcccagccctccagatgtttctagctctccaggtgggcgctgttttcacgtctgcctgcatccattcattccttcattcctcacctttatcctgttatctctatttttttaagctaccaggaaggaaagggaagaagagatcacgaaactgggacccccagaagggaggagtgggctttgaacttagacatctacctcagagctcaaataggttgtttaaaatcacattcaattttcagatgaaggggaactttatagtttttttttttttttttttttttgagacagagtctcactgtgttgcccaggctggagtgcaaatggcttgatcttggttcactgcaacctctgcctcccaggttcaagcaattctcttgcctcagcctcccgagtagctgggactaaaggcgtgtgccaccatgcccagctaattcttgtatttttagtagagacggagtttctccatgttggccagactggtctcgaactcctgacctcaggtgatctgaccgccttggcctccgaaagtgctgagattacagttgcgagccactgtgcgtggccagaactttataataagagacttgaagctgggtgtgacggtgcacacctctagtcccagctactcgggaggccaagacagaaggatcaccttgaggccaggagtttaaggccagcctgggcaacatagcaaaacctagtccctaaaattaaaaaaaaaaaaaaaaaaaaaggaaaataaaggagacttgaaatttttgaactaaatagtggtgatggctacacattgtgaatgtaattaacaccactgagttaaacacttaaaatggttaaaatggcaaattgtatgttatacctattttactacaataaaaagtataaaaaagagaagatatttaggtgacttacagcaaccaattgcaacaaaacaaaatgttaagaaatgatctttttatgaggcaattggaaatttgaacactgatcaactataggatgattggaattattaatttttaaaggtgtgataagatactgcacttggctgggcacagtggcacatgcctgtaatcccagctacttggcaggctgaggtgggagaatcgcttgagctcaggagttcgagaccagcctgggcaacgtggcgaaatccccgtctttacaaaaacaaacaaacaaacaaaaaagatattgcagttgtgttgtaagcgtccttatctttcagagct

SEQ ID NO: 38965 - DNA, 2300 bp, Homo sapien
ccatctcaaaaaaaaaaaaaaaaaatgggaccagaattaaataatgcccatgtagtcaaatctttcaacccgggcaaggaagatgtataataatcatctgagtgctttgggaggctggggcaggaggattgcctgaggccaggagtttgagaacagcctgggcagcatagcaagacccccatctccgcaaaaaaacaagttaaagaaaattagctgggcttggtggcacgtgcctgtagtcccagctactcgggaggctgaggtaggaagattgcttgagcccaggagtttgaggctgcggtcagctatgatcgcaccactgcactacagcctgggtgacagagcaagaccctgtctcaaaaaataattatcatcatctgaggggtctttggtcggaaggggcgggcccctcatctggtgggacccctgagctggttgagaacagggtgggtgatgagctccttcacctactcctagcccgctctcacctgcccagggctaggctgggtactcctggaagatcatccccatagcctgcatgactgggggcaggtgtacagcaagcagtcaccaggtccatggaggaagtatgtcctcagcccttcctgggagaagagagcttgcaggagaggtgacccatgactcagagagggctgtacaaggtgatctttgagatcccttcccacgccaagattccgtgcttctatattcctgcctcttccaggaagcctcccctgtttgccctagcctcctactcatctagcagcccaggtgttatactatctttaataatatcatttgcctaaatagtactacctgccaggccctgggtcaggacccttagggagatcatctcatttaatcctcaacaacctggtaaggtcggatcaacttcctccatattcatttttttttttttttgagacggagtcttgctctgttgcccaggttggagtgcagtggcacgatctcggctcactgcaacttctgcctcccaggttcaagcgattcccgtgcctcagcctcccgagtagctgggactacaggcacccaccaccacacccggctgattttttgtatttttagtagagacggggtttctccatgttggccaggctggtctcaaactcctaacctcaagtgatccacccgccttggcctcccaaagtcctgggattacaggcgtgagccaccgtgcccggccctcctaggttctgacaagcagtacagatgccacacacctggctttcttctctgaccccgggggtacctcaagtgggctccaaggaaggggacaggtgccccacttgccggcctctcagagccccacttgccggcctccctccttacccaccttggagctgggcgtcttcgcgaagctgagggcctcggtagtgagggagaagtagagcttcttgaaggaggaggacatgagggggcccttgcccttggtcctgtggatgaagagtggcccctccttcacaggtggcgcctgcaaactcagcgtccgctgcaggtccagctctgccaggccagggagggaggggaatagagagcccagtgaatgagggcgggactggggggagcggagcagtgggaggggccatggggctcaagggctgagcaaatctgaacagcaggcagtggacgtagtcatggggctcaagggcggagcaaacatcaacagctggtggtgagcggggtgacaggtggactgaggaaggcagggccatgggcttggaggcgggacacgcgtcagtagcaggtggcggcggggctatggagctcaaggatggagcaaatgtcaacaggcacagatgatgggggggtgaggccatgggtctaggggtggggcaaacgtcaacggcaggcagtgggcagggtcacaggaagcacaaacagtggtgcgtgggtctatggcctgggggcctggcaaatgccaacagcaggcggtgggtggggccacgagaggaacaaacagcgatgggtggggccgtggggctcaagggcggagcaaacgtcagcagtaggctgtgggcgggtctgtgcagggcggcgctcaccgtccttctcctcgatgtccacgagcttggtgatgaagtccttcagctgcgccacgccctggcgcacggtgggctgcagcggctccatccaagcctccttggccctggaagccggcgtgtccatgttgcccacgttctggactgcctggaggtgacagcaggaaggaccaggttctgctaggttaggggcctagccactgcaccccctcccaccccccctccccaagtctttgctac

SEQ ID NO: 38966 - DNA, 2300 bp, Homo sapien
cattccaggggcaacctgggctccttgcagctggaggtgcggctgcgggacgagacggtgctgccctccagctactaccagccactggtgcacctgctgtgccacgaggtcaagctgggcatgcaggtgagggggcctgggcagggtgggagggtccagtggcagtaggcctgtgcgcctgtccttctaaacccattctgcagagcagaaacctgaggtctggggatgtgaggagctggccagtgtccagggccccgtccccagccaccccttgggaaaatgtcctctttccctgggatgctctgaggtcctcagagggaaaggttcgggatcccccgtgcctctccctgcagggcccagggcagctgatcccactcatcgaggagacaaccagcaccgagtgtcgccaggacgtggccacgaacctgctcaagctcttcctggggcaggggctggccaaggacttcctggacctgctcttccagctggagctgagtcgcaccagtgaggcctgggaaggagctgggcccagaacactgggaggtgtttgggggtgggtgggctcctcctgtaggaggcagatggggtcagagaggagggaggcaaggaacagagccaagggcagaggtgggacagtgggctgggaggtggcgaggaggccctttattgagggggcagcttagatcccccagacccaaggtcctctgtcctccccctcccccaaaagctttgtgccagccccctacccactgggacctctgtttgtaggtgagaccaacaccctgttccggagcaactctctggcctcaaagtccatggagtcttttctgaaggtgaggttgcatgctatattgtcctcatcttgcaaatgacaacactgagcttcagagagagcgacagagggggctgggacttcgactccagtgttctatctccatattcagagccctttaaggttaagaatgtggctgggcatagtggctcatgcctgtaattgcagcactttgggaggctgaggcgggcggatcacttaaggtcaggagttcgagaccagcctggccaacatggcgaaaccccatctctactaaaaatacaaaaattagcctggcatggtggtgggcacctgtaatcccagctactggggaggctgaggcaggagactcacttgaaccaggagccagaggttgtagtgagctcacgccactgcactctagcctgggccccgtgctagactccgtgccccgcacccccccgccaaagagaatgtgtgtgtgattaaaatttaagttagaaacagtctcactatgttgcccaggctggtctcaaactcctggcctcaagtgatcctcctgccttggcctcccaaagtgctaggattacaagggctaagaattctagtcattcattcactcactcattcattcattcatgaataaacagtttgccctgcatgtgtacctggccccctcctgggcggatacggcaggcaaacggtgcaagggcggctgccgggagaaggtgggcagctggagtgggactgggggagacaggatcaatgtgacctgcggtggtccccaggtggccgggatgcagtacctgcacggcgtcctgggccccatcatcaacaaggtgtttgaggagaagaagtacgtggagctggaccccagcaaagtggaagttaaggatgtagggtgaggccgggggtaactccgggggttgcggggtgcagcggcagcgggttgggatcaggccctgtcagcatgtgtgtttgtgcttctgcccacccgtgtattgtcccctgtgtccgtgtcctggctgctgtgagagccactgttcctgtcgtggccctggcgctgaccgcgacctcctctgccaacccgccccgttccacgcaggtgctccgggctgcaccgcccgcagaccgaggccgaggtgctggagcagagcgcgcagacgctgcgcgcccacctgggggccctgctgagcgcgctcagccgctcggttcgcgcgtgccccgccgtggtgcgcgccaccttccgccagctcttccggcgcgtgcgcgagcgcttccccggcgcccagcacgaggtgcgccctccacccgctgggctaggctgggccgggttggactgggctggggcgaggggtgaagagcggtggggaaccagggagcgctggggaggaccagggaggctgtgtcccagcgagggtcagggacggagcctaaggggagggggctgccaggagccctggtctgggggactccagcccgcgctcttccgcacccctccagaatgtac

SEQ ID NO: 38967 - DNA, 2300 bp, Homo sapien
tacagaaggagctggcctgatttggagaaggggtccctatgcttcagcaatagagtgtaaggaggccccttcttctgccagcagaggcctcagattccacccatagcagcccctcttcaccctagggaagaggcagtaacaaccaggcttgggaacatgctgcagaacagaggccaggagtacagaacgtggccccggcttctggggagagtagaaatggctttccctgagcaggagaccagacggagcctagaggggaggtctccgagtgggagggaggccagggactgggcagaccagtgtgggagggaagggagaacttacccttagggtgagaggctatggtgtcccttgtaaggcagacctttccgataacgtcgtcccggctagaggagggagacggaggcagagctgggcagggcttcagtatctgccctctgggacctcccaccaagttcagggcccccccggggggagcagggtggtggacaccgctgtcatttccagagtaacccaacagagctggacctgtggcccttctgtaggctgtgggttctggaccctctagggggatgtgataggtttctcacatgcccacacatgccaagctcacactctctgggtgcccatctcacagctcacacctgcacgcacacgtgtagtccatgcacacttgtgcctgcatgcctgcacacacacgtgtgtatgtggcgcatgcaccatggagccacgcatgtgcacacccacacgctcaagcttttcgccctcccaggcccccaggctctgcctccctccaggctgcaaagaggatgccaaaaaggacccaggagtcctggtggtgaaatgggccagggagcaatcagatggccaggtctgggtcccagctggagaggggggcactcacctgagggcatcctcatccatgacatagaaagccacagcgtggaaggtgggcggcaggtgcacttggtactcctcaccccagaaggggcacagggtcttccacactgtggctgtcctgcaggagagaaccctcagcatgtgcccaggccactcccaggccctgggctgggaccttccttgtatcttcccctacccctataacaactggctctgccactgatgtgttttccctgtgccagaccctactgttcaccaccaatcactaccccctgacattcctctctgctctggatggggcacagggctgcctctctctggctgttatttattttattttatttttttgagacggagtctcgctctgtcgcccaggctagagtgcagtggcgtcatctcggctcactgcaacctctgcctcccaagttcaagcaattctccctgcctcagcttcctgagtagctgggattacagacgcctgccaccacgcccagctaattttgtcattttcgtagagacagggtttcaccctgttggccaggctgctctcgaactcctgacctcaggtgatctgcccacctcggacttccaaagtgctgggatgacaggcgtgagccaccgtgcccagcctctccagctgttttacatttggggaaactgagatcacagttggcaggcattggcctcaggtcacagggtagctgcctcagggcgactggtgagcctggcctcacatcctcacccagctctggtcaaccccctttggatcagagccttcaactcatgggactcagtgggctagcgggtggggagacgctgaagcccccaaggacccggatgaaagttcaggggaccacctcatgccaaccacttctcagacaggtcatctgtttcccttctgtatcaagagcatcagagccatcacacccctctccctcttgctgtctgtggtttgcagaccctcgagaaaggctgggagcctgcttgcaggtagggaaggactgggctccgagtaggccacgggcactcaggtgggcagaacagtagggcagctctggccatgaacttggaagcaggagtctgggtgaaggaagggagaggacagcaaagaccctgcccagagatcatggggaccatggaggaagggacatccggaggaagtgactcttcagggtgcaggctggggttgcccagcctcgagggatattactatgggactctcaggggacaggacccaagttagagccaggaccagggaggggaagggagctcaggctctggggtggccagacttgggctccagtgtggctctgccacttttactaggcatgtgaccttggccagggtagttagtctccctgagcctcagtttccttgtctgtaaatggggtctaatgata

SEQ ID NO: 38968 - DNA, 2300 bp, Homo sapien
ttttgtttgtttgtttgtttgttgagactgagtttcactcttgtcacccaggctagagtgcgatggtgcgaacttggctcactgcgacctctgcctcccgggttctcaagcaattctcttgcctcagcctccagagtagctgggattacaggcgcctgccaccacgcccggctaatttttgtatttttagtagatatggggtttcgccatgttggccaggctggtctcgaactcctgaccgcaggtgatccacccacctcggcctcccaaagtgctgggattacaggtgtgagccaccacacctggcctcgtttttgtttttgtttttggagacagagttttgctctgtcgcccacgctggagtgcagtggtgcgatcatacctcactgcagcctcccctcctaggctcaagcaatcttcctgcctcggctttctgagtagctcgaactacagacacacactaccatgcctggctaatatttttattttttgtagcaaagcggggggggcggtctcattatgttgccctggctgggcttgaactcctggcctcaagtgatcctcccatctcaagcctcccaaagtgctgggattataggcgtgagccgctgtgcccagcctcaaacactttttctttcaacgacattgacctatagtgaatatcaaaagcatgcactgaaactcaagagctgcctcctctcctgtgccaggatgcactgtaacttttgtgagccctaggcatgtttgacttatatgggttaagatattcaaatacggctaggcacggtggctcacgcctgtaatcctaacactctgggagaccgaagtgggcagctcacctgaggtcaggtgtttgaggccagcctggccaacctggtgaaactccatctctactaaaaatatagaaattacccaggcgtggtggcaggtccctgaagctctggctactcgggaggctgaggcaggagaatgccttgagtcagggaggcagaggttgcagtgagctgagattgcgctactgcactccagcctgggtgatagagcgagactccaccccaaaaaaaagaaaaaaaaaaagatattcaaatgtgtattttacaactgctttggcataaagactgactgataccagtcaggtcagattcattattacatattcattactattatactcctgtttgactaggcatggtgggctcacatctgtggtcccagccctttgggaggccaaggcaggaggataacttgaggccaggagttctagaccagcctgggcaacataatgagacccccccatttctactaaaaataaaaaaaattagccagtcgtggtggtatgcatctgtagtcccagctacatgggaggctgaggtggtaggattgcttgaacccaggagattgaggctgcagtgagctatgattgcaccactgcacttcagccaacagagcaagaccctgtttcaaatgcatacatacatacatacatacatacatacatacatacatacatacatacacacacaaaccaaccaatacaaaaaatacatattttttttcttctgattctaaaaaacataaaaacagccaggcacgatggctcatgcctgtattcccagcactttgggaggccgaggtgggcagattacctgaggtcaggagttcaagaccagcctggccaacatggtgaaaccccgtatctaccgaaaatacaaaaattagctgggcgtggtggcgcgtgtctgcaatcccagctacttgggaggctgagacagaagaattgcttgaaaccgggaggtggaggttgcagtgtcccccacccgctcctccaggggcgcccccctcgagccaccgcgccggctgcccggcgagtgtcagcgcctcctcacaggccccgcccctcacgccccagacggccaatgagagctgcggccccggccggcccctccccgccctggggaaccccggtcgcggattggccggcccgggcgcagtgtcccccgcacgtggggcgggggcggggtgagtggagtggcagcgaagccccgcccccgccgccccgcccccgcccccgcctcctccccggcccgccccccctgcggcgcccagtccagcgcccgccgcccgccaccccggaccccggtgtctggcttcccccgagccgggaccccgcgatggccaagcgcagctcgctgtacatccgcatcgtggaggggaagaaccttcccgccaaggacatgtgagcgcggccgggggtgggagccccaactttccggggaggggcactgccccccaggacgcct

SEQ ID NO: 38969 - DNA, 2300 bp, Homo sapien
ccactgcactccagcctgggcaacagagtgagacccgtctcaaaaaataataataatataataaataaaagagaccccagagagcttccttgacccttccaccatatgaggacacagctagaaggcactctctacgaaccaaaaacagacaccaactcttcctagtttttgtttttgttcttgttcttttttttttaagatggagtctcactttgtcacccaggctggagtgcagtggtgtgatctcggctcactacggcctccccatcctgggtccaagcgattcttgtgcctcaacctcccgagtagctggaattacaggcgcgtgccaccacgactggctaattttgtatctttagtagagacggggtttttccacattggtcaggctggtctcaaacttctgacctcagatgatccgcccaccttggccacccaaagtgctgggattacaggtgtgaaccactgcgcccggccagaagtttttcttgtgagttgaggtgaacatctgaatcccctcggggaactgaggtatgtccccttcagggaatggtccctcttcatccaaaaatggggcccacaggtgataatctgttgggtttcccagaatgaagacatctggcataattagagcgtgaaggtcaggctgacgggggctagcaccccgatccaggggagaggtggtcacaggtctcgctccacctgccctgagccccatctcatcttttttttttttttttttttttgagggggagtttcactcttgttgcccaggctggaatgcagtggtgcgatctcggctcattgcaacctctgcctcctgggttcaagtggttctcctgcctcagcctcctgcgtagctggagttacaagaacaagccaccacgtccagctaattttgtatttttagtagagatggggtttcgccgtgttggccaggctggtctcgaactcctgacctcaggtgatccacccacctcggcctctcaaaatgctgggattacaggcgtgagccaccatgcctggacttccatctggtaattttctgtctcgaggaggaactaccctgccctgacagaggctggggatgaaggaggaagagacagccggtcccctggataaagaggtgagggggtgtgaagtctgggagcccccctcccagggccaggctacagggggacagcagggctataccaggagtgccacagagatgcatttgggtgtgatctaatccccagtcctgccctgacctcctgggtgctcttagccaagccctcttccctgtgtgtgctagaaagtgagggtcactcccttccacacaagggagtgaattgagggtggggatctgagctctctgagcagcaaagctggacacaggccaaattgccaatcctgagtccctctgtcatgtggacctgggaagcttgtcctcatcctccatccttccccagggtggggcctgagaatctgagaaccttgagcctgggaggtcaaggccacagtgagctatgatcgcaccactgcactccagcctgggcgaaagagtgagaccctgccccccccaaaaaaaaataataataaataaaagagactccagggagtttgcttgagcggcactccctatgaaccaaaaacagacaccaactcctcctaggttggttttttgttttttgttttttgttttttttttttgaggcagggtcccactctgtcatccaggctggagtgcagtggtgccatcttggctcactgcagcctcaacctcccaggctcgagtgatcctcccacctcaggtcctaaaggaagagtcgctacattggggactgtttggacaaggagatccacggggtagacttagcgggattgtccctggggcagcctggatcctgaggctgccccgcctccttcctcagcccctccctggtcaggcgctcctggtgggtggggggggtagtccaggcttgtcttgcaactgtatgttctcttcagacccctccctggcgatgccagattcactgggctggcagattctgcccccaaacctgtccaaccagttgtttgagaggagggggtagctgggaggggcagcaggagatgccaggaacagcttcccctagcacagcacagactacagacaggggagcctctggggctgcagacactgcagacggacggacagacagatggacaacagctggaggcttggcccggccatagggctctctgcgggacagtcccagctgctagtgtcgctgttgctgctactgacccgtgtccagcctgggacagacgtgggtgag

SEQ ID NO: 38970 - DNA, 2300 bp, Homo sapien
tcctccccagacttgcagactgctggcttctctaagccatctttctgattttctcctctgctcaaccccatgtgccgctccttcccctccccattcttctctctctctgtcctccgaacactgcttcctgtccttccctggtccctggctctctgagtccctccttttttgttttgttttgttttgacacagaatcttgctttgtcacccaggctggagtgtagtggtgcaatctcagctcactgcaacatccatctcctggattccatttattcttctgcctcagcctctcaggtagctgggattacaggtgcctgccataatgcccagctcaattttgtacttttagtagagacagggtttcaccatgttggccaggctggtctcaaactcctggcctcaagtgatccgcctgccttggcctcccaaagttctgggcttacaggtgtgagccactgcacccagcctgaatttctccattcttcccacacaccctcctcaggttctccttcctgaccactgacccttcttttctttttttttttttttggagtgcagtagtgtgctctcagctcactgcaacctcttcctcccagtctcaagtgattctcctgtctcagcctcctgagtagctgggattacaggtgtgcaccactacaacttggctaatttttatacttttagtagagatggggtttcaccatattggccaggctggccttgatctcctgacctcaggtgatccgcccgcctcggcctcccaaagtgctggggttacaggcgtgagccaccgcacccggcccccttccttcgtcttagtcaatcctatcccacctcttcttccaccagtcccctcacctgatggtcccaacatttcatcatccaccacctcctggagggggtaccccgaggtgctccgctggggactctgctcattctgggggtgcggttgacggctggtcgtgatctttcccgtaatctgtcccctcttacggaacctagtctccgttctgtccatggccttcttctggacacttctaggatccagaagagtatgttatcaattctcaagcctaggagaagtcaggagtagagaacagctctgagaagatactgttgtccaactgatctccaggcaccacggagtccggtccctccaatcaggaaggtcggaatctctgatgtcatcgttcatgccaacctggcaaccagtttgaaaaaaaacacatgtaactgccaggctgatctcttgtcctggagatcctgggtgaatggtatctcctgccactgtcccaacctcagaccattgtccaaaagcatcttcagggactccacatccctctattccctgtcccagcagaggctgtgtcctctccactcaaagcctgaagcatgttggggtctcttcgtctctgtacatgcccatttcagagtccagtctggtgggagagggaacagagtgggaaagaaaactagggtaagcagaaacgatgaaaccttataagagtgagagtatcatgtacaagagtgagattatcatgtacaagagtgagattatcacgtacaagagatcccaggaatactgacttgatgaaaaagtcacatcagagcactcagtttggcagagcttttctgccgaatgtttactcacattcactgtccgagattctatactgggggtacacacgtcctctgccctaaggcaattttgagtccaagagacattttgaggcctaaaaatcataggaaactgcccctgagctcacacatatttccaatggtgtccccagtttcagggaatccatggattacctaagccagcccctccagttcggctaagaaactctagtctatatatcaagttttgtatcatatgtattgctctgaactcagaaatttcccttccatttatggattctatgaataaaatatcacatgtacaaaaagactaagtcaaaaaatttcagctgtgcacagtggctcatgcttgtaatcccagcactttgggtggccaagggaggaagattgcctgaggccagcagttcgagaccagtataggcaacatagcaagagcccatctctaaaaaaacaaaaccaaaccaaattagccaggtgtggtggctggcacctgtgttccaactacttgggagactcatgtgacaggaagatcacttgagcccaggagttagaagctgcagtgagccgtgatcttgccactgcactccagtctgggcaacacagcaagatactgtgtcaaaaaaagtttttttgataaaaaataaaagagttacatgacattc

SEQ ID NO: 38971 - DNA, 2300 bp, Homo sapien
agccatctttccttctgtctgtctcctctgctgagctccatgtgccgctccttctcctccccattctcccgtttttctgtcctcagaacacttcctcatatccttccctggtccctggctctctgagtccctttttttttttttttttcgttgttgtcgttgttgttgttgagaaacagtcttgctttgtggcctaggctggagtgtagtggtgcgatcttggctcactgcaacctctgcctcccgggttccagtgattctcctgcctaagcctcccaagtagctgggattacaggtgcccaccagaacgcccagctcatttttgtgcttctagaagagacagggtttcaccatgttggccaggctggtctccaactcctggcctcaagtgatctgcctgcctggcctcccaaagtgctgggattacaggtgtgagccactgcaccctgcctcagtacctccattcttcccacacaccctcctcatgtgctccttcctgacttctgggcccttccttccttttttttttttttttttttttgagacagcgtctcactctctcacccagaatggaatgcagtggcgctatcttggctcaaagcaacctcttccacctgggttcaagcgattatcctgtctcagcctcctgagtagctgggataacaagcatgcctggctaatttttgtattgttagtataaatgaggtttcgctatattggtctggttggtctcgaacaactgacctcaagtgatccacccatctcagcctcccaaagtaatgggattacaggcatgagctaccacacccggccttcgtttttcttttgacacagggttttgctctgtcacccaggctggagtgcagtggtgcagtcatagctcactgcagcctcaaagtcctgagttcaagcaatcctcttgcctcagcctcccaacgtgctagcatctcaggcgtgagccactgcacctggcccgaaaccaagctttctcatcccaagcgccaacctttatcaagtctagcctagtcctctatcgtctcctaagtgtccctcatgagtgatcacttctgagtcctcctgcgtggagagctcagccactgggggcgtatctttcccattggaaaagtgtggttattggaagtttcctctttttagaaagaacaggattggaggtgctctctggggtatcctcctaccaagctgactgttgaagtccttgtggtgctcagggaggatggatgacactcgctgttgcttcagcttcatcttgagcccacacagcatctccactacccaggtctcctcaggctcaggggcgagctccttctccggctcctcctcagattcatctgaccactccctcttccttttccagccaagggacctacatggggggctgggatctaccccaggggctgagtaaagaaaccaggccaccgtgtaatgcttctgcatctgatcaccttagaccccgacccaaaaccccaaaccactctccatcctccccagacttgcagactgctggcttctctaagccatctttctgattttctcctctgctcaaccccatgtgccgctccttcccctccccattcttctctctctctgtcctccgaacactgcttcctgtccttccctggtccctggctctctgagtccctccttttttgttttgttttgttttgacacagaatcttgctttgtcacccaggctggagtgtagtggtgcaatctcagctcactgcaacatccatctcctggattccatttattcttctgcctcagcctctcaggtagctgggattacaggtgcctgccataatgcccagctcaattttgtacttttagtagagacagggtttcaccatgttggccaggctggtctcaaactcctggcctcaagtgatccgcctgccttggcctcccaaagttctgggcttacaggtgtgagccactgcacccagcctgaatttctccattcttcccacacaccctcctcaggttctccttcctgaccactgacccttcttttctttttttttttttttggagtgcagtagtgtgctctcagctcactgcaacctcttcctcccagtctcaagtgattctcctgtctcagcctcctgagtagctgggattacaggtgtgcaccactacaacttggctaatttttatacttttagtagagatggggtttcaccatattggccaggctggccttgatctcctgacctcaggtgatccgcccgcctcggcctcccaaagtgctggggttacaggcgtgagccaccgcacccggc

SEQ ID NO: 38972 - DNA, 2300 bp, Homo sapien
agtggcggctcaagcctgtgatcccagtactttttgagaggtggagacaggaggatcatgtgagcccaacagttcgagaacaacctgggcaacatagtgagaccctgtttctacaaacatttcaaaaattagttgagcatggtggcatgtgcctagtcccagctcctcaggaggctgaggaaagaagattgcttgagcccaggaattagaggctgcaatgagctatgatcatgccactgcactccatcctggggagcagagctagactctgtctcacaaaaaaaaaatttgtgggtgccaagactcaagaccatgggagctggtcgggcacagtggctgacgtctataatctcagcactttgggaggccaaggcgggtggatcgcctgaggtcaggtgttcaggaccaacctggccaacatggcaaaaccccgtttctactaaaaacacaaaaattagccaggcgtggtggttcatgtctgtaatcccagctgcttggaggctgaggcaggagaatcgcttgaacccaggacgcatcggctgcagtgagtcaagatcgagacactgccctccagcctgggcaacagagcaagactctgtctcacacacacacacacacacacacaaaaaaaaaaaaaaaaaaaaaagactgtaggagcatctggtgggaggtggtggagggagaactgtgggtttggaagctgcgccctccccccagccatgcgttggaacaggaacagttacatggagaacaaccttaccttgtccgacaccctcagatctttgtcccaggccaagaatcttttaatgacaggatcctctgtgattagagagcagatgtcagtgtgagaagcaggacagggtttccgtgggagcagcagggcagtgaggagaagtgtgcctcccggggggaagtctcaggattgtggccgcgggtgaggtggatgggagaggggagaatgactttcactgggcaagggagagaggctcctgctctgagactcccctgagaagaggccgaaggaggccctgggtgtgagaatctacaggatgtagagctgggaatcagccaggaccccctccagcagacacggagggaccactgcagagtcataaaggaattcccatcatttcctcatgagacagtcacatcagggtgtgaccatggccttggtatcccccactatggatggagacacttaggtttagaaaagtcagtaagagacattaagtttcagagggcacagctgaaaccactttctttgtttattgattttgtttttctttattggatttttatttttatttatttattaatttattttgagacagagtcttgctctgtgggccaggctggaatgcagtggcctgatcttggctcactgcaacctctgcctcccgggtttaagcgattctcctgtctcagcctcccgagtagctgggattacatgcatgagctactgtgcccagccttggtttttcttttgagacagggttttgctctgtcacccaggctggagtgcagtggtgtagtcatagctcactgcagcctcaaagtcctgagttcaagcaatcctcttgcctcagcctcccaacgtgctgggatctcaggcgggagccactgcgcctggcccgaaaccaagctttcttatcccaagcgctgacctttatcaagttgacctaatcctttatcatctcctaagtgtccctcatgagtgatcacttcacattcctcccacatggagagctcacccactggggcctatttttcccattggaaaagtgtggttattggaagtttcctgtttttggaaagaacaggattggaggtgctctctggggtgtcctcctaccaagcagcctgttgaaggcctcgtggtgctcagggagcacgagcgacactcgccgtcgcttcagcttcatcttgaggccacacagcatctccgccacccagatctcctcaggctcaggggcgagcaccttccgtggctcctcctccaacgactcctcagattcgtcccaccactccatcttccttttccagcaaaaggacctatgcggggggctgggatctaccccaggggctgagtaaagaaaccaggccacggtgtaatgcttctgcagttgatcacactagagcccgacccaaaaccccaaaccactctccatcctccccagcctcgcagactgctggcttctccaagccatctttccttctgtctgtctcctctgctgagctccatgtgccgctccttctcctccccattctcccgtttttctgtcctcagaacacttcctcat

SEQ ID NO: 38973 - DNA, 2300 bp, Homo sapien
atctcccctgggtccggtgttctggaagcgagagagacaatgtcacacttcaaggaggcagctctctagacaggaaagttattcacgtcccatgtcaattgagaaatgcaattttatctgctgcctttcattctataccctgcttctgaaccatcgtgttcaactgtgaaactcacactttggtgaccacgactccaaaactcacttaatacacccaaggtcagccccagtgatctgcttcatagcaaggactttgggtgggtctgcccagggagtagggcaccctcagagaatgtggctttggactttatcacagctggggccttttgtgtcacttaagatctaaacttgtaaccatgctagatgtgtttctaatgtgacaacatcacgaaccacgagtccagaagcctaatccttaatcctacctcctcatgatgaagtctcatgctctgtgctcaacgtggttagctgcacaagatgtaaaccaaagcttcactgaaccctcgacccaaatcagtaactcaagtgcgtcaatcataatgaacctccccaaactcagtttttatgattatttttgaggcagggtctcactctgtcgcccagactggagtgcagtggcaggatcagggctccgtgcggccccgaccttccaggctccagcgatcctcccgcctcagcctcctgagtagttgggagtagagatgcgtcccacatcgcctggctaatttttgtatttttgtggagaggggatctcgccacgttgcccaggcttgaagccagatcaagcaattgggttcttcggatttccgaaatagaccccaatattctgcctttaccccagaggatgcagatgtaccttctctcaggccgatgacctcaggcctccccggtccctggagctctaggaaaggtgagcgcgatctcgcgcccacacccagtgctctgggtcataagcctggatctggaaaaacaaacgccctttgagaagacggggactcgccaggatacccctctctcccctcatccagcctccagcccacccaattcctccccacctcctccacctccccaggccccactcacctcctccaactcctctggggaaacccaagccctgcagctcatggaacagaagaagtggaaccgtcgtttctggaacaggactatctgagagcggttcttcctggccctcgagttcatggaacggtataactggaaccgacgcttacggagcaagggtatgcgagagcggttcttcctggccctcgggttcgtggaacggtataactggaaccgacgcttacggagcaagggtatgcgagagcggttcttcctggccctcgggttcatggaatggcctaactggaaccaaggcttacggagcaagggtatgcgagagcggttcttcctatacaggaagtggaagatgttttgtttggagtcctcgtcgtcctcctccatgtcattggccaggtagctgaggacagaaatcaggttgctgctcaggggcaccaccaggagaggcctccggctgaggtcagcttcccagagaggaaggtaagggaccgtccctagctcaggactggcacccaccctgcagagagccatgccttcctcaggagggctctgctggacagagacctgatcaagggcgtctcccactccttcaggatggagacaaaaacccaactggtggccgagagtggtggcttacgcctggaatcccagcacactgggaggccaaagcaggaggatcacttgaggccaggagtttgagacgggcctgggcaacatagcaagaccctcgtctctattaaaaatgtaagaaatatgccagacgcggtggctcatgcctgtaatcccagcactttagaaggctgaagcaggtggatcgcttgagaccaggagttggagaccagcctggtcaacacggagaaaccccatctctactaaaaatacaaaaatgagcctggtgcggtggcacacccgttaggcctagctactcaggaggctgaagcacaagaattgtgtgaacccaggaggcggaggttgcagtgagttgagattgggccactccattccagcctgagaggcagaacaagactctgtctcaataaacaaacaaacaaacaaactgtccaggtgtggtggcacagccctgtagtcggagctaataaagaagctgaggtgggaggatcgcttgagcccaggatatggaggctgcggtgagctatgatctcaccactgcactccagcttgggggacagggcaagtctgtctcaaaaaaataaaagaaattg

SEQ ID NO: 38974 - DNA, 2300 bp, Homo sapien
ttcgcctggaaagtcagattctgtgtggggctgttgcagaatgagatttcctcctgccagggtgcaagaactcaagtaggaaatgggccttcccagaaggggtagatgctccagatttcctcagcactgtagctgctgcccagccttggagaaacagctgccaaactgttagggctctggtagctcctctgagaccccagtccctgttgcttcaaacagcttaaggagggcctttatgctaaactgtagtctgcaaagcaaccaaaccaaaaagggtaagatacacttatccacctgtagggtccagccccacagggtcggtgggtttctctccatgtgcagagacgagagagcgcagaaataaagacacaagacaaagagataaaagacagctgggctggggggaccactaccaccaagacgcagagaccagtagtggccctgaatgccaggctgcgctgatatttattggatacaagacaaaggggcaggataaggagagtgagccatctccaatgataggtaaggccacatgggtcacgtgtccactggacaggggcccttccctgcctggcagccgaggcagagagagagaggagaaagagagagagacagcttacaccattatttctgcttatcagagacttttagtactttcactaatttgctactgctatctagaaggcagagccaggtgtacaggatggaacatgaaggtggactaggagcgtgaccactgaagcacagcatcacagggagacggttatgcctccgggtaactgtgggcgggcctgtggaggagtagagtcttctctaaactcccccggggaaagggagactccctttcccggtctgctaagtagcgggtgtttttccttgacactaacgctaccgctagaccacggtgggcttggcaacaggtgtcttcccagatgctggcgttaccgctagaccaaggagccctctggtggccctgtccgggcataacagaaagcttgcactcttgtcttctggtcactcctcactgtcccctcagctcccatctctgtatggcctggtttttcctaggttatgattgtagagcgaggattattataatactggaataaagaataattactacaaactaatgattaatgattcatatataatcatatctaagatctatatctagtataactattcttattttatatattttattatactggaacagctcgtgccctcggtctcttgcctcggcacctgggtggcttgctgcccacatccaccaagtgcactttgggaggctgaggctggaggactgctggaggccaggagttcaataccagcctgggcaacatagggagaccccccccccaccatctccaaaaataaaaaaaaaaatagctaagtgtgatggcacatgcctgcagtcctaactatcgggaggctgaggcaggaggatctctggagcccaggagttggaggctgcatgatggcgccactgtacttcagcctgggcgacagagggagacgctgtctctaaataataataataatatataaaaagatatacgtaaccctacgggctcccctctcactgctgtatacacctgcctccttctgcatccctcacccaattgtccctcccggctaacaagccagctgcaccccccaggcagaggtcctgcagcagtcggtataggcagcctgggcagggggcttgtcatagatctgcctctggccacgagatcttctgctccccctacggctgctagccgcagctgtccactaccccttagctttattctctctattcaggggcctcctgctgcgcactccaagggggtgcacgtttccaaagagagatcaagggacatggggaaaggagaaaggtacagcttgaggttcccgctcagccaggactaggaggcctctgtaggggcagaacagccctgctggcgctctgagcatgcgccgaaaagcgcccacggggaaagccatgccggggtgcggggtgcggggtgggggggagcggtgcgctcgccactgacgcatgcgcagaggcactggtctctctcggggttttctcgcgcctgcgcaagatcctccagcccaacggggggcgatgagccgatccttgggcgggtttgccccgccggagtaatccggaagaggcctcttattagggctctggtggcggcggtggcggacacttggggtctggacgcaacggcggcgggagcatgaacgcccctccagccttcgagtcgttcttgctcttcgagggcgagaagtaagtgacgccggctgcggag

SEQ ID NO: 38975 - DNA, 2300 bp, Homo sapien
tttcttccccccactcttctggggtcgggggttcctttcccttcccagttgctgtccctgggtcccctctttcatgtcccacaggccacagagcccagtgtgtccaaccagctgttctctcctcaaagcagcccccaagcaagtcccttctctagggtgtccctgaggacagcacagaggcgggactcagagaccccattcctcttcacgcagcccttaccccaagccctctagctgtgtggctggcagtgttggccacgtaggggctcccatccccccaccattgtgtcacatgggctgccaggctcagctcccagctgcgtccacagtgacctggatcagggtggggacaaggactggaccctccttctccagaaggccttcagctcttgccttgccatgcagtcacctccttccccctctgaccccagatcccaaaggtgcaccgttgccccagcccctttctggccccatggggtttctctgatgccttcatcatagaggcccggggctggtccgatggttggcaaaacttgactccggcccagtccccactcttggggacttagaacccctgctgtcctgggatctggcctgcctttctttggtcagtccctgtggtcccccaccagctccccctcccatagggctgcccaccaagccctgcccccagcccaagaggagcccccactgcctgcggggcagtgatgtctggccaccggctcacaccaatgacttggtcctggggtggcagaagcagcaggtgacaggagcagggcccctgtccctctcttctggccctgtggtacccaggccacacgttgtgcccgctcttggggctgaccggctgtagggaccaccagccgctgctactgtgggccgccccggggcaaggtgggcagggcttttgtgggttatgaggacacagaagtccctgaggcccccagacctggctcagccaacctccttcctcccccggttgccccccactctaaagcctcctccctcccagcgtccactggctccaggctcctcacaacagcagctcatagacacggggcgtctccaggtggtcccagccctccagatgtttctagctctccaggtgggcgctgttttcacgtctgcctgcatccattcattccttcattcctcacctttatcctgttatctctatttttttaagctaccaggaaggaaagggaagaagagatcacgaaactgggacccccagaagggaggagtgggctttgaacttagacatctacctcaggctcaaataggttgtttaaaatcacattcaattttcagatgaaggggaactttatagttttttttttttttttttttttgagacagagtctcactgtgttgcccaggctggagtgcaaatggcttgatcttggttcactgcaacctctgcctcccaggttcaagcaattctcttgcctcagcctcccgagtagctgggactaaaggcgtgtgccaccatgcccagctaattcttgtatttttagtagagacggagtttctccatgttggccagactggtctcgaactcctgacctcaggtgatctgaccgccttggcctccgaaagtgctgagattacagttgcgagccactgtgcgtggccagaactttataataagagacttgaagctgggtgtgacggtgcacacctctagtcccagctactcgggaggccaagacagaaggatcaccttgaggccaggagtttaaggccagcctgggcaacatagcaaaacctagtccctaaaattaaaaaaaaaaaaaaaaaaaaaaaggaaaataaaggagacttgaaatttttgaactaaatagtggtgatggctacacattgtgaatgtaattaacaccactgagttaaacacttaaaatggttaaaatggcaaattgtatgttatacctattttactacaataaaaagtataaaaaagagaagatatttaggtgacttacagcaaccaattgcaacaaaacaaaatgttaagaaatgatctttttatgaggcaattggaaatttgaacactgatcaactataggatgattggaattattaattttgtaaaggtgtgataagatactgcacttggctgggcacagtggcacatgcctgtaatcccagctacttggcaggctgaggtgggagaatcgcttgagctcaggagttcgagaccagcctgggcaacgtggcgaaatccccgtctttacaaaaacaaacaaacaaacaaaaaagatattgcagttgtgttgtaagcgtccttatctttcagagct

SEQ ID NO: 38976 - DNA, 2300 bp, Homo sapien
tttctcctttgagagaaggttggctttggaaagctcgtggctcttaggtgaatgtgcatcttgtaaaacagtctctttagtaatgcaatcactattttaatacattggggactaaagatggaagcttaaggattaaaataaaatacctttttcaacaaaaaatgtattaatatataggtagagagagggtactgttgtctgttgggtagattccttggcaaataaacagaagggagtaggattgggaatttgtccatctggtaaccagacttacaggtaaatcagtaaaatgagttagcaggagtcaacccagtaaagttagctaagacaagacaattactaaagttttcattaggcaagcaagatcaggttctcaatggtcaagcagtgagatgcaagccagactaggaagttaaggaacagagtatcagggaatcataagaaaattgtaataaaatttattcagccatggggctagttttatttatataaagctattttaatatataaaatatatacatagtacaaaatccagaaggtgcagaatagtaaacaacgaaaagtcagccttctaccccattatacaatctaaactccccctcccaagagacaaccataattaacaatcttttatatagccttgtagaacatctatgcacaaagaagtaagtcgtagtataatatacacactgtttttttcacatatttatacaatttttattttttcaatgtatagtatttcaaggcatgaatggaacatgctttttaaaactagttccttattatgagacatttaggtcatttccaatcatctgctattacagataatgatagagtgactaactttatacatgcatcatttaatactggagtagtcactgagcttcagagagagcgacagagggggctgggacttcgactccagtgttctatctccatattcagagccctttaaggttaagaatgtggctgggcatagtggctcatgcctgtaattgcagcactttgggaggctgaggcgggcggatcacttaaggtcaggagttcgagaccagcctggccaacatggcgaaaccccatctctactaaaaatacaaaaattagcctggcatggtggtgggcacctgtaatcccagctactggggaggctgaggcaggagactcacttgaaccaggagccagaggttgtagtgagctcacgccactgcactctagcctgggccccgtgctagactccgtgccccgcacccccccccaaagagaatgtgtgtgtgattaaaatttaagttagagacagtctcactatgttgcccaggctggtctcaaactcctggcctcaagtgatcctcctgccttggcctcccaaagtgctaggattacaagggctaagaattctagtcattcattcactcactcattcattcattcatgaataaacagtttgccctgcatgtgtacctggccccctcctgggcggatacggcaggcaaacggtgcaagggcggctgccgggagaaggtgggcagctggagtgggactgggggagacaggatcaatgtgacctgcggtggtccccaggtggccgggatgcagtacctgcacggcgtcctgggccccatcatcaacaaggtgtttgaggagaagaagtacgtggagctggaccccagcaaagtggaagttaaggatgtagggtgaggccgggggtaactccgggggttgcggggtgcagcggcagcgggttgggatcaggccctgtcagcatgtgtgtttgtgcttctgcccacccgtgtattgtcccctgtgtccgtgtcctggctgctgtgagagccactgttcctgtcgtggccctggcgctgaccgcgacctcctctgccaacccgccccgttccacgcaggtgctccaggctgcaccgcccgcagaccgaggccgaggtgctggagcagagcgcgcagacgctgcgcgcccacctgggggccctgctgagcgcgctcagccgctcggttcgcgcgtgccccgccgtggtgcgcgccaccttccgccagctcttccggcgcgtgcgcgagcgcttccccggcgcccagcacgaggtgcgccctccacccgctgggctaggctgggccgggttggactgggctggggcgaggagtgaagagcggtggggaaccagggagcgctggggaggaccagggaggctgtgtcgcagcgagggtcagggacagagcctaaggggagggggctgccaggagccctggtctgggggactccagcccgcgctcttccgcacccctccagaatgtac

SEQ ID NO: 38977 - DNA, 2300 bp, Homo sapien
aatttccctcctaattagtgaggatacattgagatgacgcatgtgaacatggtttgacaattataatgtcatatggatggaagatacaacttttattaatcactgttgatatgtggacagatttgatactcattatactgtttttaagtgtctataactttaaatattttatgccaatcttaatattaataattttctccattttcaacattgtatgatcagcaaagtaaattttcagtcaattctatttggtttttatttgaaaaagtaaaataatgatcatgcaacatagaaaattatagttcagttgccaattccattaacttagtttgtctcagaaaaggaaaaattaccatagacacagaattaactattagaattaatatttaatctaaaaatgtctagtgtttctacagaaaatttgagtaccttctcaacttccttaaaccagtgcctttttcaaatttcttttcaaagttacacctctcaattttcataaaaaatagtttgaagattattctgaataattataaccaatgaaacacaaagacaagaaaagaactattgcagtgggcccttgctgaacctgagctagcacctataatgagtgagtcttcaccaaaagaataaggagggaggaaggactagaaggacagaaaagaggcaatgataacttaagagaacactgaatttttaaaaattttaaaaaggtagtggctagcagagaacctgagacttgtacccatgagaactttagcccagtctatctatcacgatagccccaagaattctggtcattgtacttgggtaagggcttctattttttaaggcacttgcattttatgaaatgttagtgtttgcaggtgtcttggctaaataatttagggaatacattttaggaggaagtaggggcacagagggggagagagaaaccaggcaggaaagaagaaaaaaagaaaaaagaagaaaataaatctttctgttcccattattttactgcctatagaattataaaaggtaaacacacacacacacacacacacacacacacacacaccccttatagggtcatttagaaccatctttcttcattttaaaactaaagaaacaggtctaggtgacacagatgaagcagtggcagagccaggaaaataacctgacccttgtccctgctctttccaccgcaccatggtgactctcttttttgtgtcttttttttttttttcactctaaaactgaggatcatttgtagtcaaagagatcaatgctattctcaaaacaagttctgatctctcataattttcttggtaactcagaatcaatgttaagtacgttgaaataaaaatacagttctttacacggtaattttgtagactgtgcaccacggtcccatccattttcttacttgatccttacaaaaaccctttgaggcaaggcaaggaaggtattattatctacatttttaaagtgagcaaattaaaacccaaagtaaggtcacttagggtcaggacggagcaagtactctattcctatatttggaatataggagggaatacacttccaaagaggcaattccctcaaaaagcaccaatcttgctctttactttcttaccaaggcattctccatgccctggagatgccctcactaagttagtgaagcttggatgttgacatccacagaggttactcctagtttgcacctagttgtcatcttaaaaagcgcagtttcttaccccttcccttggtcctgatccttatttaggctcctatttttctctttgggatttggcgtcctgggtctcactccaaagctccaccctctccaaccaagaagtcgcgtgcttggtatccaaggtgaccacgcagctttacccgcgttgccccttccgtgcttcccattggccagtggactcccatgtaccgcccctccaatagccaatggtcttgagacaaagggcgcccgcctttccagcgattctaacacctaccctcttacccgtgctcccctgcgcattgcctcctgggaaatgtggtttctaagaggcagagctctgcgacttagaactacctatcccgtcggccttagcgaaagggggtggacttaggcaaggggtccaggtcagagtttagagctttcaaatcccaacttgcccctggggattgcgcggctgatgtttagaacgcctagtcaagccaaccggctcgctcttgtttcagcaaaccctgacttacgtctcctatttgacttgaggcggcacagtggccaagtcgattggccgtggcaagtgaccctccctgtg

SEQ ID NO: 38978 - DNA, 2300 bp, Homo sapien
acttggtttgtgtactgaagcttataagattactaattttttttcatattttagattcaggggatacatgtgcaggtttgttacctgggtatattgtgtgatgttgaagtctggggtacaaatgatcccatcacccaggtactaggcatagtacccaatagtttttcaacccttgccccgtccctccatcccccatctagtagactccagtttctactgttgccatctttatgtccataattatccaatgtttaccccccacttataggtaagaccatgtggtatttggttttctattcctgtgttaattcgcttaggatagtggcttccaactgcatccatgctgctgcaaaggatataatttcattcttctttatggccgcatagtattccatggtgtatatgtaccacattctctttatccagtccaccactgatgggcacataggttgattccatgtctttgctattgtgaatagagctgcagtgaatatgttgagtgcatgtgtctttttggaagaatgatttattttcttttgtgtatatatccagtaatggaattgctgggttgaatggtggttctgttttaagttctttgagaaatcttcaaactgctttccacagtggctgaactaatttacattcccaccaacagtgtatgagtgttcccctttctccacagcctcgccagcgtctgttgtttttttacttatttttaataatagccattctgactggtgtgagatgatatctcattgtggttttgatttgcatttctctgatgactagtgatttggaacagtttttcatgtttgttggtttcttgtacgtcttctcttgagaaatgagcaaaatgtcctgtcttttgctcatttttaatagggttattagttttttgcttattgatttgtttaacttccttgaagattcaaaggaacaaaggatattaaacctttgtcagatacagagtttgcaaatattttctcccattctgtaggttgtctatttactctgttcataatttcttttgcagtgcagaagctctttcatttaattagatcccaatgaggcaagtctaggaggacaggaatcacatctttcttatttagcttcatacctgggaactttgcacagtgcatagtacatagtaaacacaattattttgtgaacaaataaaaagtttggaaaagtaggtaaagagcaacctgtggtagaaccacagagtgctaagtctactgactatcctacaccaaaaaagttagtgaagaatttcaagatgaataaaaatacaagaaaaccatgctttaaggagattcacctagtgtgagacagtgggtgtttccatactcagcattctctttactgcttgttgtggtttgaacgttcccacaaaagttcatgtgttggaaacttagtccccagtgcagcaatactatgaggtgggacctttgggaggtaattgggtcatgagggctctaccctcatgaatggattaacccattcatgaatcaatggattaatgggtcatagagggagtgggttagctattacaagagtgagtctgttataagagccagtgtgggtgtctctcatgcagcctctctccatgtgaggcctgtgccacttcatgactctgcagagcccctatccgcaagaaggctctcaccagatgcggctcctagacctcagacttctcagcctccagaactgtaatatataagctttataaatcactcagtctcaggtattctgttatagcaacagaaaacagactaagacactgctctacctcctgaacaataaaagatagacaggtccctgatattcgtaactttattaataaagaactatgataaagttttacagtcatttagctagtgaatccagtcacccactcatcaaggcaatggagctttatagttttacactagtctttaataatgcagtaaaaatttacaattttttttaaaataaaaatatggtctttctcaaaaagccaatcattagtgcttgtcatgaaagtgaggaggtcttgagaaaacaatgattctttgaaccagaaaaatagaagttttagatctatacaaaatgaggattagttaattatagtgggacctatagagtctcagataacattcttcttgaatgtttgagttctactgtatactaaaagcataatggagcaacaacaacaaaaacccatggaattaaggaatcatttcaaatactgtctagttgtaagtaacacttcaaaatatttttgtcaactctaaataaaacagtaaacaaaaacttatttt

SEQ ID NO: 38979 - DNA, 2300 bp, Homo sapien
caaatgatgtaatatagttattgaaataaacaatggaatgctgatcagcagattagaactcacagaggagagaagtatagagctgggagatcattctgaagaaatgacaacagagggaggatgaaaaagtataacatatagggtaaaaagattaagcttaatttcagagttttaagattttaatatgtacatataagagttaaacctaaaatagtaagttgggtagttaaagaatttttgtttttctcaaacacacatcaatcctttaaaaaatcatgcatggacaaaatttaaaagcaagttccagcaactttcaaactatttttatcaacaaatggtattctctctctacaaagcaatgggaatcagcaacaaaaagataaattaaaaatacatatttaaaagaatttaaaagtaaaaatcctaaggtgtcagaatcacctgaggagctgaataaaactatagatgcccgtcgggcgtggtggctcacgcctgtaatcccagcactttgggaggcccaggtgggcggatcacgaggtcaggagatcgagaccatcctggctaacatggtgaaaccccgtctctactaaaaatacacagaattagccaggcatggtggcagtcgcctgtagtcctagctactcgggaggctgaggcaggagaatggtgtgaacccaggaggcagagcttgtagtgagctgagatcgtgccactgcactccagcctgggcgacagagagagacttggtctcaaaaacaaacaaacaaacatacaaaaaaaactatagatgcccaagccccacttcagagctattgagtctgaatctttagggatgaaaccccagcttgtgtattaaaaaacaaacaaacaaacaaaaaaacagcatggatacttttgatatccaggtttggccctaaatgtattaaccaattaatttggatcattacctcaataatcttttccattcacttttaatcctttcttgactataatatgaatttctacacacacacacacacacacacacacacacacatccttaactgctttcctaggtgctggcacactccccctcttataggtggaaggttgatgggcacacaggcatcgcatccacctactatggctcattcagctgaaacaggatatcttttgccttaactgctcagttctttgcaaatctgaacaaacggagggtgtaaacggatgtcagcaatcagtatgttttgctcccagtgttcttcccatctgtacgcccacctgtagagctgttgtgaaactgcctcttaggattgcaatggtggaaactcctgtcctgctttatttgctgaaatgcttcttagaaggatctggtggttctcaattggaattagaaatgaagatcccaatggaagacagggaactgatgggccaaacagacatccagccatttataaagcaagatcaacatggtagggttatggcactgacacacagaagaagtttctgattaggatagtttgggaaggctgaggtcaaggtcttcttccagcatcaggttttctctgattcagaaggaaagaagccaaagggctcatattgggtttcctatccagcaaattgaccttgtatttagtgaaaattcctccaaaatcatggcagtagtttgactcttagtcttggttctcactctcctaagttttgatctttttcttttgcaggaaatggtatcagggactacttaacttgatcactttttaacccaagagaaaaagaccttgagggccatctgtcttattaaaaattatgaacaaaggaacagaaataacattttaattaatacttctcccattcctctcatttatacattttattacattaaaatctatataatcaaatttggttttaaaatattgacaaaataccagtatatagatattaccttgctattttagaaatatattgggtatggtagctattactttaatactattctatatgtttatatatagaatcacatgtaaaatttttctctctttcctacagaattggtgatatgggactaaagcaatttcttgatggtcctgcaagcatgaggataagagagctaaatttaagcaactgtgtgcggctaagtgatgcctctgttatgaaactatctgagcggtatgataaaacagtcttttacatcatatcattagtattgtatatttgataataggagacatgagacacctaaaagcaaagatttcatgacatttgggggaacatcagagatgcccagaagctggttaaatgttcagtgaaaccatgtgaaagac

SEQ ID NO: 38980 - DNA, 2300 bp, Homo sapien
tgcaccaccatgcctggccaattttttgcatttctggtagagacgtgggtcccaccatgttgcctaggctggtcttgaactcctggcctcaagtaatccttctgcctcagcctcccaaaatgccaggactacaggcatgagccaccgcgcccagcctaaaagcatacaaaggtgttttttctctgtagatagttgttaacttggtgtccttgggtggggaacaatgggtggagccttctgttccaccatcttgcttcacctcctccaattatgtgtgttttgtatgcatatctgggcagtaggtcatagatttgaagcctctcatttcaactttactgtgtctgagaatatttatccttaggacacttgtgtatacatttgtgtgttgttgctacaataattgcctcatggtaactgagaaattgataagaagaaggaggtaagtcataccatgaggagggtttaagcacaacggcgagttagaaaagtactgaaggatttatagttaaggggcaggcttatcagtgggatatgtcaagcacattaagttgttcctgagtttgcaaatatttttctctgtgattgggccattggcatttgctaattggtgcccatcaaagttaggcttctacccacccacaggaactgagagatatcttctttgatgattatatatcaaagggatagatcccaggtccttgaggaagactttcctgagttgtaaaactgtcaagaagcttttgttaaaaagacatctcaaagtaggcagagaaagaacttataattccaagttttctaaaacaaatgctctaagaaacaagaaaacaagaagtcagggcctagagtcagtaagaagctggtctaaaattcagtcatgctgaggagaacgtcaatgccatctcagtcataaagttatggtagatgttgatgtttaaaaagctacacatcagcagatcagttttaaacaaatatgaatgttagatgtttacagccctaacttagaatcctcccctccttgccccaactccctccagaccacccagggcatcaggataccacaagatgtcagtggaggtgactaggtaagaattctatccattcaagaaccctgggggagaaacccatgctgcccctgtatttcccactatcccagggaactctgcctgccccagtatctagcaacagatgcttaaaactgtactagtaccatgtgctttcatcagctgtgcaaacttgggcaacttattcaaccaccctgagccttggtctcttcatttgtaaataagcatagtaaatacataccaccacagcactgtatcagaagtaaatctgatctgtgtatagcactcaacacaatgcttggcatatggtaatgactcaagaaatgataactatcaatatttcagccagttctcacctatgctattattctcatagaataatgaacatactatgacaccaaattaataaaatacacagagaggcagaagaaaataagttaaaagaattatggcttaaatcttttgaaattaaagcagaagaaactatcaatgaggcagtagctacatccaaagcgccatgccctatcctctgcaacttgatccaattttctgcccaactttccaagtcctgttccctcaaacttaaaatattttcccacgcagatctcaaatcttcatgttattcagcccaacggtgtaatgcaattttttaaattatgagtttttgttgtattttcttttcctatttatcacttatagcattttacccccccccccccaaaaaaaaacccatgtgggagttaattgacttttcaggaatcccatgcaaaattctccctcaaaacattctctttgtttgtgtcttggtagcaactccagagttttcaggacttggactctgctttagacttgtgctcagactgtctccacaaaagtggtccgtttcctcatccaatgagctctgcctgtttgtctgtgtgacactccagtggaaggaagccaagagcctataatagcgatcctggggaaaatttcagcagctggggccatgtaatttaaaacctctgaaaagtgtgctgcggtccgtgcacagcattagtataacgtgagggctgaatgcagcccattctctggagaacttcctcacacaccgcagcaaagagaagactgaaagacaaacctgggtgcagccagagaggtccagatagatgagcttgtggcatccattccccaagttcaggtactgtaagcctttgtctgtgaaccgtctgcaataagccaaactaagattctgtaagt

SEQ ID NO: 38981 - DNA, 2300 bp, Homo sapien
tgcagtcgcatgaccatggcttactgcagccgcagcctcccaggctcaaacaattctcccgtctcagcctctagagtagctaggactataggtgtgcaccaccatatatgactaatttttaaatttttagttgaaatggggtttcactatgttgcccaggctagtcttgaactcctgggctcaagcaagcctcccacctcagcctcctaaagtgctggaattataggtgtgagccactgtgcctggcgagagatctttttgataccaggctagataccttagtttttcttttgccagtatggttgatttcttttcttttcttttcttttttcttttctttccttttcttttcttttcttttccctcccctcccctcccctcccctcccctctcctccctttcctttcccttcccctttttggacagagtcttgctctattgcccaggctggagtgcagtggtccaatctcagctcactgcaacctccacctcctgggttcaagcagttctcctgcctcagcctcccgagtagctgggattacagacgtgtgcaataatttttgtatttttagtagagacagggtttcaccatgttggccaggctggtcttgaactcctgacctcaagcaatccacctgcctcgaccttccaaagtgctgggattacaggcgtgatttctttctgtttcataatcctggatttctctctctctctcttttcttttttttttctgactcagtttcaattacagtcacgcattgcttaatgatggggataccttttgagaagtgtgtcattaggtgatttttgtcattgtgtgaacatcatagagtgctacacaaacctagatggtataatccagtacacacttgggttgtatggtatagcctattactcctagactacaggcctgtacagcatgttactgtactaaatattgtaggtaattgtagcacaatgataagtatatatttaaacatagaaaatgtacagtaaaaatatggtaaaaaaattaaaattggcacacctatatagggcacttatcaatggaggactagaagttgctctgaatgagtcagtgagtgagtgttgagtgaatgtgaaggcctaggatattactgtacacaactacagatagagtactacactataaacagtgtacacttaggttacactaaatttatttaaaaattaagtacttgtgctatgatattacaatggctatgatgtcactagacaatagaaatttttcagctccattataatcttatgggactgctgtcatacatgcatcccatcattgactgaaatatcattatgcagagcatgactgtaccagctttgtacaggcctggtgactttcttatgtctctgcatggccagtaaaatctgaacccattttattatgaaaagcagcaaccatctttattgttcctccctcccaagcaactatagcatgaagcaccttattatcagtctgggtttataaggattgggtccttgcatatttgttttactttcttgacaactgaattatgtttttaaaaaatgtttcttttagcatttactgatgttttgtaccagcaggatttcctgattttttggtctaccacatttccagaagtagaagccaaaatgtgtttattgctctttcccagaaatccttttttttcttctctgaggaatcctatatctttagaaggaatgtagtttagttcagcagacagtattgattgccttctatgtaccaatgactatttatggaaatcattagttttctagcagaattctatcttcattcaaaaaataaagcaaatatgcttatctttctcaccatccttctgccactatcaattaaaaggattacattatataaaaggagtcagcaggtaagttccagtactttagataaaactcctatcttcagataaaattctagcacttaaactcttgctatttgcaaagtatggattaccttattattactaatgcgtgtgtgtgtgcacgcacatgtgtgcacacacacagacaaaaggtaagtggacaagttacatcaaagttcacatttttcaaagttgtgtatttttctttgtgtttagattttcttctacctcagtttaaaagatgtgataatatgtggtcaagttaatcatgcctggatgttgatgacacaactaaactcactgtggaatgctgtaagtagatactaactgaactatgtctttacactagttcttaaaggagaatggactgctgtgaagccagctgttgtggggacaccttcttccatgctctgtggt

SEQ ID NO: 38982 - DNA, 2300 bp, Homo sapien
cctgtaatcccagcactttgggaggctgaggcaggcagatcacctaaggttgggcgttcgagaccagcctgaccaagatgaagaaaccccctctctactaaaaacacaaaattagccaggcgtggtggcacatgcctgtaatcccagctacttgggaggctgaggcaggagaatcgcttgaacccgggcggaggtggcggtgagccaagattgtgccattgcactccagcctaggcaataagagcgaaactccgtctcaaaaaaaaaaaaaaaaagacattttttgccaggcatggtagtacacctgtagtcccagctacttgagaggctgaggcaagattacctgagcccaagaattgaaggccagcctgggtaacatagcaagactctgtctctaaaaaatttaaggccaggcacagtggctcatgcccgtaatcccagcactttggaaagccaaggtgggcggatcacctgaggtcagaagttcgagaccagcctggccaacatggcaaaaccccatctctactaaaaatacaaaaattagctgggtgtggtggcatgcacctgtaatcccagctacttgggaggctaaggcaggaaaatcgcttgaaccagggaggcagaggttgcagtgagccaagattgtgccactgcattccagcctgggagacagagtgagagtccatctcaaaaaaaaaaaaaaaaatttaaagacactttgagacatagactgagagtttgcttccaatggacccttcacaaaggaacttctaaagaacactgaaatcagaagaaaggcatgaaatgcaaataataacaatgggcaaaaaatctaataagtatatgggtaaagccattaactttataaaacagtatcatgatgaaaacgtgggggtagaacaataagatggaacaaaaacactagataataataacactctaacaccagagagagtaatcaagagttagtgttctaaatttcaattattcttcaagaagaaagtataaatattaatttactttaggccttattaataaatgtacacattaaaaatatttgagtaaccagtaaaatagtagaaatagaatggttatcttctacaacatgttaaaaatatttaagagtaaccagtaaaatcatagaaatagaatgtatatcatctaaaacatgaaagtagaaaaaagggggtagatttaaatactcaataaatagtacactacttggtaatgggtgcgctaaaatctgacttcaccactataccattcatcaatgtaaccaaaaaccacatctatcccagaagctattgaaattactttaaacgtttttattttttaaaaattcaataaagtcaggaaaggggaaaaataaaacatataaaaagataataaataataaataaaaagataataaatagtataaaatgaaattagaaaaatgaacccaagtatatcaataatcataataaatttaacaaaatgtattggttagaagacaaaaattttttattcctaaaaatgctttttgctttaatgtttttcccccaatattaatgtagctatctattttcttttcttagttttatttttaattgacaaataataattaaaatgcatttatggttaaaatgtgatgttttgatttatgtttataatgtggaatgattaaatcaggttaataattaagaaatcaccacctcacataattatcatttttgtgtgtgaagaaaacatttaaaatctacactttcaggcacggaaagacaaattctccatgatttcacttctatgtgaaattttaaaatgttggacttacggaagtaacgagtaaaatgatggttatcagccttcctttcatttgtgttcattttgtttttgaaagattctccccaacgcccgaaagcttgaaggaatgagtaactcctctcttctcaggcccagtcccaaggcacaaggccacttgtaccagcagcgtgagtcagcaagatagcagaagcaggaagagagccggccagaagacacctaccctggccggaagacacgtacccctgaagatcgagaaacaggccatctgggtaccacatagcagttacatcagactgggacaattcctgtttacggaagactataaaaccctgccccctactcatttggtgctgacgccattttaggccttagcctgcctgcacccaggcgctcattaaaacagcaggttgctccacactgcctcgtgttgtctgttggcacactctcaagagtttgaacggatacaagaatctttcatctggtgccgaaacccggga

SEQ ID NO: 38983 - DNA, 2300 bp, Homo sapien
gtccatgtatcagtatgatatccttttctcatttcccactgagtccttagagtccttggcccatcacttcagatactcaggagcttagctccctaacctactgcctttccattctattaatatatgcctggcaaattcctatcccagacgaagtcaacttggttatctctgtacctacatctgatttactgactgctacttgagaaaatcacacaaccgggaagatgggtaccattctccctacatattttcaagcacaattgtatagaggtacaacacaaaactcactgtaataaattaaaacaatacagctatggacagagtaaaaagttagaattctccatcttttcccccaaaaccattccacaagacatctgttattaacagtttggcataggttctatgcatgcactattgtcttaaagctagatatatacacatatatgtacataaacacatatacaacatatatgaaatcaaatggacagctagagcagaatggacagttgctaagcaacttgcactttttcttttttacttaataatatgtgttgggagccagccatgtggtgtatgcctgtagtcctagctacttgggaggatgaggtgggaggatcaattgagcccaggagtttgaggctgcagtgagctaggatggagccactacaccctagcctgggtggcagaccaacaccccgtgtctcaataataatgatgataataataatatgtcttggaggacatttcttcttagtaggtacagatatactttattctacataatgcctcattcgcttagtcactctaggtcatttactatttttactatgaaacaaagttataatgaatatccttgtacatcctcctgaacacatgtgcaagtatttctctaaagtagatccctagaagtagaaatgcttggttaaagggtacatgtatttaacatcttaataaatatttctcaattaccatccaaaaaagagacgggtggggggtctctaccaaattgccctcccaaccgcctaggagcgttactaccctcaggtaggacctcctctttctttccctagacatctctctccctcattctccacataacgtatctttgctcgaacctcctactgcaccaacatccccatccccactcaaacacgcacattcttggtaaatatctcaccaactatttgtagagaaaaaaagaggtcaacaaaggcaaatgttctcagcttcctacccccaaacctacaaaacctaatgtctatccccttcctgtcttccttccctactcttataacggcagtaggagggcagtccttcctgttgtctaaaggcaatcctggttgagagggtccttaccttcacaaagggctgactacactgaccaaaggtctcagcttccactcttccctccgctaacctccatctattttctgccctcacggctccatggaaacctcaggctcaccttgggcagaatccagctccttatcttaggtgactagtgcctactccctacttctgacaacattcttcataatgccagtctgctgattttcctcctcaggctctctggcacttctttctcactcctccactcctcaggtacttcttgtccaaaccttaaaatctgagtttggggtttccgatctgggccttgtgctcattccccctgggagatgtcacccattccccacgtgcagccaccatcaccctctgttttctctctaatcagcgtcttcagccctgatcgcctacaagtccgaatttgacttcactttctcgcattctgccccgccttccctccactcctccccaatcccgaaacctagtccctcctccgggaagtctttcctgactcctcccccttctaactccccaccgacggtctgtgtccgctgccacgcgtgtccagtacctcgcagacctgaggaatgtagttctccttgaagtagttcttcagcctcgggttggcattgcgtagcgaggccatggcccaaggcctgacggagaagctgcgatagtaccctccccgcgctgggactaggggccgggcgcgtgcgggcgttgtcccggcaaccagggggcggggctgggcgtggcaccgccccgcgctccgctgccaggggcgggagggaggaatggttgcttcacgccccgggggaagagacgggaagctcggctctgggttgcgggccccggcgtctccgcgtggggcgcaccgtccgacccccccctcccggtgtgcagcgccccgcaccgccccgcctcgcctgggagaagccgccgggacgcgccgggct

SEQ ID NO: 38984 - DNA, 2300 bp, Homo sapien
gagatggggcttccccatgttggtcaagctggtcttgaactcctgaccacatgatccgcctgccttggcctcccagagtgctgggattacaggtgtgagccaccacacccagcctgtaaatctttttaaaagtgaaataagcatttggccagttttacagcccaagaaagactttcttaaaagctttggagcctactgttcgaaagcgtactctttgaaacctactcttccaggaagatagatccccaatctccccaactctgtgagtttttagcctgggcacctggttccacatcataaagatatttttatttttcctctggataaaggcaattagataacaaccaccccaattaccagtaaattcaggataaactacatgtagcaaatggtactgtcaagtcctcttacctaaggacaaattattttttatcttgagaacacgtatgtaatatgaaatcggttctatctgtccagctacatttaaaggaattagaattcttcctgctatcccattagcaaattgcccgtgatgtgtgaggcaatttagtttgtgcttattcaacaatgaagctgtttagctctcttctacaattgtggacaggagtttcttggatggcagatatgatattttaaattatttccctaacagcttccatgatgtgaaacatgcctttggagggttttaatgtaccgatcaacttttggacagaaaccgaatcatgcatttgtccgctgggagggtgtgtctcgcgcagacaactgttcccatttccaaaacacacaccaggctgcgaggtcttggaccactgtgactcccaggtacctcccgtctgaggccgggccgagcgcccgcacaactgaccctctgacgtcccttcttccagggcacctgcaagcagagattgacctatggctctgggcccctcaacagcccttccacaatcgggagaatccctttagttacacaaaggcccggagcaagctttaaaatgagaggccatcaacaggtttttaagaaatctaatcctccgctgtgacgcggagctcaggcaggaaagccagggcaagttttcataccagtatagtcagcaaaggggcggcgggggcggcgcagcaccctgcactcacacaagtactgcctctccctctagctcggctcctcattttaccccgagcacacgcaagccaccaccccggcctggggagcccccctgcccagtccccgcccacctgccggaaaccccggggtcccacctgcggacttcgaagagcgtatcccgagctcgcggtcgccccgccgccgaccccgggtcagcctgtaaatgcagtagcaggcgcccgcgccgagcagcaggcccgccgccacccagcccgcgccccgggggccacccatgctgccgccgcggcagagccgcagcgccgggccagggcaggaggctcgcgggggccagcgcggaggtctccagcgcacgcgggcctagccgccacagcaaacgccacctgacctggatgtggagaaaggaaatggggtctgagctccgcctcccggaaacggcctagctcaaagcctataaccgcccactccagcccggcgcgtcccggcggcttctcccaggcgaggcggggcggtgcggggcgctgcacaccgggaggggggggtcggacggtgcgccccacgcggagacgccggggcccgcaacccagagccgagcttcccgtctcttcccccggggcgtgaagcaaccattcctccctcccgcccctggcagcggagcgcggggcggtgccacgcccagccccgccccctggttgccgggacaacgcccgcacgcgcccggcccctagtcccagcgcggggagggtactatcgcagcttctccgtcaggccttgggccatggcctcgctacgcaatgccaacccgaggctgaagaactacttcaaggagaactacattcctcaggtctgcgaggtactggacacgcgtggcagcggacacagaccgtcggtggggagttagaagggggaggagtcaggaaagacttcccggaggagggactaggtttcgggattggggaggagtggagggaaggcggggcagaatgcgagaaagtgaagtcaaattcggacttgtaggcgatcagggctgaagacgctgattagagagaaaacagagggtgatggtggctgcacgtggggaatgggtgacatctcccagggggaatgagcacaaggcccagatcggaaaccccaaactcagattttaaggtttggacaagaagtacctgaggagtggagg

SEQ ID NO: 38985 - DNA, 2300 bp, Homo sapien
ccgagcctgggtgacagagggagtccctgtctgaaaacaaaacaaaactcctttttctgcttctttgatacaaatgtaaatctttttgtttgttttttgttttttgagacagaatcttgctctgtcgcacaagctggagtgcaatggtgcaatcttggcacactgcaacctctgcctcctgggttcaagtgattctcctgcctcagcctcctgagtagctgggattacaggcacccaccgccaagcccggctaatttttgtatttttagtagagatggggcttccccatgttggtcaagctggtcttgaactcctgaccacatgatccgcctgccttggcctcccagagtgctgggattacaggtgtgagccaccacacccagcctgtaaatctttttaaaagtgaaataagcatttggccagttttacagcccaagaaagactttcttaaaagctttggagcctactgttcgaaagcgtactctttgaaacctactcttccaggaagatagatccccaatctccccaactctgtgagtttttagcctgggcacctggttccacatcataaagatatttttatttttcctctggataaaggcaattagataacaaccaccccaattaccagtaaattcaggataaactacatgtagcaaatggtactgtcaagtcctcttacctaaggacaaattattttttatcttgagaacacgtatgtaatatgaaatcggttctatctgtccagctacatttaaaggaattagaattcttcctgctatcccattagcaaattgcccgtgatgtgtgaggcaatttagtttgtgcttattcaacaatgaagctgtttagctctcttctacaattgtggacaggagtttcttggatggcagatatgatattttaaattatttccctaacagcttccatgatgtgaaacatgcctttggagggttttaatgtaccgatcaacttttggacagaaaccgaatcatgcatttgtccgctgggagggtgtgtctcgcgcagacaactgttcccatttccaaaacacacaccaggctgcgaggtcttggaccactgtgactcccaggtacctcccgtctgaggccgggccgagcgcccgcacaactgaccctctgacgtcccttcttccagggcacctgcaagcagagattgacctatggctctgggcccctcaacagcccttccacaatcgggagaatccctttagttacacaaaggcccggagcaagctttaaaatgagaggccatcaacaggtttttaagaaatctaatcctccgctgtgacgcggagctcaggcaggaaagccagggcaagttttcataccagtatagtcagcaaaggggcggcgggggcggcgcagcaccctgcactcacacaagtactgcctctccctctagctcggctcctcattttaccccgagcacacgcaagccaccaccccggcctggggagcccccctgcccagtccccgcccacctgccggaaaccccggggtcccacctgcggacttcgaagagcgtatcccgagctcgcggtcgccccgccgccgaccccgggtcagcctgtaaatgcagtagcaggcgcccgcgccgagcagcaggcccgccgccacccagcccgcgccccgggggccacccatgctgccgccgcggcagagccgcagcgccgggccagggcaggaggctcgcgggggccagcgcggaggtctccagcgcacgcgggcctagccgccacagcaaacgccacctgacctggatgtggagaaaggaaatggggtctgagctccgcctcccggaaacggcctagctcaaagcctataaccgcccactccagcccggcgcgtcccggcggcttctcccaggcgaggcggggcggtgcggggcgctgcacaccgggaggggggggtcggacggtgcgccccacgcggagacgccggggcccgcaacccagagccgagcttcccgtctcttcccccggggcgtgaagcaaccattcctccctcccgcccctggcagcggagcgcggggcggtgccacgcccagccccgccccctggttgccgggacaacgcccgcacgcgcccggcccctagtcccagcgcggggagggtactatcgcagcttctccgtcaggccttgggccatggcctcgctacgcaatgccaacccgaggctgaagaactacttcaaggagaactacattcctcaggtctgcgaggtactggacacgcgtggcagcggacacagaccgtcggtggggagttagaaggggga

SEQ ID NO: 38986 - DNA, 2300 bp, Homo sapien
ccagtggaacaagataacttccagcccctgaacccctggggaaactccttccctctttactgtatgttgttgccactgtaggagaaatctctcctctgcctgactctgcagctgctttacccagaacctcaggaggaactctgagtccagagccaggctgagttcagccaggcaagtctggccttggggctgtatatatctgtctcagacatcgtctgtgttttcatatattttttgactttttaaaagatgacccagaccacaatagtatgttctatttttgttttgttgtgttgtgtttttccattacattgcttagtacagtatttctaggatagaaaatttgctttcttggtctgccttggaacatacctaccaattacaacattgattttccataaaaattgagtttaaagttccaacttgcaaatgaacttttggatagccatccatttgttagtgggaaagtgtgtctgatttaggtattttcttagtaaataaccactaaaatgaatgtttaaatatcgtattttgcttaagtcagggatctcactgtactgtaataaccgtttgggtacaccactgattgataacttaatgcagatagtggaggattaacataaactgtgtgcttgttacatcctcaatgaaaacaaaactaatggtttaaaatgtcctagtgtcaccacaagatggtgcatgtgacgaggaaaaaaaacatgtcttaatatggtttcaaaccaaaatccatatatttgtttaatctgtagttgtactctaactgtatatatatttttttctcatatttaactcccttctacaaagaatagcaacatcagattttaatacaggataccaaatagctattgctgttgctattccctggttgtatacctgccctcattgactattagtgggtcttagattttgacttcatccaggcttatttcgtaagttcaggaccatcctatttcatacctcctgttcctatttttctaattgaaacttcattgacattggagccaggtgtttttttcctaacacttattcctagtgttgctgatagtcagtcaggccagatgagatctgatagtgacctccacggagtgcactaaagaagggtcagaagtctcctttactctttcaaccccagaggccttaatttattaatagcatctctttgaaaaagacaatctctgcatattcaagaaatgttaccagtggacactgctgaggattggaaggggccaaaagcatggtggcttttgtttttaccttgttctcttttgcattacttaaaatttttatcatgaccaagtagtaattttctaaaaataaagaaatatttgataaaaacagtaaaattaagcaaagtattatgtcatcctcaaataaattagtatctacaacatgatcaaagaaattgtgactatacaggatatttgcataaaagaccaaaaagaaaatactaaaacttttctttctcttttttgacacagaatctcactctgttgcccaggctagattgcagtggcatgatctctgctcactgcagccttgagcttccaggctcaaacaatcctcctacctcagcctccctgggactttggtcacatgccaccacgcctggctgatttttgtatttttggtagagacggggttttgccatgttgcccatgttgctcttgaactcctgagctcaagtgatctgcccaccttggcctcccaaagtgctgggaatgcaggcatgcgccaccgcacctggccaaaaataccaacacttaatcgtgatcatttctggttatgtaaatacgggtaaattttctttttctttgtggttttctatttttttgaaagtgctatggtaaacatctgttgcctttgtaataaaaaatttttctaaaataatatccaggttccttcccagctctagtgaagagcacatttgtcccatttccctgagttagtacccccctctatgcttattttagttccaggtatcttgtagaaagtatggtttcacatggcctttgtttttaaaagacttggaaccaacccgaatgtccaacaatgatagactggattaagaaaatgtggcacatatacaccatggaatactatgcagccataaaaaatgatgagttcatgtcctttgtagggacatggacaaaattggaaatcatcattctcagtaaactatcgcaagaacaaaaaaccaaacactgtatattctcactcataggtgggaattgaacaatgagaacacatggacacaggaaggggaacatcacactctgggg

SEQ ID NO: 38987 - DNA, 2300 bp, Homo sapien
aaatttaaatctatttcaggtggaaaggaatatatctatccctttgatttgcactaggatttaaaaaaaatcaagagagaaacaccaaaaaccattttcatctttccctgaatcccaagagtcaggagatatggcagaacagtgctgctctcatttgctgttgaggagaacacagtggctttgttttcagccttctgtaggacccagcaactcctaacagtaaatatctgttgcagatggataaacttctccatgatgtcttctgtaaagtgtggaagctcctgtgctgaatccatgtctgttggtcttcactgtagtgttagttgtcactggcagactaggatgtaaataatgtgaatacagtgttgtttttcctccttgaaactgatggcttggaaggcaaaggatttgcttgtagacagtacactttctcctttatatcaggaataatacgtctttcttctgaaagtgttggttttgtttactgttttgggagaattctatgaaagtagatgatgttctctatgctttcctaagccttgtcttgtttaatcctcacaataccctcacataatggggtaaaatttatatttcacagacaaagaaatagcagctcagagaatttgaacagactttccaaaggcattctaagaactgcaagagctaggattcacacccaagccttctgcctcctgagccctcgctcttcccaaggcattaggcaccctttcattatttccttaatcatttacccattagtctgatcttcttgccaaaccaaacacctcattgttcagttttatgattaaataaaatttcttgaatagtaattggatatttggctcctggtctttaaattttatgtactagtttttgtttatttttgctttagcaggtttttacaaatttgtatcagcaggacatacaaattcttttgtaattggagctttggtttttatttctttaccaattattcagtttctttgatacatatccaggactgtaaaatatctacttttaaaagtaacagtgaggcaggacttatttcccagtctcaattgataaagtgaaaaaactggcagctgggcgcggtggctcacgtctgtgatcccagcactttgggatgtggaggcaggcagatcacaaggtcaggagatcagtaccatcctggctaacatggtgaaaccctggttctactaaaaatacaaaaaattagccgggagaggtggtacgtgcctatagtcccagctacccaggaggttgaagcagaagaatcacttgaacccaggaggcggaggttgcagtgagctgggatcgcggcactgcactctagcctgggcgacagagtgagactcaatctcagaaaaaaaaaaaaagaaaaaaagaaaaaactggcaaaaaccagcagatggtgacagaagtgatccctagctgccctcattgctcattagcctaagactctcccaccatcaccatgacagtttataaatggccatggcaacaacctagaagttactgcccctttccatggcaatgaccaagaagttaccaccccattcctagaaagttctaaataatctgccctttaatttgcattaacccattccctaatttacatataattaaaagtgggtataagtgagtgtaaatacagttaccaacccctcatatgttgccaactctgagtgcacttactgcctataacttagcactgctcctcaaggagcagtatcgtttaaaaaaaattgctggccagcaccactggcttgccgttgaattatatttcgtttgtgaggccaaaaaccctcctgggctaagcctcaattttggggctcgcctcccctgcatcatcagtaagttgtatcttcagatagatccagtaaaatcaaaatatacgtgaaacaaaaatctcactattcagaggggagtttgcttgagacttacttattttatagcaatttgtacaagaaagacttttgcttgttttatttttcagcagaaagtgtaccaaagggagatggttttgcctcctgtgacttaattcctgtgcagaatttgttttgtttttacaatctagccttgacctggccttcagacttggtttctagctcatcctccccaaaactgcatgttttatcccagtggttcttaattctcaacatccatagtcctgcgcagaatcttaaagtttggttaagtgaaacagattttagaatttagtgtatatctcaaaggtcagaattaagaaattgccatgtttcttcaggtggtttatgaaataccagcatgtagacccagaa

SEQ ID NO: 38988 - DNA, 2300 bp, Homo sapien
gcactttgacctcacacacccatctactatgtccaactggtctgtctgcttccctcagccttaaccaataaaggacaaggacttaaaaaaaaagagtgggagtgaggggaacaaagggcatcttttttttttttttttttttgagacagagtcttgctctgtctaccaggctggagtgcagtggtgccatctttgctcactgcaacctccatctctggggttcaagcagttctactgcctcagcctccctagtagctgggattacaggtgagctccactatgcctagctagtttttgtatttttacttgagacagggtttcgccatgttggccaggctggtctcgaactcctgacctcaggtgatcctcctgccttggcctcccaaagtgctggaattacaggcgtgagccactgcgcccagctttttttttttttttggggaaatggggtcttctctgttgcccaggctggagtgtagtggcgtgatcacagctcactgcggccttgatctcccaggctcaatcgatcctcccacctcagcctctggagtagctgggaccacaagggcgggccatcaaggctggctacttttttttttttttaattattatttgtagagatgaagtctcgctatgttgcccaagttggtctccaactcctgggctctaaggattctcctgccttgccctcccaaagtgccgggattacttctccgttgcttagtcaagaacactatgaagaacttttgagtagtaacttcaacttaccctttgggtttgtatgtatgctgttacttttttttttttcttctgttgcacaaaggtattattcaccttatgcagtttcagctccacccaggtgcaagcagctcttaatcacccttaagttcagcagccactctaagctagcctgaggagataaagtccacacttgacatacagttctttacattcctccaatgtcacacaggcacattcactttcaaaatgcagaatagtttggtctgcatttttctgccagtcttatctgcatttagaacctgtggtggtggtttcttttttgccaagataaccccagggacaagcttttttttttttttttgaccctggcacaccccaggacttttataatctttttgcccaacaacccattgttgaattttacttcgacatgcctgtactttacttcttgaaacaactaatttcattctgcagtttaaaaagcaaatccagtaagaaactcagaatcacaatcgtatgctctttcatagttatcctagcgttaaaaaagatgcaaatttagatgagaaccgtgtgtaccagggggctgtgacatcattttaaaagtaaacgatcacacagtgaacaatgccgtgctcccattaatattcaatacgtactgtacaacatttcaaattagagtttagtttcttcgctaccaggatcctagcgccataggctgtaagtattcaaatgcttctcgactgtgattgagttggctatgacagtccgtcaatgggtctgcaggatcccatttagttttagcaactgtggctggtgtccaggaatgcgttcatgcgatctgaaagtaagcctctggcttaggacagcggggggaaccaatttgatcttaggagggtccctgcagagtgtttgagtcgcgaggcgggccggggcaggccgcgtgctcccaggcgcttcctttaccaagatggcttcggcgccccggcccacaggggcggccatcttggtaagggctggagaggcagcctgaaggaggccaccgctggccctgctgtcagattcgaaggtcataataagggagtgacccggcgacgactcgccccaacgatggcgaggcggcgagagctgaagcgctgcctgcagctgctggcgtcctcggcggagccagcgcggcgggctcgggttaggaagaacccgagcgcctgccgcggtcgcccctcccgctacgcggcggcgctttgcgcggggactctgtggccggaagccgcggaactgaggcggcgcgcgctcccggccaccccaagcgcgaggtgagtccgcacccccgcgctcgcaccccgccgctctggccgcgcgcccgcggcccgggatcccgagtgtccggagctccgtggtttctgttggacctcgcgggaggcggttttctcccgcctgctgtgctctgtgacctctctgctgcctcctccacggtctctgggcggagcaatccacactgctgagcctggggtggtttggaattcttcggcgaagtggagcgggctgagagtgggtttccc

SEQ ID NO: 38989 - DNA, 2300 bp, Homo sapien
ctttctacttttcatttttcatgatatttctctttattttcagttatcttgagaagtcagcacatcgtatatttggttcactgtagttttttgttttcttagtgggatgtctaaatacattggatttatctgttctataaactttgttattcttacatcaataaagtattactggctaaggctataatcatttgtgtaattttaattcattttactttattttctcccagatttgcctgagtgatcttatagcagccggaatcttaaggtatacagattttgatactttaaaatacacctgttctcccgaatttgacttcatggaaaaagcggtatgaatgtttcttttttccttctctactaatatgagtttttgctctaggtttttttaaaatctgaaactcaaaatttttgctcagaaacagtcaacttattttatatttttttactgtaacttttgctaatctaccttcctcacttgtttttttgtctgttgaaaaaaaaaagatagcctctatcttatagagttattgatgatggttaaatgagataatctgagaagagtgtttaacatactatatgacccataataattactattattccaaatcaattacttttaataatctaggccacttggaaatatgggaccattcaggaaaaagtctaaattcttgtttctgtttttaagaaattcagttttattacagttaacaccccaaatattataacatttttaacaaggtgttaccaagaaaggtatgctactgatgagttttaatgaacatataaaaattcattttaaattatacaaatgcaaggtattattctttttaaaaagttcatgttataaagctttaaaatataggctgggcgtggtggttcatccctgtaatcccagcacttagggatgctgaggcgggtagatcacttgaggtcaggagtttgagaccagcctggccaacatggtggtaactccatctctactaaaaatacaaaaattaaccaggcatgttggtgcatgcctgtagtcccagcctgagtaggaggctgagacaggagaattgcttgaaccctggaggcggagattgcagtgagctgagatcgcatcattgcactccagcctgggtgacagagtgagactctgtatcaaaaaaaaagaaaaaaaaattggcctctttgtagaatcatggaacacaagatcaggaagggctcttagagaccatgccatatagttctttcatttgcagataaagaaaagcttaaaaggtttgcctaaagcacacacaagccaagatcaggacatggattctaatggattctggaactctcaatccagggctctttcctctatttgtagcttaattttcttcatagaacataacaaagttgctactggattgattattccttgtgtaatcattatgaattctgaattagtggtaaataataaaattttacattcttctcttatccatccaaccagtcatcccattcattcaaaaactattattgaccactagttatccatgaggcggtttgctatagcacaacaaagaggaaaatgaactggtttcttgcttttaagaaatgtataatttagttacatggtaaattactccttatcacaataacaggtcatcagaattagttagccaatgttatttctgtacttatgcatagttttagtcattaactttggttagctttctttcttgttagctctagtttcactaatgaaaataatggagctgtgtagtacagaaagttacaatgtaggacccagggatcggtaaacacacattttaaaacttagtattatgtaaataaaaaaaagaaaagaaaaaatagatatagcaattctagttttattaaaataataaatttttcattaaatttttggaatactttttataactatttttataattttaattatttcattaaggcatggaagacaataaatatatattctgctgatgacaaagaaatttaaccttttacttttaaggaatgttatcatggcacttagtttgacatagatgtttactaatttaatgtaaaaattgtaactattttgaataatttggtatatttcagactctgctgatatacacaaagacattattgcttccagttgttatggtgattacatgttttatctttaaaaaggtatttttaaacaaattattatttgtttttggcatcaatataaggactataataatgcaaattgctcagaattccatgttatttttaggatgaactcttcctctctctaaaagtttgctttttattta

SEQ ID NO: 38990 - DNA, 2300 bp, Homo sapien
gttttttctttatttcttcaaattcttaacaacatgacttactatattttatgaataaatttttagacttgtttgtaacaacattcaactcttgggatataaactaaatctattttccttacattttttactgattccctcagtaaaaatagaattgatgaggatgtttgaggggcaattatacttttttgtgtacaatgtaaaggattggagaaaatgcctcataaaatgaaagactttgcaatgattcaatcagctagaaggtgtgaccctgtctgagtggtgaaaatgatcacctaattatggtattagttacattcccaataagtgataggttagtgtttggcacttgggacacagagatgaaccagctagatgtggggccttaccctcatagagtttatgctgtaagggggctgttagcagttacaactgtgatggatattacaaataagaaaataaggttaccgacactaggagtaagagaggataagtattttaagaatagggaataatatattcaaatatcctgaagcaagagagaactgaaagaaggctagaaatcctagaagcgatggagaagaaaaatgatgtgaaatggtgctgggaatataagcaaggatgagatcatgaaaggggtgcactggtgtaggattttatactttatccattgaagaattttaacagagttccattttaaaacattatttagtcaatggtatggaaaaaatattagtaaaggaacaaaagtaggttaagggaggccaggtaggagacaattatattctcagcaagtgattgcaggaaagataatgtggaaatgcctgggtgtgagagagattttggaagcagaatggacaagacttggtaattgtttggtaagagaggggaaggtgagtgaagaatcatgtgaaacacagtttggtttctagcttaagtaactgagctcctttgagtaataggaaacatttgaacagcagcaggtttgtattgttatgtttcattgtgtatgcatgaatttgaggtacttgagagacctcagagtggggacatcaagtggctatctgggtataagaataaggagaaagttctggattaaatgtagagttggagtcatctgtatatagatcattggagccatggatgtggaagaatttgcttatggaggatgtgcagatggagaaatgaagggggcatatgacagagcctaaggtggtccaatattaaagagtggtacataaaacaagaggagttactagaactgactgaaaggagcgatcagagaggcagggggaatcagaaggccagctttcagaccttggctccagccagttaaagtgaaataacctttgacaagttgagtatcttatgttctgttttctcaaccataagaaaagtatttttataccagctaatatcataaacttgttctgagaaaaatgtgggatgattgttaagtacatattgccacacacacacacacacgatcttctatatggaatatactaagatcctagctatacataataatggatcaaatgactggatcatttcatatagactaaagctgtaccctaaggtcaaaaccatatcttaactcttcctagaacgtagcaaaagataaaaataatgtaatggattttcttttatattcattaagtggttctacagacagttccagacactgaacaccagcagcatcacctaaataaatgtgaatccccaacaaatcattacagtataatagtaattcattagaggaaagtataaatgcaattataaaaagtataaagtataagtgtaactaatcgctcattaagggtgagcttacatatgtgtatgtgtatatatatacacacacacatatatatgtgtctgcaagcacacacacacacaaactcttataagggtaaagaattaaatacagcagcaatctggaaagcaaatgctttcagcaaattcatgagctcttgattgcaaagcactgagataattatgcccacttgctttggagtcatatattcattaaacactgattatctgtattttttcaaaggattgcgagatcctgcttgcttttatgttggtgtaatctttattttaaatggactaatgatgggattgttcttcatatatggaacatacctaaggtaagactactactaaattaagagacctttcagtgggcttttacagactggctgatatttgttgattaaatgaaaaggaaaattaatgagattagattcatatcaggaaagtttgtggatttacttgatttttcagaagcttaaccaata

SEQ ID NO: 38991 - DNA, 2300 bp, Homo sapien
gatactatctcacaccagttagaatggcgatcattaaaaagtcaggaaacaacaggtgctggagaggatgtggagaaataggaacacttttacactattggtgggactgtaaactagttcaaccattgtggaagtcagtgtggcgattcctcagggatctagaagtagaaataccatttgacccagccatcccattactgggtatatgcccaaaggattataaatcatgctgctataaagacacatgcacacatatgtttattgcggcacaattcacaatagcaaagacttggaaccaacccaaatgtccatcaatgatagactggattaagaaaatgtggcacatatacaccatggaatactctgcagccataaaaaatgatgagttcatgtcctttgtagggacatggatgaagctggaaaccagcattctcagcaaagtgtcacaaggacaaaaaatcaaacaccgcatgttctcactcacaggtgggaattgaacaatgagaacacttggacacaggaaggggaacatcacacaccggggcctgtcgtggggtggggggagcggggagggatagcattaggagatatacctaatgtaaatgttgagttaatgggtgcagcacaccaacatggcacatgtatacatatgtaacaaacctgcacgttgtgcacgtgtaccctagaacttaaagtataataaaaacatatatatataaaagctaaatcatgaggcatctctgtttcaaagatgataagataatgcaagaatatattgcataattatatgggctggagaaaaagcataattaatatgggctggagaaatgggctggggcttggaaggtgacagcattcagatgggcagggagaaaaggatgtaaaagccaagggatggcttttccacatgaataaaggaattcagcagttatgatgtctcaggctgtggacttcacctgaaatgactgagatggaagattttgtgcccgaggaagtgggaaattaaagttgaaaaggtatattgggcaaatattgaaggcattggtgagcaagcctaggacttgacttgtgggccacgaacatttttgtgctgtgttgcatcaggaaaaattaacctggccacaatgagccatgctttagactggtcagttaggatatgggagttcaatttgatccatcatcaaacagatggaaagtgaagcggtgtgggctccagcatgtggcccgtgacagaggacatggaaaatgtcagtggccccagtgcatctgtgccagccgctttggcctcttgtagggctgtgcggtgactgggagctaagcgctcccctcttagttggtcctggctggtgctgaaagcgcttgagcacaccgctcctagggctgatgacttctgaggaaccttattggaaaagcattttcccctaagattcagtaaacgctgtcccgtgccaaggaaggggcgtcaacctgaggctctgggatcagacccaccagactcacgccggctctgccacgtgttgcccgcagtctcggcccgttccctccgtgttggcaacgggcactgactgtccgatacctcagcgatcgtaggagagcagagacgttcctaatgcccggagcaccaccggcgggccggcggttccgttggcttccctgacacacttcctacagtcatttctttcagctgagatcttccccttcaatacctcgttaattaacgtgtaaccttttggttaaaatgtcagagctaagactaaacgcgaagaaaagaatgaaaccacgggaagttcttcagacttagtcgccagcaaggttatggcccgaagcggtgcaggggcggcgcgcggggaagctactggcggagctgtgcgcactgcgggtgctgcaggcgctggggagagtgtggagaggctgcgtggagctgtgcgctcggggtgggggctgcactcccaatgaagcgcgtgaagggcaagcggtgatgggttctgcgccagtggggctgggagcctgtcgggggctgtacgtgaggctgcgcgcaaggtgagaactgcgcatgtgggcttaggaactgcgcgcaccgaagtctgcaggcgctggggagggtgtggggggctgtgcgtggggctgccctcaccggaagctgcacgctcggggaagcgcggaggcgggggtgctgcgcgcgctggggagcacgtggggggacacgcagggactgcccgcgcgaatggcttccaacgcatgcgccccaccctacatttcacagtcgccatgacgaccaggaggtccgctagtcaacggct

SEQ ID NO: 38992 - DNA, 2300 bp, Homo sapien
attattgccatctgctggttacatagtttaattgcattttttaaaattcccaattgttttactaaaagacaaaggaaaaactgaggcaagttttaggtatccataaccggattagagatctctatgtaagacagataatttgcagccaggtgcagtggctcatacctgtaatcccaatactttgggaggcagaggcggcatgaatgcttgaggctaggagttttagaccagcctgggcaacatagtgataccccatctctacaaaaataaacaaattagctgtgtgtggtggcctgcacctgtagtccttgctactcaggaggctgaggcaggaggataccttgagcccaggagttcaaggtttcagtgagcaccatcacactttagcctgtgtgacagtgagaccctatcttgagaaaaaaaaaaaaagctaaataatatgcagccgacacatgaaaaaatgctcatcatcactggccattagagaaatgcaaatcaaaaccacaatgagatactatctcacaccagttagaatggcgatcattaaaaagtcaggaaacaacaggtgctggagaggatgtggagaaataggaacacttttacactattggtgggactgtaaactagttcaaccattgtggaagtcagtgtggcgattcctcagggatctagaagtagaaataccatttgacccagccatcccattactgggtatatgcccaaaggattataaatcatgctgctataaagacacatgcacacatatgtttattgcggcacaattcacaatagcaaagacttggaaccaacccaaatgtccatcaatgatagactggattaagaaaatgtggcacatatacaccatggaatactctgcagccataaaaaatgatgagttcatgtcctttgtagggacatggatgaagctggaaaccagcattctcagcaaagtgtcacaaggacaaaaaatcaaacaccgcatgttctcactcacaggtgggaattgaacaatgagaacacttggacacaggaaggggaacatcacacaccggggcctgtcgtggggtggggggagcggggagggatagcattaggagatatacctaatgtaaatgttgagttaatgggtgcagcacaccaacatggcacatgtatacatatgtaacaaacctgcacgttgtgcacgtgtaccctagaacttaaagtataataaaaacatatatatataaaagctaaatcatgaggcatctctgtttcaaagatgataagataatgcaagaatatattgcataattatatgggctggagaaaaagcataattaatatgggctggagaaatgggctggggcttggaaggtgacagcattcagatgggcagggagaaaaggatgtaaaagccaagggatggcttttccacatgaataaaggaattcagcagttatgatgtctcaggctgtggacttcacctgaaatgactgagatggaagattttgtgcccgaggaagtgggaaattaaagttgaaaaggtatattgggcaaatattgaaggcattggtgagcaagcctaggacttgacttgtgggccacgaacatttttgtgctgtgttgcatcaggaaaaattaacctggccacaatgagccatgctttagactggtcagttaggatatgggagttcaatttgatccatcatcaaacagatggaaagtgaagcggtgtgggctccagcatgtggcccgtgacagaggacatggaaaatgtcagtggccccagtgcatctgtgccagccgctttggcctcttgtagggctgtgcggtgactgggagctaagcgctcccctcttagttggtcctggctggtgctgaaagcgcttgagcacaccgctcctagggctgatgacttctgaggaaccttattggaaaagcattttcccctaagattcagtaaacgctgtcccgtgccaaggaaggggcgtcaacctgaggctctgggatcagacccaccagactcacgccggctctgccacgtgttgcccgcagtctcggcccgttccctccgtgttggcaacgggcactgactgtccgatacctcagcgatcgtaggagagcagagacgttcctaatgcccggagcaccaccggcgggccggcggttccgttggcttccctgacacacttcctacagtcatttctttcagctgagatcttccccttcaatacctcgttaattaacgtgtaaccttttggttaaaatgtcagagctaagactaaacgcgaagaaaagaatgaaaccacgggaagttc

SEQ ID NO: 38993 - DNA, 2300 bp, Homo sapien
ttgctagaaccccggaggcggaggttgcagtgagctgagattgcaccattgcactccagcctgggcaacaagagagaaactccgtctcaaaaaaaaaaaaaagaaaaaaagttatggatactgttgtgggtgtagggctattttgggagtagtcaaattctttgatttcttggctctactctggtgcacttaatttctgtaggctttatgttctaagatattgactgtaaataatgactaataaattaataccatgaagtatattagaattgaatacaaattcttgctaaaacttcctaggtgcttcctgtgattatacctacatgtttttgtatatatgtatgcatgtttgtatttatttttggttaacacacatttgttttagaaacatgagagaataaccttggtcgtcctttattacattacatcatgagtcttgtggactgaacctgcgaagcatagcagccgggtaggtggagggagatgagtctggaaagataaatgggagtcagatcatgaagggccccacctgccatgctaaggaccctttactttattgtgaccaagggctccctgatggattcttcataatgggactgccgtaacagtttcatttgtaaaagatcctataggtagtaatgtgaaaaaactgacaatgggcctggagtagattgaagaggcaggaaaggggtgtatcaattgaatgtggaagatggaaaaagagaggagcttctgggtggtttggagttttgggcaaatgtaggtatgattggctgtttggcattgcaaatatgggaagagattcaggggacacagtgaattcccttttggacaagttgatattgagtttccaatggggtattcaagtgtagtttcctagtagttgatggttaagtgggctggagctcaagagaaaggcctgggttgggcagacaggtcttgaagtggagggaaaaacccagagggagaatgttcagtagaagaggcttagagtcctggcaaacaccaacttttagggcaaaatgtagtgtttcacagcacagtctttggcgttaacctattactagcagggtaacctggggcaagttatttgacttcagtgtcttaattgcaaaataagcactataccatctacctgagttagaaaagcatttgcaatttttagttccttgagagatctgtgggctgggcgcagtggctcacgcctgtaatcctagcactttgggaggtggaggtgggtggattacctgaggttaggagttcaaaaccagcctgaccaatatggtgaaaccccatctctactaaaaatacaaagtagccaggcgtggtggcacatgcctgtaatcccagctacctgggaggctgaggcaggagaattgcttgaacccaggaggcagaggttgcagtgagctgagattgcaccactgcactccagcctgggcaacaagagtgaaactccatctcaaaaacaaaaacaaaaacaaaaaacagatctgtgaataaagaggagtccaagaaggtgcagagggaactatgaggaggtggagctctagaatatattgagaaaagagaatttcaaagaagccaacaatgtcaaatcctccaacaggactgtaacataagtctgtaaagtgtccaacttttagcaattagtgaccttaccaagggcaatttctatggaatgagatgagccatattgtagaggttcgaagagtggatagtggtcaacacggatacatcgtttcctcccctcacggcatctgtctctcccactagacttttcctttaaaggcagtgacttatgaatattattccactgttttcaatcaattccatccaccagtgagatatattgcatcaggttacctttcattccaccgcatttgtgccttgcacttagtaggcgatcgataaaataactgatgataaaggggcttctgcagactccccaattcatttggtaaagaccgctcagcatcatggtcgggccctgattgctttcacaaccgcttcgaggagtgtcattcccatcacggccacaaggtggagcccacctccctgctctgggacctcaggtcgcgaccccggaagcacatccttcatcctctaccttccttctagcagaaatggcggctgcggcggctcgagtggtgttgtcatccgcggcgcggcggcggctctggggtttcagcgagagtcttctaatccgaggcgctgcgggacgggtgagcttccctccaggccggtcctgtcctcgagatctcgccagacccggcgcagcgcacctgagagtcggcgcc

SEQ ID NO: 38994 - DNA, 2300 bp, Homo sapien
tgggcgtggtggtgcatgcctgtagtcccagctactcgggaggctgaggcaaaattgcttgaacatgggaggccgaggttgcggtgagccgagatggtgccactgcactccaggctgggcgacagagtgagactctgtctcaaaaaaaaagaaagaaaaagacaaattcagattgacaaacacaaaggattgatttctaccagtgaaatgatgcaacccttttgaccaggtaaaccatgtggtgcctgtctgtagtaaaatgctttgggaaaagtaatttttccctaatttagtcttaattcttctagattaaactcaacaatgtaatgaggcctgatagttaaaaaatcaaaatagagtcctggtgtgcattttaactttgcagttaatgggactggtgattttttccttgttaataagcatgttatataatgttaatcttaactagaggtcctcctgctttatcttaactagattcgtgtgagggatgacaagatgcctttggcgcaccttgcaatagctgttgaagctgttggttgggcacatccagatacaatctgtctcatggttgcaaacacgctgattggcaactgggatcgctcttttgggggaggaatggtaagtgattttaaaagaaattttccataacagatggaagattatcatgttttcttaaatataagttctttgtaagaatccttttttaaagtggcagaatagagtcttgtactgtgaattctgacttaaaaatataaactgatcctggattgcatgtgggccagaaaaagtttctttttttctttgccacaaagtttattagtggcaaaatttgaataaggacagaattagctagaagtactatgtcaatgttaatatcctaattttaatagtcagtaggccctctatatctgtgggttccatatccgtggattcaaccaaccataggtggaaaattttggggaacaaatggatggttgcatctgtactaaacatgtatggactttttttttggtcacttcctaaacaatatagtataacaactatttacatagcatttacatggattgggtatttatctagagatgatttaaagtatacaggagaatgtgcttatatgcaaatattacatataccatattacatgagggctctagcatctgtggattttggtatccacagggatctgggaaccaattctccacagatactgaggaactataccaaggtgatgtaagaacattaatttccttgtttttcacaagtacatactaaagtatttggggcaagaagcatcacatctaaaactcagttgaaaaaacttgtataaagagaataaagcaaacatggtaaaataacagggaatctagataaatgaaattctctgtactgtttttgcaacttttttgtaagttggaattatttcaaaacacattgtatagatttgtctttactcatagatttctccaaaatacatttcatctaaataatcttaagcttcatatgcaatataactttgaatctttaagcgtatgtagccaagagtcctagaaattgggttgataatagccatctagttttagaagtaggtatagctactacattaattataaggactcattgcttttataacatgaatttctccagggggtgcactgggtaagtgagataataaacacaattcttagtcatactgaattttaactctactactgagatgttgaataaaactaggaaacagcctctaaggatattcactattttccacacactccatttttctttctgtattttggacatgtataattaaaattctcttggaatttttttttccttgcagaatttatctagcaagctggcccagctcacttgtcatggcaatctttgccatagctttcagtctttcaacacttcctacacagatacaggattatggggactgtatatggtttgtgaatcatccactgttgcagacatgctacatgttgttcaaaaagaatggtgagaaaaatagctttaagtaatttaaattttgcctttaattcgttttaaactagttttttatttatactttatggtgatttatggtaattttaccttttaattaagagacctagataaacagtagttgccatgttttcaaaggttgcagttggtttttcctaagtctcaagatgtgaagctgatttatactatagaatttttttttttttttttttttgagatgaggtcttgctctgttgcccaggctggagtgtagttgtgccatctcggctcactgcagcctccgcctcccaggttca

SEQ ID NO: 38995 - DNA, 2300 bp, Homo sapien
tggttttttgttttgagacagagtcttgctctgttgcccaggctggagtgcagtggcacgatcttggctcactacaacctccgcctcccgggttcaagtgattctcctgcctcagcctcctgagtaactgggattataggcgcacaacaccacacctggctaatttttgtatttttggtagagacagggtttcaccatgttggtcaggctggtcttgaattcttgacctcatgatctgcccatgtaggcttctcaaagtgctgggattataggtgtgaaccaccacgcccagcctgtttttgtttttgtttttgagatggagtctctctctgtcacccaggctggagtgcgggtgggattacaggtgtgtgccaccatgcccggctgatttttgtatttttactagagacagggtttcgctgtgttggccaggctggtctcaaactccttacctcaagtgatccgtccgcattggcctcccaaaggattataggcatgagccaccatgcccagtctgcattttgtttatgtagtaaggtgctgttgttgatttaagttggattagatgtttatggtttttaccatacttagtgtttgatttgtggtatctatcacaagcatagcttttgcaaaatcatattagaaaaaaataattgttttgattattccttgagtattttcatagggtaataacagttagaaccaaaagagatctttgttctgtctagtctataccttttattttacagataagaaaacaggcccagaaattcaattcaattcaacaagtattagtacctactatatatagcactatgcctaggttcttttggagaaatgcctaatgctgttgcaccacaaaggacatgctgagaagaacctgagaagaaccttaaggaccaaaagatggagagcccatagtaaatgaggtgtaggataggaagggccacaagttttagtgaccagggaaggctcagtgtagtttgaaccagcctgaaaggaaggacagagttaaaatgaaggtcagaagaataccacaaactataaaatagaagtagaagtataaagtatggttcagcctgggcaacataaacaaaatctctaccgaaaatacaaaaattaactggcatggtgtcgtgtacctgtagtcccaacttctcaggaggctgaggttagaggattacctgagcctgggaggtcacagctgcagtgagctatgatcatgtcggtgcactccaacctgggcaacagagcgagactttgtctcaaaaaaaacagacaaaaaaaaaatgttatggggaaatggagtgggaaacaaaatcagttaggaaaagcagaaccaatgatcaggtttttaataccttgttgactagtttccattactgcaaatctttgattaacagaaggttcaacattgtactactaatctgacgtttgtggataaggtgcatcagatagatgtaactagttacaagaatcttatttatttaagaatctgcactatgagcgtggtggctcatgcctataatccgagcactttgggaggccaaggcagacagatcccctgaggtcaggagtttgagactagcctggccaacatgatgaaaccccatctctgctaaaaatacaaaaattagctgggcatggtggcaggcatctgtaatcccagctacttgggaggctgaggcaggagaatcacttcaacctaggaggcggaggttgcagtaagcagaaatcacaccactgcactccagcctgggcgacagagtgagactctgcctcaaaagtaagaaagaaagaaaaagaacctgcactatgaatgtgatgatgggaatcaaaaaaatttttcaaggttagcattattgggactttactggttctaagggattgaaggggagaaatgagccaaagctgactcttaagatagcagctgacagaagcaacaagggcaaataaaggttctttttttacttgtgcatgtttgaaggtagtctagaaggaacaatgtaaatggtagagcttcaaaataaaagaggccattttgctatgccttcaccttttggtagagaataaatgagattgtctgcagaaagggtgaatatgagtttgaagagaggtttgaaatggccttgtggatgaataactcagtgacccacagacttgtcaattagtgtccaaggctaatggaagtcacatgacatgagtactgggaaaatcaggcaggctgtgggcagttcttggtccctcaggcagacctatgcagactggaagccagagtgaaaagctggtgcttctttttg

SEQ ID NO: 38996 - DNA, 2300 bp, Homo sapien
aataaattaaattgtttgttgaactgttgtacataatttttgaagaattgtaagaatatttcctttgatatttcagatggtcaaataaaaaaaatgttcctaaacttggtgatatgaattcatcatttgaagatgtagatatattttattctttctggtaagtgaatatactgtttgtatgatgctgtcattttttaaaaggaaaagtattcaataagtacttgattgtttataaattaattcagatggacaaattgcagaaccttcactgaacaaaagcactctgttacctatgtgatatttacacttttaagattttctattaatgagatttctagatatcaagcacatgatagtagtaaaaaatgaaaattggggagtcatttgaataaaaataagtacatttttatttagttacttcctactaaaagtacttgagttcatgaggaaggagacagtgctatttgtctctgtaactaattcactaatttttaatatgcgcaatagttagtggccattttatatgtgctacattttctcatcaaatgtctagtaaatacaaaaacataaaatcacatagaacaaaaataacaagatttagttctatcagttgtaattgcttttaccttcagaggatacaaactggagatgagataaccactactagggttaccttcagacttgacagactagcgaaattgaaggcaaggaaaacttaaaaataggtcttggtcaagcgaaaaacctaacaaagaagagatagcagggcggtgtggttttgattatggagtgatatgtgcattttagattttcataccaaatgcaatgtccttaaaaaaggagaaagacttgaccttagttcaatactagaagggaaggaaaggtatccattaaaacaaattcattcacttgcattaaaaagaattttttttcatttattctgtcttgatcatgtattatttctgtctatattaggtataattttgattcttggagagaattttcttatttagatgaagaagaaaaagaaaaagcagaatggtatgtatgcaaatcattaataatggaaggtatttatttggttctctggtatttgtgatgatgtaaaaattgtcacgtaaattttctttcatattttctctttgtacatcttttttaaacaattttttaatattttgaaatcctttctcacaagttaaactaggtgggcccagatcaataattggttaggatatgcttaagaaattgccaaggaatataatgtcagatagctcagttcagcaaaatctttttcttctggttgcttaacctaggttttattaattttttttttgtatgtgtgcagaaatgcttttgacatgaatgtgcaaaaaataaccaaaattaatattaaatagaaccactgtttaggccgggcgtgctggctcattcctgtaatcctagcactttgggaggctgaggcgggcagatcacctgaggtcaggagtgcgagaccagcctggccaacatggcgaaaccctgtctctactaaaaatagaaaaagtagccaggcatggtgacaggcacctgtaattccagctactccggaggctgaggcaggagactcacttgaacctgggaggcagaggttgcaatgagccaaaatcacgccattgcactccagcctgggcgacaagagcaaaagtctgtctcaaaaaaaaaaaaatcattgtttaatgttagtaatgacacagcattttaacctctaggatgttatgtacatataaatattttataaaatattgcattttccagtcatagcatctataagcagtagtttgtttccaatattttctattttatagtcgtgatgagaggagatggattgaaaagcagaacagagcaacaagagcacaaagaaaaaaagaagaaatgaacagaataagaacattagttggtaagtagaattgatttaagtcccctaaatgttagaaattcaaaatgagattaactttttcttttgctagacaatgcatacagctgtgatccaaggataaaaaagttcaaggaagaagaaaaagccaagaaagaagcagaaaagaaagcaaaagcagaagctaaacggaaggagcaagaagctaaagaaaaagtaagacaacatttaatgaaggtggactttaaatgtttatgaaatctttaatcttcactttaatcttcacatctttttttaaaaaaaactataattcgaaagcagagaattgggtgctactgtgaatgaatcatgaccagttggtataattgagagatcttccttaccagca

SEQ ID NO: 38997 - DNA, 2300 bp, Homo sapien
atagcccagcgttcccactactggatatttatccaaaggaaaagaaaacagtatgtcaaaggggtacctgcactcccatgtttttattgtggctctgtttataataacaaagataaggaatcaacctaagtgtccatcagcagactagttgataaagaaaagtatatgtatacaatgggataccactcagccataaaaaagaatgaaacgtctgcagaaatatagatggaactggaggtcattatgttgagtgaaataagctaggcacagaaaggcaaatattgcatgttctcactcttgagaacagtgggagcttaaaaagttgatctcgtggaggtagtagatagaatgatagataccagaggctgagaagggtattgggaggagagggataaagagaggttggtcaatggatacaaacatacaattagaaggaataagtcccagtgttctgtagcagagtagggtgatgatagttaacaatgatgtattgtatatttcaaaatagctagaagacagaacttgaaatgttcacaatacatagaaataataaacactcaagttgatagatacccaaataccctgacttgatcattacgtggtttatgcatgtatcatgaattatgcacaaaatgagccaggcacagtggctcacgcctgtaatcccagcgctttgggaggccgaggcaggcggatcacttgaggtcaggagttcaagaccaagcctggccaacatggcaaaaccctgtctctactaaaaatacaaaaattagctgagcgtggtggcaggtgcctgtaatcccagatactccagaggctgacaggagaatcgctggaacccaggaggtggaggttgcagtgagccaagattgtgccattgcatgccagcctggccaacagagtgagactccatctcaaaaaaaaaaaatggattttgttcatgtattatgaacaaaataatcacatgcaccccataagtgtgtacagatacttgtatcatgaaaaaatagtggtcaggcgtggtggcgcaggcctgtaattctagcactttgggaggccagggtgggaggatcgcttgagcccaggagttcaagaccagcctggccaacatgacgaaacccctcccctacaaaaaaaaaaaagagctgggtgtgatagctcacacctgtaatcccagcactttgggaggctgaggtgggcagatcacgaggtcaggagttcgagaccagcctggccaacatggtgaaaccctgtctctactaaaaatataaaaattagccgggcgtagtggcacatggctgtaatcccagctactcaggaggctgaggcaggaaatctcttgaacccaggaggcggaggtttcagtgagctgagactgtgccactgcactccagcctgggcaacaagagcaaaactccatctcaataaataaataaagttagcaaggcatggtggagagcacctgtaatcccagccacttgggaggctgaggtgggaggatcacctgagccggggaggttaagactacagtgagctgagattgggtgccactgtgctccagcctgagcaacagagtgagaccctgtctcaaaaaaaaaaataaaataacaaatgcaatttaatagtacactaaaagaataatagtgttcatgaacacatagagtttctctcaggaatccaacttaggaagtatattaatatagcaaaattatagctcagataatattaaatccatgtgatttcctgagtaggtagtgaaagcacatagaatacagtttaacacccattccgttttgataagaattttgaaaagaaatgtagttaattccctactttgataactgtttcaggcccacagctagcaaacttttagctatgtggcattaatgctattacctaaaatccaggggtgaagcagcctgctttttattttttatgctattttgggagtttgggtcagtgagttaagttattaaataagagacaactattggaaagaaggaaataaatatattatttgtagataatataggatctgcctagaaaagcaaaagagagttaagtgactagatgcaagacaaataagcaaaaattacacagtttttggaagttacgatcaaatatattagaaagctgtggtcagtttaaagataaccccagggcaagaataagtaaccaaaacaagcccttgtaaaatttactattatagtgtcacaaatcagtggaaaagggaaggattattaaatgacagtaagattttgaaaaatgagaagtttagatactttcttgactatattaaa

SEQ ID NO: 38998 - DNA, 2300 bp, Homo sapien
ataaggtggaagcaacccaagtgtccatctacatatgaatggataaacaaaatgtgatacacgcatgcgcgctcacacacacacacacacacacacacacacacacacattattcagccttaaaaaggaatgaaattctagtataagctacaacacagatgaaccttgaagacattatgctaagtgaataagtcagtcacaaaaaagacaaatactatatgattccacaaatatgaagtacctagaggtgtcaaattcctaaagacaaagtagaaggatggtttccagtggacagttttttccactggcatagtttcagttttgtaagagattaaatgggtatagagtttcagttttgtaagataaaaatagttttgtagggtggttacacaataatgtgaatgtacttaacattactgtaaacttaaaaacggtgaagatcgtaaatttcatgttatgtgtgttttagcacaatttttttaaaaaacaaaacccccgaccgggcaccgtggctcacccctgtaattccagcactttgggaggctgaagcaggcagatcatgaggtcaggagttggagaccagcctggccaacatggctaaaccccgtctctactacaaatacagaaattagctgggcgtggtggcacgcacctgtaatcccagctactcgggaggctgaggcaggagaatcgcttgaacctgggaggcagagattgcagtgagccgaaatcaggccactgcactccagcctgggcgacagagcaagcctctgtctcagaaaagaaaacaacaaaaaaacaaaaacccatgttagagttaatggtaaaattgaatgggaggaggtgtgaggaaaaaaatatattaatatgaagaaagtggagtcaggttactttgcaccttggagcatgttttaacagtggttgcattagtagggatcaggaagaggttttggggcagaagattagttcaatttttttttttttaaagacggggtctcactgttacccaggctggagcgcaatggtgtgatctcagctcactgcaacctccacctcccggcctcaacgatcttcccacctcagcctcccttagttcaatttttgaaaagtcagttttgaagtgacaattttatcatgcagcagatatacagaccaattaaatgtatttaattggcctggcacagtgactcacgcctctaatcccagagttttgggagactgaggcaggaggatcccttgaggccaggagttcaagaccaccttgggcaacatagtgagaccctgtctctacaaaaaaaaatatacatatatatatatataatatatttaaaaactttaattgtgaaaatataatgaaattagtaagttattttctaatttactaatttctggtggtccttgctaaagagtggcatatcaagtttattttattgaacctgtttcagatactgctgttgggggtgagcctttacccactgtttgtttttgctagtttttgcttttgactgcagtcttagaaggaagcatatagtaggaatacaattgattttattatacattaaaaaattaagtcccagagtcctataattgggaatatcttgaataaaaacttcattagaacaaggtaaaaatattgctggccttggaatacaatctaacacactagagagaggtttcttctccaagcgagtattaaaagatataatgcaggtaaattagtaatagcacgacaaatattagctgctattatcatcatcaagttaaacacaaatgtatcacaaatacacgtacgtaattctccgcaaatgtatatactagtcgtcgatactggttcatacaggtattttcattttttacttaaaagtatagcgctcctgggaaaatcactgattaggttcagattaatacataaagcagtaagaacttaaagataatataaaaagaactgcttttaaaggttatgttctatgtattgcactgggacgtggaatataatcctttttacaggaaaactgatgcgcctaggaaccattctctcgtgcgacttggtctccagccggatctcagtcagtatagaactaggttaccgcacacgttggcgggggtgggagggtgtgagactggcctccacaccacgaaagatccatcccggaagtgcttactggtcgtctccatgcgccggttcctgggcgtcttagagccaaggcgcgaggctcggagtgagaggtagagctggaggggaccctaagcgccctccgcccgggacgtgagccgctgcgcccaccgggctagacccggcg

SEQ ID NO: 38999 - DNA, 2300 bp, Homo sapien
caaggaccaccagaaattagtaaattagaaaataacttactaatttcattatattttcacaattaaagtttttaaatatattatatatatatatatgtatatttttttttgtagagacagggtctcactatgttgcccaaggtggtcttgaactcctggcctcaagggatcctcctgcctcagtctcccaaaactctgggattagaggcgtgagtcactgtgccaggccaattaaatacatttaattggtctgtatatctgctgcatgataaaattgtcacttcaaaactgacttttcaaaaattgaactaagggaggctgaggtgggaagatcgttgaggccgggaggtggaggttgcagtgagctgagatcacaccattgcgctccagcctgggtaacagtgagaccccgtctttaaaaaaaaaaaaattgaactaatcttctgccccaaaacctcttcctgatccctactaatgcaaccactgttaaaacatgctccaaggtgcaaagtaacctgactccactttcttcatattaatatatttttttcctcacacctcctcccattcaattttaccattaactctaacatgggtttttgtttttttgttgttttcttttctgagacagaggcttgctctgtcgcccaggctggagtgcagtggcctgatttcggctcactgcaatctctgcctcccaggttcaagcgattctcctgcctcagcctcccgagtagctgggattacaggtgcgtgccaccacgcccagctaatttctgtatttgtagtagagacggggtttagccatgttggccaggctggtctccaactcctgacctcatgatctgcctgcttcagcctcccaaagtgctggaattacaggggtgagccacggtgcccggtcgggggttttgttttttaaaaaaattgtgctaaaacacacataacatgaaatttacgatcttcaccgtttttaagtttacagtaatgttaagtacattcacattattgtgtaaccaccctacaaaactatttttatcttacaaaactgaaactctatacccatttaatctcttacaaaactgaaactatgccagtggaaaaaactgtccactggaaaccatccttctactttgtctttaggaatttgacacctctaggtacttcatatttgtggaatcatatagtatttgtcttttttgtgactgacttattcacttagcataatgtcttcaaggttcatctgtgttgtagcttatactagaatttcattcctttttaaggctgaataatgtgtgtgtgtgtgtgtgtgtgtgtgtgtgtgtgtgagcgcgcatgcgtgtatcacattttgtttatccattcatatgtagatggacacttgggttgcttccaccttatgggtatcatgactaatgctgcttatggacatggatgtacaaatatctctttgagatcctgttttcagttcttttggatacacatccagaaatcgaattgctaggtggcatggtaattatttttaatttcctgaggaatcaatcatactgtttcccacagcagttgcaccattttatcattttacatttacatcaacagtgcaccaggattccattttatccagcagcacatgcaagggttggctggacccaagggtcatcctttccaacacttattttctgttttgtttttgcttgttttttaataatagctatcttaataggtatgtggtggcatccaactgtggttttgatttgcatttcctaacagtgatgttgtccatttgtatatcttctttggagcaatgtttattcaggttatttgcccacttaaaaaatcaggttgttttcttgtgtggtaggagttctttatatattctggatattaactctttaccagaaatagattaccttcactatatttgtagatgtggccactacttattgtgtctaatatgccaggcgttttacaaacactgtaaagtttccttctcacaggtaatcagtccaaaaaccagcgtgccaaagcgtttccccagggctctgtccggactctgaagcactgcataaaggggtctgtctgagcccaatttacttccggtggggaagggaaagggaagacaccaccggaagcaaggaaggtgctgtgtaatcattaaggagcggaggcttttggagctgctaaaatgccggattacctcggtgccgatcagcggaagaccaaagaggatgagaaggacgacaagcccatccgaggtcagttgacatgggccggagctcggagctggggcgggactggag

SEQ ID NO: 39000 - DNA, 2300 bp, Homo sapien
gtcgggacaggggacaagatcccccgctgggagctccagtgcagttcactgaagccttgatcactgaggctgagagcaggagaagggagagctcgctccttggccctatgtatagaagaagaaaaggaagttaattcagcagttgttggtttgttttttgaaagaagctatgtccaaaatatttcttaacgctctcctttcattcctaataccaacccactcccttccaaggcacagctactgctatcacagtggcttacatgcgatagactaattatatataattatatcttcttcctaagggtgaactgctaggatgtgagaaagatatagttcaatttttgaactcagccattcccatatgtagcaattcatgaatacaagtttgcatatgagaaattgtgtccagaatggggcatcatcagtagtgggagcaaatcctcttagagcagttgccttgaaaagagcaagaaaagtagaaaaatgagagactcataatgttcaagataagagttgatcttgatcaattaaaaacttaattaggctaatctgtcttcagtcttttacaaagaatacaattattccttcccattcacagaatacttactcaaggggccatgtatttattctatttgaaagtaaattaagtcatatccactcagtttgtgaatttacccacattgcttcatttccctttccctccatctacctatcctctgactaattcgctgacccgttctgaagtgagctttcataacctgggcaccaggaatcctctgaaaggtgtacaagattttgaatgggtgagcttttttattttttttctggggtaagtccctagtgtcctccagattttgaaagagtcctgtcccctccttcataatcctctagaatacaattgttttcaagggtgaaggtggggagaagataatgatgttgatagttgttggtacctacaataaaacattttatgaagttggtcctggaactagtcttcaaaagaaggattaaaagagttcatgaaattggatctatcctccaacagaatggacttacataaaatgtactctgagtcacaaaatgattaaatttatccatgctgtgtcttttgtgcaagatttcactagtttgaaaccaaaagaaaggaaaatcatcatcttatttttcttaactttattaacttaatgataatgagaacacctgggaatacggacgtgcttcctatttatcatgatttccctagaaaactgtttcacttgggttactaaaatgcagactacctgcaacggtagaaaaattaagataccagggggcaacacatgatatttagaatgagatgaaaactcaactgactttgatcgtcaattaaataggcagtgcacacctgcatctacacctcacaaggcaatccattgattgttagaaacttcctcagtcttccattcttctgttcttagcaaagcgcctctatgcgaaaagcactcaaatacttgttggattgagtcaattcttttggtttcactcataaattaatgaggaacgtgtaactctgtatagtttcagagtagttaaagagagaaaaaaagaaatgctacataagagaattggggcttcaggtgttacctaatagactagaaagctttccaagagtgcacttaagatatgagctatagcaaccttacctaggcaattcttcaccctaagtttctttctaatgcaaattagtttgaatttctctctcttccctcctgtcctttgcctgaaagtcttctgatacaaagcaatactaccgtaattagaaggaatgcctgacaaaaatacattttaaatttcattttcaaaaaggttgatacttcgtattgcatactccgaattcccctgcatttctatgctgtaaattcctaaactttagataatacatttatatctagtgcacattgttcagttttcagataggaaaaagctaaatctcagtctgtgcccgcaaaaagttgatattttttgttgttttaagagtctccatgaatgttgtttaaattctagaatccacagtactcatcgaagctaggaaaagaattttgcccaccccacagcgtatctgaggctttcttcacagctagctgatcggatccttgcagctgtttcttctgtaggtctcggagctcactgagaacgtccagcacgccttcccggcggggcccggcccaggtgcgcactagatgaggcagtcaaccaagtcaattggttcccgatcaactaaatctctcctaaaaataaacactgccgcgagcttcgagagt

SEQ ID NO: 39001 - DNA, 2300 bp, Homo sapien
tttacaaaaacacaggaagaatagatgagaaatcatgacattgtttactcacacaggattggctagaatgtgtggaacaaaggagggaagaaaattccctgagtatacgttttcagatctttttaatattctttaattttttcttttatccgcttttaagttctggagtacatgtccaggatgtgcagatttattacacaggtaaacgtgtgtcatggtggtttgctgcacaggtcaaccccatcacctaggtattaaggtctagcatccactagctgttcttcctgatactctccctaatattctaataccaaataaatgtaattaagccagcaaggatgggaagggggtagggggtggggaagactcatattaaaagcaaactcatctctaaaccagaaataatagcaatatctatacaagtaaatacatgtactcagaacagtgcctactacatgtaaacactgaacaggtgttagcaacattgccattattgtgttagtatattaggtacctggtgctaccggcaaaaccagtttatcatccaactgtctccagtgttgctactcaaagtttggtcctccagtagcctatcaggatcacccaggggcctgttagaaaggcacatctcagaccccaccccagacctactgaatcagaatctgcgtttttaacgggatccgcaggtgattcctatgcacattaaagtgtaagaagtactgggctacagacaggtatgtgacaaaataatttcataggatggcaaaggccaagtggcaaatgaaggacaccagaaatgcacgtcccaggagcccaactcctccttagtaaattaccctattaagatttgtttagagatgttcaaaagcgtggagaaaagcaaatttggtttcctcagctagggacgcggagagtggtctggtgcccttgaagagatcgccctcgtgtggagtagggagggaatctctagcctttcctctcggatgaagaacagcaccagcgctcccagccaaaggcctggcccaggttctggaggtggggtctccttggcagaagcctctggtgtctgcaggcgtgcatttacagctttaagaccaaacagctagtccgccacgtgtcactacagtgtgcacgcgcagaaatgcacaaagcaaaaaaaaaaaaaaagatgctcttaatgaaccaactataatccttgctaaggcataaagccagagggaagtatgtatctgaaatcattttctacccctcaccctcttggagcccggcactctggctgcggtgctctcttgtatcccagttgctagatgcaaaacaagctatttcctatctaatttttttttttaagagacggagtctcgctttgttgcccaggctggtctcaaactcctggactcaagcaattctcccagcttggggtaacgtgttacattattctacttaataaaaagcaaaagttgttttataaattctaacttaaatgcccagaaaataacttatcatgcattgccttgtcgtgcaatagtcaatatttgcaaaccaagtgttaaccaaaggcagttcatcaaagatttttgaaaattaaaaaaaaaaaaaaactcatactcacattgtcctcaggatttcctgttttcgaaatgttcctgtacgaatcggagtctctataatgattgtaattgaaaagataagtcaggttttttgtgtttttttttcattttaaaatcataatacgcaatgttttccacttgaacgctataccttgtgtattgtgcttgcttcagcctcgagcctctactgatgttccacctcaaggcgacaggaatgccacctggagaaactcctgggcggtatgggaagaaagccggtctcatcagagtatatttgcggggatcgacgaccaaggtgttaaattccaagcacgctttggaaagttctaggtgcttgggaagagatccgtaggcggcagggatgcccgcgccccggcgtcccagcgcggagggtggcggcggggcctggccctagcggggcggggcgggctcgggttaccgggagtcgcggggcgcggccggcactgcccgcggcgcctcctcctagagccgcacctggaggcagcgcgcgcgtcgaagaggcagcggctgtggagcgcggcggggcggctccgcccagggcagcccgggctggtgagtgcgcgcgggcggccgcggggccgggggtcgcggtccctcgggaggggactgagctgaggcccgcgggcccacccgagcaggggccctcgctgtcaccgcctctgcccctgtctc

SEQ ID NO: 39002 - DNA, 2300 bp, Homo sapien
ttaaactcaatataagataccatgcatgaccataatttttctttctaagggttttcagcatgtgtccttggtgcacatgcacagaagcgaaactatggtaataaagttagattaaagccaaccttcacttaaaaaaagaagtatatttctaaaaattcctaagtgaaatgtatgccccaaccattagttgcaaaaacatatcagtagccctgtttgtaacatacagttacgtagggtttgtatctcttaagatacaagcctcagtctgctcctctccctgccatgcttgaggagttaacattgctagttcaaataatcaagtgttctgatacaaaaatgcagttaattaagagaatgctttcagttaataggggtttatggaggtattccacctatttctaaatatacatcctctgaagcaaagttataattaagaatatttgtgatcatgacatgaaccttggctctagcttctttgtgcctcatatgattgaaggacactctggaaaactattatatttaattttttgaattatctggaactttattttgcgctcatcaaatgaatgaattgaagtaattattttgtagagctactaattgcatactaatgaatgccttaaaactctttgtggctcttttgaaaagaagtactttgaaagggtagagtggtgtagaaatgttacactctaagaccagagcaaaacatcaaaaacatagttctggaaatataacatcttagtattatgtatgttttgaaacaactcatttattgaacgtagctttgtgagctatttcttttcttcaaaaagaaggaaaataaattcctttaacaaatttttgaaatgtcattaaagagactgcatttgcttttgaaattatatatacataaaagcatatggtggtacatataaaattataatttttaaattattcctgaaagaagacttggagtaaaattcaaagcatacaacaccatgcaaatgtagcaatgctcttgtctcattcaaaatgttttagtgctctgagagtttgagataataatgcaggataagaacagacttatcaggataagagcctggtatatgacaaattcttcaaagtatttaaaatatggagcttgatgctggtagttgcttataagcattaattccaacaccaggtgacctgggagactctcttgggtgctgtgtgctgaggcttcctgccggtgctctgacagcctctaaggcagcatgttgacagggagcaaggaatagagtcctgtttccaatatgtgaaggggttgcttttacactggctggtatattggtgcctctgaacccctcgcccctgctttttaatcttagtataagtgaggaaattactggtgatgatatgtctctgaaatccaaaataggtaagtgcaattgattgtttgggcaggatgaaaatatctactcaaatgtgtgatatgttaagaattattgtgtttactcaaggggcaggattactatcctgccttcttttgaggactgtcaggttttgaagtttccacaggagtttggtaatgctttgtcaggcacaggaagccccattaatgcaaattgtattggcaagccacttgaaagataagaagtggttattgactctcattttattatctaccagtttatgagaatcacctgagctgcttttaaaacaagaatgatgcccagttcccactgcagatcaatttaaagccccatccaaagggatgggcctgggcattgggacattttttgatgtcttcaaaagcttcccaaatgattttgacgttcaaacagattgagaagtgctgttttgaaaggcaagtagccagggtaaaatggttctagggttggattttggtctatttggaaatctctctatggccttactgtacatagattcatttcagcacccaggttattttattctgctggaataacgtagtctgaggaaatcagtatctaagtaaaacatcagcctcatatttagattcaaatgagtctggactgttactttaaacttcaactttgtcttgtggaggcagagcccagcaagttgtccaaaagcagcagcgcacacaggaggctagtgtggggaccaggttgctcttggatttgggggttgatatggatgccatgcaagcaggtgcctcagtgaaaactaagacgagggctagctcaagactggaaaattcagctcatggctatgactgaaccaaaacaaatctggtagttttcctaccaattaatcacttaaatttgcttgcaaattgactgaaatcagccaaggga

SEQ ID NO: 39003 - DNA, 2300 bp, Homo sapien
taatagtaacaatcaagaaagttaggctatcaatgaaattgttttgaatcagtgatactttcagtttctgtctataaatttgactaatgttactttctttttggccagtttatcttacccagatttgtgattaattttttattatactaatttagtacatagaaatgtaacttttaaaacctttatttttatctccatgcaaaattgaacatctttaacagaatccaaaagaatgtattcttggtatcccagcaggctgctctataaaagcttctctgaatattacctatcagagtaataaatggacggatgggattttaattaatggaattcagtatcatctaatcttacctgtgtattgattgtttatgtttgttttagattgtggtgggttgtgaagccacttcttgtggtgaccttcattccgtaatgctggaatacactaaggatgcaaggtttgtgaaataatttttaacattatcttcaaacttgaataccccatccaaatcgttgtgtgtgtgtgtgtgtgtgtgtgtgtgtgtgtgtgtgtgagagagagagagagagagagagagagagagagacagtttcgctcttgttgcccaggctggagtgcaatggtgggatctcggctcaccgcaacctccgcctcccaggttcaagcggttctcctgcctcagcctcctgagtaggtgggattacaggcatgtgtcaccacgcccagcttattttgtatttttagtagagacggggtttctccatgttggtcaggctggtcttgaactcccgacctcaggtgatccgcctgcctctgcctcccaaagtgctgggaattacaggctaaggcagctgcttacagaggaataaccctatatcttaaaagtggtagttcgtgcatatttttatataaatttcacttgtacaaaatgtatacatatgtcttattttcaaaattttccttcaaaccaaaaaaatccattttcattcaaggctgccaccaagaaactttatattttaaattttatcaaaataagcaaagcactacatttgtcctcagagtagaactctcttattcatgttactcattttcaactacctctaacaaaaactttaatcagtgaatgatctgaatatgcatcagccagagtcacctcttctaaagcatattaacagtattgaataaaagtctgacatagttcagttaccttattagggttaatagccctccgactatcacctttaaacattaattacattaagtttgagaagacagacaattttgtcattcaactccaggtatatttctagtaacaatgtcagtaggaagaatccaccagaattcattgctatgcatgctattattttattctgttgtccgtgtgcttttaaagagtcagaatatttcttaagagaaaatattttaatttttttataatctgtaattataaatgtttatagaaaacaggaaactcctatacaaatattttaatttaacccgatcacaaagcattaccttgacattaacagattatatgtttctcttacaatttgtctaacaaagccttttggtttctgcagatcggattcctggcagctcgtacagacccagtgccttccttcctcttctaacagcattggctgctcccctttccagttccatgaagccaccatctacaactctgtcaacagctcaagctggaaaagaatcaccatccagctgcctgaccatgtctcctctaggtaggttgcaaattaaggtaaactttgtgaaattatctggcctctctacagagttcatgcagtgagctgaaaacaactgacagtgtgaggcagagctttacatgcagccctggtgccctctcccatcttccctccttttctccctcctctcaccaacccatgcccccaaatggcaactgcatgttccaggaggaaattggagtgtgtctgtaaatgattcagagatctcagatttcctttgacttaataccatagcatgtaccaaactcaatcacaggccctgaatgacagaccccaatccaagactggtgttggcaccagttctgccccagtgttctgccttcccaaaggctgcgcttctcatccagatacaaataccagctgggtgtgcagggctgacaggttacacaaagctgcaggataaatacaatggagtgcaatcttcctagagcagcattcggtttactcaaagatttggaaaacgatacacctgtgtaggaaaaatgtacacagatttattatggactagaataggaaattcacatgaaattttcagagaa

SEQ ID NO: 39004 - DNA, 2300 bp, Homo sapien
accttggacaagttacttaacctccctgtgctgtttcatcatagtaaaatgaagctatcaatggtacttttcccacagtattgttatgaggaataagggagttagtatgtatagtacttaggacggtgctcagtgcatagtaactaaacattttaaaagtgtaagccaaaaacattaaatagttttggattctttctacaagtgattaattttgtctttggctatattcacatgactggacaggaaggcagtaacagccttgttagctgtgggcgagtatctcctaattctgtttggggcaacaccacctgctccagctagggctgtcgactgtggcagggcagtgcaggacaagagcctctgaggccagccagtctgccctgcatccagcctttgtcactgactttgggcaagttatcaacatttctgagtgcctcctcccttgtgaaatagggatattttttgcctctccagttggtgttaggattaaaaagctaaagtacgtctagccccacagcctgcaccccgcagagctacagtgtagcaattgttaccacatcatatatatatatatgcacatacatatatgtatacactgtatattatttatatggcagttaagcctctggggattttgaagtaagggaaacaagaagccagctagaaatgggccctttctacctgtcattcggtctcagtaagaggaagaaaaacaatttcttccttttgcaacgaagtgattacagaggtctccccttggaccctgattttcaccgcccctcgccccacaaatgcaggcaaaggcactatcccttccaattttataatctactcatttctgtacgtgcgggtttatctggcttggtggcaagccaagggtgggtggggagaggcattaaaacctggcaaccccgctcccccatctccggatgccgcagggctcctgccagccgtcctcggttaaaaacgtgcttatggattatttcacttccctgcagttcatgtgcagccgctcattaccacccgcttcaatcaccgctgccagcatctcccctgaacgtttttccctcccccgatttcagggccattggtcataaccgacatttaaaggaaataaacactgatttaaaaaattacaacacccatctctgcctgaagagcccagaagcaatgaataacagaacagtccggcgaagagagcctgtcggatcttagctccgccagcccttcctgccttacaattccccacaaccgagcagcacaaatcaccatttccaggcaccactcgagtctgccaattccactttcgcttaatctcattttaaaatcctctacagatgaggctctgtcgctgccgcgaggggccgggcggccgcggcgggagggacagggggcctgggtgggaagggagcgcgagggcccctagcggttcgcggcctcgggcggattcccagaacgagtgcgggccgcccggactggcagactgcgagccccgaggggcgcgggacgcagccggctcagacaaagaaaccggcgccagcggccgtccctgccgcccctctccttccctcacgcatcctcccaggaaaaacagggcacactgacggccaaaggggctggccttccccttcagacagctggacgggaggtgccctctgcggggctttgacgtccctcgcagaagagtcgcgggctcagcggtcctcgacagcgtccccgtcccgctccccggcgggcgcccctccctgtcctcccgggtgcgaaccgggcgctggccggggactccggggacgcgtgcgcccctcgccgcgcgaggtgccgccgagccagcccgagagggcggggggcgggcggggcggcgcgcgggggcgggggagcggccgggacacgtgtggcggcggcgggggggacgcggcgcccggggctttaagaaggtgtggagcggggcgggcgctttcccaggcctggccgaggggcgtcgcgcagaggcggcggcggcgcacggaggcggcagacgacgcgctctcggcgcccgcagccccggtcccgcgctcccgcggcccaaagtaactttgggagccgccgtctcccgcggaacttctcggcgggggcccgctcccaggcccgctcccgagcccgttccgctcccgtccgccttcttctcgccttctctccgcgtggctcctccgtcccggcgtctccaaaactgaatgagcgagcggcgcgtagggcgcgcggcggcggcggcggcggcggcggcatggagcgcagtggctgggcccggcagactttcctcctag

SEQ ID NO: 39005 - DNA, 2300 bp, Homo sapien
cttgcagtttgatctcagactgctgtgctagcaatcagcgagactccgtgggcgtaggaccgtcggagccaggtgcaggatataatctcctggtgtgccattttttaagcccgtcggaaaagcgcagtattagggtgtgagtgacccgattttccagatgctgtctgtcacccctttctttgactaggaaagggaactccctgatcccttgcatttcctgagtgaggcaatgcctcgccctgctttggctcgtgcacggtgcactgcacccactatcctgtgcccactgtctggcactccgtagtgagatgaacccagtaccgcagatggaaatgcagaaatcacccgtcttctgcatcactcatgctgggaactgtagaccagagctgttcctattcggccatcttggctgcctatcgaggccattattattcactgtttgggagactgcaatagtcgtttcaacaaatgaaattgattccactttccacactgtagccagaaggaatatttctaagtcaaatctcaacatttgcttctctgcctacaattctttattggtccccagcctgacctcctactactctccaggtttatatgtaaaaactatttgctagtttcagttatgggattgcccatttgtccctttttgtctgtacattcttttgtttacaatttccttcttggtctcacaggtgaatcttttcttcagcctcagcttccaggttctctcctctgagaaaccatcctaaatcatccagatggtaaggcatgttctctcagatcaacaattatctttattatgtaactgccaggcgttaactgtgtatgctggaaattgaactgtgaagacagtgtttcctgtcctcataaagtatatagagagggagactaacattttagacagtttagtcagttttattgaatgctataaagatgtcgtgttatgattataatatatgtataccttatatgcacagtatgttacggacgtataaccatcttaggagagtatcagaggccagcttcccttggagacattgaaatttaatgggtggtcccattataacctttagaattctctattaaaaagtacctgggcaaatgcttttgaattgttgctgtgaaaatactattttgactagctaatacgttatataccacaactctcaaaagatccttttgaccatcacaaatctaagactgatctacaatctatgggcagattgaagtccacaatttaaatttatgtataacaggtagtatgtacaggatcttctactcctagcaataacctagccagtattatccctattttatagataaggaagttgaggctcaactattccaaagtccccctattcagcagttgagtcagtcagtggtcccaacccaggggtttcaggacgccaagctctctttccaccatgcacttgcctacttctgtatcttatttccagaatcttctagtgtttagtcgctagtaggtgcctcacaaataaatacacgtgaaagcctaatgctaaaagtagcattatttttactatcaacctcaccaacacacactacgacttcatcccattaggactgagaggctttccacatctggtttaaagcttgcacaaaaaatagtaattccaagctgtgcattaaaccccattacaccctgttttgtactcaatgccactaatttcccacaacgtcgtcagggaaaaaaacgacaacaaaaacatcttttgacaatattagtcttctaagtccgccttccacgtccctctaagggccccagctccgggtccgtcttcttaggcactcaaggtttctaaacttggggcttccagccggtaaaactaaaggcacggggttcaggggtcattggaggcccacgggacccccttaaccccttccaccccttccctattcgcccatctccatgtcgtctccttagcctttgagtggaaaaagcgtcagcccgaaatccccaccaagcccaagaatgggcaaaacctcggcgcgcacaggaccagcgagaagaggatggttccggccctgagactagagcggcggcgacgctcggcgtacgcgctgccgtcacgccgcagcccggcagcgcaggctcctcccacgacgctgcgggtccggtttccggcgggagcgtgggccgccagactcgggagaggctccgtcttgtgcaagggtcctgtgggctggctgcactggcctctgcggtggtgcctgccagaatgccccacttggaaaacgtggtgctttgtcgcgagtctcaagtgtccatcttgcag

SEQ ID NO: 39006 - DNA, 2300 bp, Homo sapien
ctgattattctcctttcctttttctctttccatgttaaaattcttctgatttaccagcaacttcaggagagttaaaacaaatgaaacctaacagaaattctgaccctccactgccaccaatgcactcaagatgcatcatcatgaactgtatttttagagacttgcaagtgttatattgggctaactcatattttggtcatctttgtcacctcctccaaatccctctgatatttattttgaagaccttctgagagtctacaaccacacttgctagaaattcttactcacttaatcttacatgtctcatgctactgtttaattctgttctcttgattttcaaagctctgtctgatggaccttgtattacaatggaccttgtataagatggaccttgtctgatggacatgtattacaatacatgaattacatgcctatagaaaaaactgaatggaagattctgaaaactcatgcttttagatgctttccccagtttcagcagcagccccttcattatcttatgtgtctcacacccctattccactttctccccctccctcttcatagaatctcaaatcttcagactatcaaatgaaaagcataattttcatcacttaggttatgacccttctaccatagaatagccgttgatatagccaattaggtaagacttagggtccaattctatcagaattctctctgatagaaatgctcagaaaattctgtgatcatatggttcaaaacgatttgttaccaaaatccactcctacaattaagcattctggtttcatggctgggggtgggaggcagttacatgtttctttatatcagaatcagaaggaaacaaacaaaaaaaccaacggaaatagggaaatgcagtttgaaaagtagaaactgttaaaagagcaacagaaagactgttaaaagggaaaacataagctaaggaaacagcacgaagggcaggtgtacaacagcaatgccatgtgaaaatgtaaggaattctatagtggtaattccgggataaattagcctgaaaacagctctctggttagctttgggttgtagggggagatggaagttcctggacaattaaccatctgctatgtctttttgtacccttaccacccagctcagcgtctgggcacagagtagctgtcaatatttgtatagtaagtgtaacactggccgaactaccctgttttcaaacaaactataaaattctgtgacacagtcccttccaagcacacacaggcccaatctatggaaggaattatcggggaaacgacctaaaggaaagtatggggcatccattggctacagttcagctggctgcttgggggaaaaacgcaaagaggacgcaagctcagctgtgcttgatgtgagaccacccttgagatttgtcttttacattattgtctgccaggctcctgcgcaacttctatctccacctgtggacctgaaggcaaccgaggagttagccaggggcagttctgtggtaacaagaaagactcttgggggctgtatgcctccactgccttggcgcctcttgcctgcaattgccgcgctgcccctcgtgcctctgcaaagatgcagaggtcgaagcacgtttctgtgcggtgatgaaatgctcgctgaatcagcctctcgagcccggcctctcacacccaccaggatcctggggttgtctctaggatccctgtgggtgctcctgccaccttcttagactaccctcgccctcctaatccaggcccacttctctggctcatgtccaccccttgatgggcgttccggggtcgtcactgtcctctgcgcccctgggcactggcagcgcgggccgggcagcggggagggaggcgggaagcagagcgggaggcgccccgggcttgcgcgccgcggtgctccacgagggatttgccgccttcagctgcagcagctgcagcggcggcggcgggaagaggggtggagggtggtgaggagggccggagcccgggccaggagggagggaggggagccgggaggctgtgccaggcgagccggaggggtgctccgcgctcccccgccctccttccgggagcgaggatgcagactctgaaactggtgctgctgggctgaggcggaggcaggggagttgcagcgcgcgaggctccgtgagtgtgtctcctgcgcgctgagaggcggggggaggcggaggaccaggaggaggaggaggaggaggaggagggggagaatgcccggagccgccgccgctgccgccgccgccgccgccgcgatgctcccggctcaggaggctgccaagctgtacc

SEQ ID NO: 39007 - DNA, 2300 bp, Homo sapien
gataaagatgagtgagcttccctccaatcttgttctctgtctgaaaacttgtatgagccacagccatgtgacagacagaactgtttctttaccaaagactgtcgtagttcctgcattgtcagtcgtacgcactaaaacacggcctgcagcaggctttaattaccataaatgcaccacctgtcttctttttagtgcttaatcatgaaacgtatcatggtttacagtgcaatgtgtttgaaatactatactgagctgtggaatcacagaatccacagaggaagagagcccagggttcagacaaagcgatgtggctagggttaacctagtaaatcctattccctgagggctgttctagagggatccagactaaaaactgtagatggtatgagaagagaggggtttgggataagcctaaaaagccccataagaaagcataaatctgactgtcatgtaggattatggctctcctaagagctgggagactgtggaggctgactgaaggaaaggctttgtgctttggtggctggaagcttttgtacagctctgtgaagcctcctttagtgcaactgcagtctgggctctatggggctgcagctgtgccaccctggaaggggtgaacgaagcaggggaataggaaggaactgaagacagaaagaaggctgatgtgggaccatgtagtcaactctggccattcacggcaacttccagataggagaggacctcaaattgtaacaggtgacaacatcactacattgctacagatagttgtcattggccattaacaaggactacacattcatttgagtcgcatctctttcaggaagcaattattttggggtccaaaatgcttgtataccctttagttctgcaccttcatattatgttaactagtactcccctaagtagttgaacttaagggatgctaagaagggccccagatatcgtcaatgaaacaatgtcctttcttttgggttaagtcctgaggaatctgtgatacttagcccagtcagatggtttctctgaaaggtaaatggaagtcagcacacggagaagtgaggggatacaagaggagaaggaagcactaggcctttcccagggcatctgagcctatgggggcccctgaggggagccctctggctgctccagattggcactgggtgctggctggtgggagtgaagtagatctgggagagattctaaaaggggtgtgggagcagaaaaggaagtgcgctagtcatctattattgtataacagtattaccacaaacctcgtggcttagaacagcccacatttgttatctcagtttctaggtcaggagttggacatggctggatccattgtctcaatatctctcacaagaatgcaatcaagatattggtcagggctgatttctcatctgaaagcctgactaggaaatgatccattttcatgtagtagttagctaaattcagtactttgagagctactgcattgaggacctcagtttttagctggcagccatcctcagtttcttgccatgtgggcctctcccaacatggcagcttgcttcatcaaagcatgcaagctgagaaggcaatagagagagtttggtaggaagaaggaaatcacaatcttatgtaacttaatcgtggaagtgacatctcatcccttttgacatattctattggttaaaagcatgttacaaagtcttgcccaccctcaagggtgaagagcattacaaaagggcagaacaccaggaggtggagatcactgggggtcatctagagtttgcccatcacgtggaagaaagtgatggcagacatccattgttttttctggttgctatccattcctccttctggtaattatacctagattttcctttgacgaatagccccctccaccatttcaacaatgtttctggcagtctcagccccagatgtcgaaaagtgacttaagctggcgaatcagcatatcacatgtctgggttcacagtggtgagtttacagatgcacatgtgacccaacaagagccaatgaagagcaaggaaactttcttgggaatcctggaaagatatgctctatttttcaggttgacttaaaactagagaggatctaggaactggagctgctgcctctgtctgctaagatgtgaagtccaagactgaaagtaacatagcagaaggagaaccaaaagatatgttgagtcttgatgctatttgttgaaccagtcctgaatccagctgtgtcgtaagtgaattattcctaacatgatgacagaagcctgacattaatttatcaaggcatgctgaagaatattt

SEQ ID NO: 39008 - DNA, 2300 bp, Homo sapien
atatatataataggatatatatattatatatatatatataatatatatatatatatatgctcctcaagcttgcagacagcctattgtgggaacttgtgatcatgtaagttaatacttaataaactcccatattgggaacttgtgatcatgtaagttaatacttaataaactcccgcgtgggagtttattaagtattaacttacatgatcacaagttcccaatatgggagtttattaagtattaacttacatgatcacaagttcccacaataggctgtctgcaagcttgaggagcatatatatatatatatattatatatatatatataatatatatatcctattatatatataatatatatatatcctattatatatataatatatatatatcctattatatatataatatatatatatcctattatatatataatatatatatatcctattatatatatatcctattagttctgtccctctagtaatacaagtaagtaatacaagtaagtatgtccctctagttaatacaagtaactattaacttacatgatcacaagttcccacaataggctgtctgcaagcttgaggagtgtatatatatatatcctcctcaggatatatatatatcctattatatatattagatatatataatatatatattatatataatatatatataatatatatatataatatatctattatatataatatatatatataatatatatgtcctataacccaggatatatatatatatatacatcctattagttctgtccctctagagaaccctgactaatacaccaacctctgcctcccaggttcaagcaattctcctgcctcagccccctgaggagctgagactataggcacatgccaccacgcctagctaatttttgtatttttagtagagacagggtttcgtcatgttggccaggctggtctcgaactcctgacctcaagtgatccacctgcctcagcctcccaaagtgctgggattacaggagtgagccaccgtgcccatccgaggactgggttattctaaccatctggtttgacctttacatcaagtagaaatatcaaaaaaaaaaaaaaagaaggaaaaaagaaatgtcagagagatcctaagacaaggtggtaagctctggcagggaaagagctatttgaagtggatgaaggagtaatctcgatgagaaaaaacagaatgaaagaaatgctttaggactcaatttgctaagttaaatatgctttacaggagtattatgcgatgacacatttggacaaaatgaaaactggttatgaaaaaaatctctctcctctgttgtatacactcaaaccgtataaataagagccactgaatgtgtatctgggagcaaaaccaggtccttcatagttaggtgttttctttatgtttaatagaggatgtaatgctagggatattaatattgtctgatagaatgattgatagacaacccaaccaactttagatttttccaccataaagggacaatgacaattatccggtgcatctaaaaccccaaatattccagtctgtcttctgcatcaagcccttttaatgaaactgaaaaagaacaaaggctaatgctgacttctgtgagtttcaattcattttaaagttttctcactcttccagcttgggacaggaaaatagaagaagaaaggaggttgcaaattttacatagtgcccacatcattagtcaccaaatgattgtaggactaatcagggaaagtggctactgaatgccaggcatttccttatgccatcttattccattgttaagacattggggcaggcaggtattattaaccctccatttaccgataaaacaaaaggtttcagtcactaaccaaagtcactcaaataataagcagtagtgcaggtttggtggggattcaaatacaggtctagctccaaaaacaacactatctacaattacacatgtgttatatggtattttgaaacattttttaaagcatcttttttttgtgtgtgtgaaggagaaaaatccccactgcatttttatttttcaaatgagaaaattatgctgcagggaagctctcagagaatctgtaaatcttactggggtgtctggtggtttggtgtaataagggtaggtttgggtaaagaaggggtgggtgagggcattctggaggagagggggctgcaggcccaccatggaaatgagcaactctgttttctctcctgaaatagatgtggtttcacataaattgacatatatagttccaggctgtaaatgttgttcgttgctt

SEQ ID NO: 39009 - DNA, 2300 bp, Homo sapien
aatttggttatagcagccgaactgagtaagtcacttgggctgccttaacaaagaaccaccgactgggtggcttaaacaacagaaatttattttctcactgttgcggaggctagaagtttaagatcaaggtgtcagcagggttggtttcttctgagatctatgaggaaggatccgttccaggcctccctccttggcttgtaggcctccctccttggctgttttctccctgtgtcttcacatcaccttcccccatatgtgtgtttgtgtccaaatttcttcttcttcttcttcttttttttttccagacagtcttgctctgttgcccagactggagagcagtgacacgatctcagcttactgcaaactctgcctctcgggttcaagagattctcctgcctcagtctcccaagtagctaagattacaggcacctgccaccatgctctgctaatttttgtatttttagcagagatggggtttcaccatgttggccaggctggtcttgaactcctgacctcaggtgatccacccacctcggcctcccaaagtgctgggattataggcatgagccaccgcacccagcccaaatttcctcttcttatgaggaccctagtcatgttaaattaggccccacccaaataacatcattttaacttaattaccattttacggaaccccatccccaaatatggttacattctgagatagtgggggttaggacttcaacatatgaatttatgggaagacacagtttagcccataacaagtttattctgttcaccctggtgtggccagggtagcttgccggcttcctttctggcacatgtgggtacatgttcctctgagctttccctcaatgtcttctttttctaacttcttatgaagatatttaaacatgtggtagaatacatacctatccatgcacccaccctcacctaaattcaggactggctaatatttgccaagtgtcatttatttacacatgcacatgtaggagaccagaatatgcttcccgtaaatatgaaggattgtcgagctgaagacaattaagaaggagatggagaaagctctctgccctccctctatttgcctaaaagcaggacatagatttccagagacaaaagatatcctggcctcctcttctaccagggagaacaaaggttaactactaaagacagcattggaccgtttgggcctggaggtgatactggaggaaatctacaccaaggagctctcctaaccagcctttatctgccaattatttgccttcccacaagttgccacccctagagactcaaagactatttactatgctttcggcttccaccaacacatgggacagagctgtttcaggatgggacctgggttaggttaattctagctttttctgggctgttaggctggaagtggcttctcagcagcaataccagctggtcgcgaaggctttctccagcagggcccgcccacagcccgctcctgctctaccttagcagtaggaaagctttggcatccccagacgacaggctcaccaagaactcaagtgctcattcaataaaacacacacagctgaagggaaagtctgtaatttgagtatgtgtgtgggcagaacagtttcccaccccagcacacttgattatttgtgctaatggggcgggggctggggagggggagtctgggtccccagtgtgacccccagactatttacacatggaggagctttatctggctttgggaagtgtgaggtcgagaggtgataacttagggttcctccctgggcatcagggaatccctgaaattctgtgcacacgtttttaggagtggcgatgtatatcttcctagggagagaggccctatttactgtcagatttttgaagggagaccctgacccctaaggttaaaaatcattactctgtgactaatccagataaagttctattggtttagtattaactttagctaatttaaaataagtttacctttcctaagagatttccgttcaattggctggggatttggctaggtggtgggaaaatgttaagtagagtgaaaaatgtatcactgattaaccagtggaaatttattacagcagttaagagccctgggtctggagcaaaactgctgaggtttgaggccccgttttgctgctcactagctacatgatcttgggcaagttatttaagctctctgagcttcagtttcttcctctgcagaatggggatgaaagtggactactacctcatggcatgttttgaggatgaaatgagctaataaacacagtcttcagccctacattaggtaagcc

SEQ ID NO: 39010 - DNA, 2300 bp, Homo sapien
ccctattccaagcacagcatctgaactcttagcgcaacctgcagggtgatgttattctcatttctattttagagacagcactcagtccttagatgttaagaaacttgcccaaggtcacacagctggtagaaagagaaaaccaagggagtgcaaaagtagcagcagagaaatctgtaaggtggtgagcaatgagggtggcctggagtagggagcagcagtgagtcaaaaagatgaggtttgatatatattttttaggtggaagtacttgtggtggtatgtgtgaggagcaaggaggatgggaggaaagaatgattccaggtgtctggattaaggcatgggagcctttggttctgtgcctagacctgagctgcctggtgaaagaggcacagatggagtgttcgcaacctaaattttctgtttactgactccattatctggaagttctgtcacctcttggtacttaattaccttgggaataatagagcctctcctaacaagtgttgtaatgaaaaagaaataggataatgtatgtaaaaattctacatacatgtttgttaattgttttaaaagagagagcactttcagaggatccagaaacattcctggcctcccctctctctttcatttctcaggctgctaaatcaatgattagctctcaggccagctcccctggaaagcgcatgaaagggagagtgaacagaatggcttctctctcccaaggaggctgcctcatcagggtcacagcccctctgccaccagaaagcctggatctgggccagagccacaaaggctaacaaactcccttcatgtcggctgagagtaaagagttggggtccatctgggcccctctccccaactctctaggggcagcgagaggtgacagtgtgctggcagccttcacagcccttgctcactctcggcgcctcctctgcctgggctccctctttggcggcacttgaggagcccttcagcccgccgctgcactgtgggagccccttcctgggctggcggaggctggagccggctccctcagcttgcggggaggtgtagagggagaggcacaggcgggaaccggggctgcgtgcggtgcttgcaggccagcacgagttccgggtgggtgtgggctcagcgggccgcactcgtagcggccggcccgtcctgccggcctgggcaatgaggggcttagcacccgggccagcggctgcagcgtgtgtgctgggtcccccagcagtgccgcccaccatcgctgcgctcgatttctcgctggaccttagctgcctccccacggggctgggctcgggacccgcagcccaccatgcctgagactcccccaccctccgtgggctcctggggggcccaagcctccccgacgagtgccgccacctgctccacggtgcccagtcccatagaccacccaagggctgaggagtgcgggcgcacggtgtgggactggcaagcagctccacctgaagcccccgtgcagaatccactgcgtgaagccagctgggctcctgactggtggggacttggagaaactttttgtctagctaagggattgtaaatacaccaatcggcactctgtactagctcaagatttgtaaacacaccaatcagcaccctgtgtctagctcagggtttgtgaatgcaccaatcaacactctgtatctagctaatctggtggggacgtggagaacctttgtgtctagctcagggattgtaaacgcaccattcagcaccctgtcaaaacagaccactcctctctctgtaaaatggaccaatcagcaggatgtgggtggggccagataatagaataaaagcaggctgccccagctggcagtggcaatcctctccggtccccttccgggctgtgggagctttgttcttttgctctttgcaataaatcttgctgctgctcgctctttgggtccacattgcctttgtgagctgtaacactcacggcgaaggtctgcagcttcactcctaaagccagagagaccacaaacccaccgggaggaacgaacaactccagacgcgcggccttaagagctgtaacactcaccgcgaaagtctgcagcttcactcctaaagccagcgagaccacgaacccaccaggaggaacgaacaattccagatgcgccgccttaggagctgtaacactcaccgcgaagatctgcagcttcactcctgagccggcgagaccacgaaccccaccagaaggaagaaactccggacacgccgcctttaagaactataacactcacggcgagggtccacggcttcattcttgaagtcagtgaaac

SEQ ID NO: 39011 - DNA, 2300 bp, Homo sapien
tttagcatttgaccctactatcaccaaaaaaaaaaaaaaaagaaaaaaatatatagcagttgagggcagtatacaagcttagtaagtatattctggtacttgcttaggaagtaggaaatgtgatcagattctgttctctaccatatgacactgatttgcaaggccccgggtacaggactactggtaaaaagaaccctgtaacttcctgtcacagagggacacagcaatatatataaaacagcatctgccgtaaatctttggggaacgtcttactagatttaaccagctaattttactaggtatttaggaaagtgtgactgcagttcagggtctttgttttttcttttaagacagggtctggctttgttgctcaggctggagtgcagtggcatgatcaaggctcattgcagcctcagcatccctgggctgcagcgattcttccacctcggccacccaaaactgggattatgggtgtgagccaccacacctggcctcttatatcttgattaaggtcctgtctgggcctacaaaggttcaatttgcttaaccccagcactttccctcaacatggaggtccttagtcaacattaaccaaggtaataaagagttgaaagttttaatcataagtaggtggaggagcatttaaactggtttaataaacttgaaatatgaataccttaaatattcgaataacaaagcactggtgaaacaggtttttctatggaaagaccacaattttctatccagcacatttcatttgactgggttcctttgtttctgtaataaataggactttgagaattccaaatcaaatttgcacttttgcacaaaaggttcacttggtgactctcatgcctccataagtgtgttccatctgattctgcacaacctactgccttcagggtatcctgggaccagccaaagagatgattccaaccagtggaatcatcattaaactagtggttcttaaaatatggacactgagtcaacctgcatcagaattactgtagattctggacaaatgtacgaagtcaacatcaaatcagtgctacattttgaaaaggtaactgtaataaaaagatttttttgagatactgaaattgcagtgaagacaatgttcccacctttttaaaatggtgtaatattaggttcatttatggaatgttttatgaagcagatttgtattttaacaagccttttaggaatgcagatattataggggataacatgaatggtggtaaagaggggggcatatttgagcaatgatttttcaagagctatgaatttacagtgcaatcctagcaggaaaagagagggagaaaagaacatctattttgagctgcagacataattgcatcacagctgagatttcatagtccccgtcctctctattcctgttgaattacatgattaaaggtaactatatatatatgaatatatgaagatgtttaattgttgcaggttggagaatttgggccagggagaattcacttggccaatgagttaaaaatgagaaaaggattagcagtcatcaaaatttctaagtagttaattatctgcatggtgggttcagtataaacaaacatggtactctcaaatgactgttgatgggctattaaattacattagtatcctgtgaaccctggtcatagctggaaaggagaatcttttgagaaatggaaaaaccaggttatttgtacataaggaatatgtcttttaaacacccccaaagtatagattaagacgtgattgatgaaaagtctccattttctaatgatggttttatgaaaccaaagtatttacaactaagaaccaaccatctgatcgccagtagagagtggaaaataggaaagggtaacgtctcagtatggtatctggagtagtctggctaggaccataaacttcattttgtttacaagttcccagaaaataagcctgaatgagcttagagcttaatacttccagtgatggttctctcttccctcaagtatacagattaactatttttgtgccgtgggccttttgacagcccccaaaagcccgtggatcccatctcagaatgttttacatgtgtattacataatgctcacacattctaaattttatctaccgactcctagttagaaatcccttgcaaggggtgttagggttctgagagaaggctggtaagtaatgaggcttttaacttatttcagtatcctgttcaggtcgggaatatgttgtgttctaattactctagtttccagctcaattggtgttggagaaactagcccacttataagtggctcaaatgaaaaccc

SEQ ID NO: 39012 - DNA, 2300 bp, Homo sapien
tgcagtgggccgagatctcgcctctgcactccagcctgggcacaaaagagcgaatcccaccgacaaaactatattcttaagggatgtacagacagaaaactgaaataaagaacaggaatcacaggaggaaggaagagtctgaaaagggcccttaaattcagatggctgcttatgccttttcaaagcaattaaagtgttcctgggtgttatttacacctttaaatttgtttccaaactttggaaatacttttctatttcaatctgagaaactgtttcctcagaaagtaatcgatcctccttgacgttgtacccccagaagctggtctacccctcgctaggcctcccagaggccctcaaggactcctagttgattccgagtcccacgtcagggaactaccaccttacataagtatactttgcggggagaaaggcagataagaaaatagggcgccaaaccttctccaccaacagccgtcacaccccacgaggactgtcctgcgggggctttcccctgggagccgcagctgttctgccgtatgggggaggggaacgctttccaacagtcatctcttcctcttcaggccgccaacgccgaccgcaccacagtctcctccgcccaagccctgtcccctcccccgccccggcctgggtcggagccaaaccccacaggaatgcagcccggtcacatgcgctgcggcggtggacgtgcctctccccccgcgccccaaagagacccagcgccatcttgccctgacgcagttacaaaagtcacgggagaaatcctgtctcctcctccgcgccagcgccccaaagttttgcagaggccgagccggggccctcacctcgcgcagggacagtagaaaatggtcagggaagagccttgcgattcccttcgccactgcttgggttccatatcggccgcggcagcaacgatcaccatcgtcacttctccctctctacctttgcaacagcctccccctacggctttggccccacccgctgctgcaggatgaggtcatcgccagccaaccacgacgcgcccgacaggacacatcaggcgctgattggctgccgagaccgcctctgcctctccccactccgcttcccccagcgctctgggtcgctgcggggcaaggggaagacggaaaccatttcggggaaagacccccaaaacaagagccggaatcgccgtgtcattttagtggggaaacccttcttttattctttggtctcccccttttttcttcgagatcactgtctgtccctccctcgtttaatcaccgccatataaaggaattcccactcccctccccgcacattgtcccaccggtggggaaatccttccccgaggccaagagaagtataggaggcagcgacggcaactgcaccgacggcaacggcagctttttaccccgaagcacggtggcagggaggcggcgttgacggtggctgcatttttccggctgcttctccccccgacctcttccgtttcttgctcctccatcgagacagcactagactcgccagctccgcttttatccggtgcccggagcctgcgcactggagcctcctcagcccctagtgggcgtcgagtgacaccccaaccgggttcacccagcgctggaggccagactgggctgggggaggagggggagaggaacggggagacgggactggggttgtttgggagggggagaaggtgtatcgctttcggagggtgacgggagggagttcgttcccaagccctgctgtccttgttcgtgcacccaatactggcatgcccaagctcacctatatccagacttgagggccactgggggaaagggggaaagaaccagtcccaccgaataccgacacttcctcaaaccttcggtggattgttgaatgcatctgttgtcagaaagacagagattccgtccccctcaccgcctccagtttgctatcttcgagcctccgcggagaggcaacggcgggcggcagcccacaagcaaaatggcgccgggcagcttcatcccctccccctctgcccctgcggagcgggacgggcgtaccccgtgcacttgccgccgccgccgccgccgccgcggccgccgccgccgccgccgccattttcccagagcgagaggcagtgacactgagcgggcgcagggggccgagtcggagaccgtgccggagttcgggagcggcaacagagtgggcatagacactccgagcagcctcgccgtcgtctctgcgttcctgttgactgcctggctgccccctcccctactcctcggttcctggtgaagaggctgcgcgct

SEQ ID NO: 39013 - DNA, 2300 bp, Homo sapien
taagctaaaacacaatacaaaaaccaaaatccacaaaatgggtcaagaggtggttgggaaatgtcttactctagattgaaacatttaatcatataaaatagatgatacttatacagttactaaacattttaatctactttggcatattgaataaaagatggttggattaaaccaaacaaaaactattattggtacccaaataatttttttttaatgttgaagcgcacccatcatcaccactgaaatttgcaaggctgtttttttttttcaaaagtggagacattttatttgcctttcaggaaaaacgaatcaaattaatcagctaaaacacagcactgtaatttgcagtaaaaaatcaacacatttttgtaactggctcggggaaggaaaaacagcccagtcttttcatgtaaacataataagcctgtaatatgctgcagacaaacgcactgcatggggtgtggaggacccgagctgattagattaccacaacatcagcctggggccgccatttttagaatctgtaaaggacaaaagagggaaatttcagtttttactccccatctcagaaattgaaggaaaaaaacagactattttccaaataggtattcatgtctccagcctcgagttgaatgcacctcacttaattctctccaaggtctccagaactccaaacaccttaccttattcacatctctaaaaagggaacaaaataggcaaaacgaggtttactctagagctaactctagcgattcctctttgactttaaattgtatcgttcttaagacagagcccagcaaggacggatctatacggaactaaggccagtagaagagagcactctggattgtttttttctcacccccaccccgtttagcacagtgaaccgtttgtttctcatctgtgtctgctgccatagaatttgtgccaatcccttggtcaaaataagcttttctgaaatgagccatattgtagatcctaaggctccggcacagtaaaggacggcggtaatgcaaaaggagtgggggaggagactgagaaggctgggtactggggtgaccacttcaggggcgggtttaccctctccaggagaggatgaggagctagctgtctcgctctcccacaaagagagatgcccagggcgttcttcttacccccttcgtattcatgtgcacattataccagagactgcccgtcaagaaatggaagaagaaaatggggcctatatggcttttcagcacctgaacaagacgcggttgagaaaagggagcgctggcagctcctgggaccacttcgacacaaaccctactaacagtcacaagcctccgtcttcactcaagcggccttaacccgctgccaatgaggagtgcgccccctccctaactcccccactctcaagggggtttaactgccagttacccctttcccaaccctaaaacccgccataatgctccatttctagggtcagggagaagaaagaataaattcgatttaagcaagcaacgtcttgcgccggcaaagacacctgagagtcaacgtcggctcccccagcttaaggataaagatgagagacctccctcccccttgaaacacaagtaccccaaccccgcaagccccaggaactcccatggagacgacaggcactaacctgtgatgttcacacacgagacacccgaaccccgttatgtgctcgacccccaaggagtctctccgcacctccgcgaacaggcgaccccccgacagcagccactgcggacacaggacccggctccacacaccccctccccaaacagcagcgcgcagcctcttcaccaggaaccgaggagtaggggagggggcagccaggcagtcaacaggaacgcagagacgacggcgaggctgctcggagtgtctatgcccactctgttgccgctcccgaactccggcacggtctccgactcggccccctgcgcccgctcagtgtcactgcctctcgctctgggaaaatggcggcggcggcggcggcggccgcggcggcggcggcggcggcggcaagtgcacggggtacgcccgtcccgctccgcaggggcagagggggaggggatgaagctgcccggcgccattttgcttgtgggctgccgcccgccgttgcctctccgcggaggctcgaagatagcaaactggaggcggtgagggggacggaatctctgtctttctgacaacagatgcattcaacaatccaccgaaggtttgaggaagtgtcggtattcggtgggactggttctttccccctttcccccagtggccctcaagtctggata

SEQ ID NO: 39014 - DNA, 2300 bp, Homo sapien
cctctcctaatgctatgtgataagaagcacacagtcccacctataaaatatcatactgaaaagaaaaatagaaaaagagaaaaggaaaagaacagaactcgaagctaattatatctctaaatccaaataccagtttatcagaaatatgggggaagtagaatattacatgacaccagaaggaggcaatcagccaactccagaatgttaaaacttctataggctgaattttccagtttcttcaccaggtctacagcacaaaggaaaacaaattttaaaagagggggttgttatagatgaagagagattcaagagacatttcaagcaaacgcaatgtgtgaatttcgatcggatcccaatttgaacacatcacaaaaagatttttgagacgagtgagaaaatttgaagatgaactggatactttatgttaattttgttatataatagtactgtagcagaacaaaaaagtcctcaactgttagtgatagatactgaataatacatgggtgaaataatacatgagagaaatgggaatttgttttaaaatacttaagaggctgggcgcagtggctcacgcttacgatcacagcacttttgggggccaaaagggaggatcacttgaggccagaagttcatgaccagtcggggcaacacagcaagatcccacctctatcaaaaaatgaaaaaattagctgggcatggtggctcacacctatagtcctaggcttcagctactcaggaggctgaagcaaaaggatcacctgagacaggcaagttgaagatgcagtgagctatgatcatgtcactgtactccagcctgggttgacagagtgagactctgtatcaaaacaaaaacaaacaaaaaaaacaactcaaagacagatgaaacaagattggcaaaactttgaatactgttgaagctaagtaacggccaactgggattactattctgttttacatactgtcatgtatatatctgcatttccatactaaaaagtggaaataaaaaagttctccaagcatttttatcttacatttagaatctctatacactgggtgccagcaagaatagtagtctatcgcttttcctcccactcacaaagatgtcctgggcatttctaaacccctatttgtagaataactcttaacccttactccttaatttcaacacatttttcaaggtttatttcaagtattcttaagagtcctttcttgactgcttcaactccataattttaggattcatgaagcacttatttactgtattgttattacttttcacacaattatttttgtgctctgctaacaatcttctgtcatgcatctattattttttcttccaaactcttttataacgaggcattttctccagtagaaagaatgccatattgacctctcttgaacttgaggttttttatatgtaaagtgggaataaggatatttgttttaccttcttcccagcaatatgaagttcaaatgttataaaggatgtgaaaatgcattttctcaactataatgccttacacagatacattacactacttacttgttcagaatttgttctcaagtacaactacaaatactctgtctgaagctccttaaaaattgttttataactttagttcacaataattcaaacttccaatagagtggttctatgtacaagcccaatgacacctgttttaaataaatcactaattttgctagaggagacagaacctatcaccctagtaaaagaaatttactacaaataacatataggaaaaacccagtaatgctggaggaagacaataccccatgcatatgcaaaaagacaagaaaacatggcaggtggaatcttcaagtagcatgtaaaggtcagacttcaggaatagtgtttattcatgtaagcagtctctcaaaagcaagtaatgtctaaacccttgtaatagatagagccagattttcctttggaggtttggatttagaaaaacttcacaataaactgtacctctctgtgtgtttataacataaacatctgacacaaattcaagtacttgcactgaaatctcatggcaacatttggtataaaatggtagtcatccggaatgattctaaatatacttaattttttttcctagctccaaattaaatagcaaatttttaaaacatcaaaaagctcagagacccctggagactacatccatttaaaccactttgatagcactgattaaacaaatattgagggcttaatgttcactagcaaccatcagagatacaaagataagacactgtctctgccttcaaggaacttacaataatat

SEQ ID NO: 39015 - DNA, 2300 bp, Homo sapien
attgtatttttagtagagatgggttttcaccatcttggccaggctggtcttgaactcctgaccttgtgatccacccgcctctgcctcccaaagtgctgggattacaggtgaatattggttttcaaagtacagtcatgcacacataacaacgtttcagtcaacaccagaccacataatacaatggtggtcccataagattatattggaggtgccgtctacacgtgtaccattttttatcttttttattgtttttttactgtacatgtttttttctctttttagagacagagtctcattctgttgcccaggctagagtgcagtgacatgatcatagctcactgtaacctcaaacttctaggcccaaacagctctcccacctcaacctcccaagtagctaggactacagacgtgtgccaacacgcttggctagttttttttttttatttttaatgtctgtagagaaagtcttgctatcttacccaagctactcctgaactccaggcttcaagtgaccctcctgtctcagactcccaaagtgttgagatcataggcatgagccaccacacccagcccttattttctatgtttagatgtgtttagatacagaatacttagcattgtgttacctacaatattcagtgcattgtgttacctacgatattcagcgcataacatgctgtatagatttgtagcctaggagcaatagttatgccatttagcctaggtgtatagtaggctataccatctaggtttgtgtaaagtacactctatcatgttcacacaacggtgaaatcacctaatgatgtatttctcagaatgtatctccaatgttaagcaaagcatgactatattcagaacataatggagactcttcacaatctcctttagaaccattagataacctcagtttgtatctcctctttttgctgattctggcacacagcgcttacaacagcagccactgagagctaaattgagacttcgtgaagggatgacagtatattaagaagcagttgactgtaaaaaatgttttttatgctgctagtctcatgactaatcagaatataaccactaaatatccttaaactaaataatagtgcaaatagtactaagttctaatgtaaagttttaataggaggtaggataaagattgtcatgaaaaatttttcaagtgatgttatagttttgtaaaataaaggcacagaaacaaatcatgttattgagtatttgcaagggagagattaattttagtgtgaactgacctcagatgtaggttcacaaccttgttgatcaataggaattaaccaagtagagctcaggaggattggtaagagtaaagaagttgggaaagtgatgtatgtaaaatgctaggccagggagcttgtaagtcaacaacagtgggcaaattgtatcagtagttgatcagtctccatcatctaagaccagaattgctcatcttacagatagctgtttatgttttttttcaggtataaatcctggtttattttgaaacttcctattacttaagtttactgacatttccaaggctttattatattaatatctggtcacactcaacacatgcatatatttttgaacactgaaatgcatacttcagttccatttgaggtccatatagattctgtgtgttttagtcttgcttaaattatttctactacttctttgcacccctttgctagttttctcagtgccgtagggtttattaaataataattggactctagtaattttttttaatgagagagagggaaactatatttgaaattggattgggacatttattttacttaaacagaagtttgcttatgacacataatctagatgggatatatcttatctatagtgtatccacctgctgtaagtagatactgtatttgtatagccattattttgctgtaagtactttatcattttaattaaattgattaagaggaaaaaaaaagaatggaattctctttgatgcaactttttccccccagaccagaatccgtagaagctagccctgtggtagttgagaaatccaacagttatccccaccagttatataccagcagctcacatcattcacacagttacattggtttgccctatgcggtaagtgttaaacacttctttgaaaaaacatttttaaatttagagattgaaagtagatgcatgtgatactgtgcttgaaacggcatgtttgaaaagcatggttgtttcatactatcaaaataattaggcgtttaatttttcattaaccattaagcgattaaagttctataaaagtgaactgtttc

SEQ ID NO: 39016 - DNA, 2300 bp, Homo sapien
aacaaatcatgttattgagtatttgcaagggagagattaattttagtgtgaactgacctcagatgtaggttcacaaccttgttgatcaataggaattaaccaagtagagctcaggaggattggtaagagtaaagaagttgggaaagtgatgtatgtaaaatgctaggccagggagcttgtaagtcaacaacagtgggcaaattgtatcagtagttgatcagtctccatcatctaagaccagaattgctcatcttacagatagctgtttatgttttttttcaggtataaatcctggtttattttgaaacttcctattacttaagtttactgacatttccaaggctttattatattaatatctggtcacactcaacacatgcatatatttttgaacactgaaatgcatacttcagttccatttgaggtccatatagattctgtgtgttttagtcttgcttaaattatttctactacttctttgcacccctttgctagttttctcagtgccgtagggtttattaaataataattggactctagtaattttttttaatgagagagagggaaactatatttgaaattggattgggacatttattttacttaaacagaagtttgcttatgacacataatctagatgggatatatcttatctatagtgtatccacctgctgtaagtagatactgtatttgtatagccattattttgctgtaagtactttatcattttaattaaattgattaagaggaaaaaaaaagaatggaattctctttgatgcaactttttccccccagaccagaatccgtagaagctagccctgtggtagttgagaaatccaacagttatccccaccagttatataccagcagctcacatcattcacacagttacattggtttgccctatgcggtaagtgttaaacacttctttgaaaaaacatttttaaatttagagattgaaagtagatgcatgtgatactgtgcttgaaacggcatgtttgaaaagcatggttgtttcatactatcaaaataattaggcgtttaatttttcattaaccattaagcgattaaagttctataaaagtgaactgtttctcttattattttgcaatttatgctgttaatagtttgatattatatttctttacttcctaaaagaatgcagataaggttgtattgtactacctactattaattttgaattatatagtaattaattttgttttaattttttgatttttagtttttgaattatatagtaatttatatagtaaattttatagttaccatttattgagcccttgttatgtgtcagacatatattatttaatcattaaaaacaacttcatgagatgtagttttcatcttttatttcataggtgagaaaataaaagcctatctaacttattaaatattgcatatctagtaagaggcagcatttagattcaaacgtaattacataacaacacatttatgatactatggaggtagaattatgagatacttactacttggaccagaataaaaattactaaatttaaaaaactatattatatgttttatagtgataaatatgtcttgttttattattctttaggctccatatttctgagatgtgtgtttttctttttcttttttttttttttaacacttctattctcacatcttaataccttctttcatcttggaggtggagctatgtatgtgaccataggaacgtgaagatatgatttggtagggagggaatgaaatttggatgtgaatgtgaccactcccactttgtagatagatatattcacttactgctgtggtttaataactggcttcaccaagtcatttttttaatggtattaaggaaggaatgagccagtctcatatctcttgagtattgaaattaagggttgaattttatttaagttgcttggtttatatcattgttgaaattaaataatattgtgctatatttgtgtttaattattcaggaccataattatggtgctcgtcctcctccgacacctccggcttcccctcctccatcagtccttattagcaaaaatgaagtaggcatatttaccactcctaattttgatgaaacttccagtgctactacaatcagcacatctgaggatggaagttatggtactgatgtaaccaggtgcatatgtggttttacacatgatgatggatacatgatctgttgtgacaaatgcaggtaaaatattttacaccattattttatttttcttgaatgctgataacctttggtaatgttggaaaagataactaaagtcactttcaag

SEQ ID NO: 39017 - DNA, 2300 bp, Homo sapien
gttgaccaggctggtcttgaacttctggcctcaggtaatccacccaccttggcctcccaaagtgagtggtgtgagccaccgctcccagccaacaatgaccaacctttcaaacatcccacccttaaatatgtgacgtgagagtccatggaatacaacatagaaaccctgaaaacaggacacaaaggaccatacaaagtaaaggggaatggggagcacctatcataaggccatcagtcagtttgtaaagtcattttcaaattttagggcatggaaagtataccatattttcttaactggctgatatatcaaatgctaaattaccttcactgacagatcaaatgctaaattaccataatttgtaagaaaatatcctgtcctaatttttatacagataaaagatttgtaaatagtacaaggaatatatatcctaaatttattttaatgagaaccttattgtacgatagcagtgtgagactgtagaaatagctaccagtggtaggtttttttttttttttgcataagcaatttatttggtgctatagtaaggtttaaatttgtacttttattatatttcaaatcatgagaggatacatttagctaataaaagacattctgaacagtaattgtggcattaaaatttattaatagttcagtgtggcattattaaaatattattacttccaaaatgttcatatttcttaaatgtcatacattcttaaatctctaatgaacaaccaataaaaatacaagattaatggaatttatttaaatggcaatgaccaaaccaaataaaaatgctcaatggcacatcattcgctaacttcaaagaataatgtaaaagcccatgtaaaggcagcaacaattaccatatgcagagcagctgtcactaagcccaaactactggcttcccaacttaccatcttccttttcctttctgcaatctgctcctctgattccatttctacttcattactaataggagttttttcttctatatcatcaataaaatctggttcctgaaaaatggaaatgacttctttatacaaactattattccatctatacaactagtgacattaaactattttaatgtctttcaaccacaacaaattcaacatgtacacagcctatttaaattatttaagaaatttaaaactggtttcctaattcaagatacttttcaaaattatgcaatcaaatactttcgctttttaaattttagccaatcaagtttttatcaatataggtcaaatatggtagcatggccttacatttataaagttcccaaaacataaacatataaattatttcagaaaaacccacaaatacccagtgctcaaaaagtgtttgttcagttgaaagtttaagggaaatcatttctagaagataggcccctggaaatgagcaaaaccttacttaattttcacattttaatgatccctcctgttttttgtttatagaggacatataacaatatatttactggtggggcaggtagactttggccagactttacccccaaaattaccttatatgttcttagtgaattttctctcaaaaattttatttgctgttattgtgacatgcttatagaatttataagattaccagcatccacatgtttaaagaaagaaaattttgcagcttaagactttaaataagaacatttattatgaacataaagtgccatctagaagatttttaaaagttatctagtcttaggaaaatcttgtctgcaattctgcaaggatttgcttgctgagctgtttcttaataattcaacaaatactgtacaaattctagcagaacttgtattttacacttatgaatacttcattaaatgacagaatggacttaaaaatactttaaacaattatacatagaacaaagaagaggataaaatatgacagattattttcctttgtttattcaatttcattgagagcagagttcagtacctgattatttgatactgatagtctcagtggagaaagctttctttgtttagtttctgggctcttcattttgttggtcgttccttcacaatccaaagtaatattctgattttgtgtatctttttcttttgaaatatctttgtctttttttccttttttccgtctggtctcataaccactattgatattttccatggattcagaactacgttttagaacagggcactctgggttttctttgaggcatgcacagtccaccttgtacttactggaaagataaccagttaaatatttatttcaaaatataaaacaaaactggaaattttctaatccattttaagctgc

SEQ ID NO: 39018 - DNA, 2300 bp, Homo sapien
aggatgacttgagcccaggaggtcgaggctacagtgagccatgatcacgccactgcactccaggctgggcaactcaccctttctcaaaaaaagtactgtgcactgtcctcatctccaggagattctgatgggcagctattgtaggaaaacactgcctaaaatcagatttttctaacagatggaacatcttatacctataatagaagcggtagtaaacctaaatttagtgtgtttaataaaatggtactgacgtgtctctagttgtaactatattaaaaagcttggctgggcacggtggctcacacctgtaaactcagcactttgcaaggctgaggcgggaggactgcttgagcccaggggttgagaccagcctgggcaatatagcggaccttgtctctgcaaaatactttaaaaattagccaggcgtggtggtgagcgccttgtcccagctactcgggaggctgaagtggagggatcacacctgagcccagggggcggaggcttcagtaagccgagactgcaccactgcactccagcctgatgacagagatatcttgtctcaaaaaaaaaagtaatacaaatttcatgtaatataaatatttaaaaagcaaccatatgttttgttctacaaaataattgggtaaaaagtttcagaataacagtagataactaagaaatgtaaaaggacatactgatattttgatcacatatgaatgatttaaattacccaatttatcattttagataatacaccaatttcaaatctggtattagaatattcaagggagaatttggaattacatatataatgatccaatttttttcttttctctagcacttggttaatgaatggttaagtgagaagaatgagaagacaggaaaaccttcagatggcctttcagaaaggcctctacgcataactacagatcctgaagtgttagctacacaactcaattctttaccaggtctcacttacagcccccatgtatactccactcctaagcattatattagatttacttcaccattcctttcagaaaaaaggagaagaaaagaacctactgaaaacatttctggttcatgcaagaaggtaaacttttctttggaagtaaaaatgtagaatgagccaaatgccaactcattccttactaccatccatggtagtgaaatgcttttggaatcggctctgtatttacaggctatataaacagctacaaagtgattcctgttcattcatgtattctgttttattcagcgatggttgaaacaagctctggaagaagaaaattcagcaattttacatagatttaattcaccctgtcaagaaagatccagaagtcctgcagtcaatggtgaaaataaaagtccactactattaaatgacagctgttcccttccaggtagaatttttttttcagagttttggtttgagaaatgtggcagggcatacatacagctttataacaggcatatttctagttactggtatgcactttagaagagaagcacattggtgtatagattttctcttttctgtcctctgtattttttggctgaagataccagttcacaataccacgtatgctggggtttatgaatatttaaaggcttctggactggctgcttttcagacagacaaggactcttacaaatcagttaaagtaacatcggtacttgtaagatactttgagacccctaggcctataatccctccaggcaaggtaatgcttgctaattggggagggaaagggggcactgcttcatgttagtaccatttttttaaaaccgtgaaattcagttttggggtaaaagtcataactgccattgtttatattttatctttcccagaatgtgacacaaacagattttaacaaatagcaacagtgtaatttcttacagattattatttcaccaacagatttaactacaccactaaaaaaacgaagattttatcagttgctagattcggtttactcagaaacctccacacctactccttccccgtatgctacaccaactcacaccgatattactcctatggacccatcttttgccacgcctccacggataaaatcagatgatgaaacttgtagaaatggttataaacccatatattcaccagttaccccagtaactcctggtacaccaggaaataccatgcactttgaggtgagaaattttaatggagaaaaaaaaattcaacacttggggggatggaatttcttttaagagctctttcccctcctttaacaactagtgtgctgagaatacaaaaaaaaggttgtaagaaactaaaaatc

SEQ ID NO: 39019 - DNA, 2300 bp, Homo sapien
ctccaacctccaactgatgcgagggtgtcaggtccctcaagttggagttcactgagaagttaactcctgttctgtcagggctctttacccaggaagaatacattgtgccccgtccagagtgagtcgagtccagttggctgttgggctcagccctgtcatgtgcaggcgtttccagggttttatgtagggcagttggctcaactgcatcgagtcctagctgaaggtctgacacaggttccttttctccaggacactgcctgttgacttcagtcctactcctagggctcgtataaccaatagtctttatttcttgcagacccagttcagttaaattagaatttctaaaaggccccaatgttaacatggttgaagatctgtcatatccctgtttacaaattaaaaaaaaaaattacacaaataatcacatcttgggactgtttatttcaaaatttaccagtaatttaaggaaaacaatgtaataggaaaaaaactaccaattcaccctttttaagttaacttcttacctcttgactataagtgcgtctctttatttctggagaactttctggggaagaaatattctgtatataaagaaagaattagaattgaaaatttaaaaatacgtaagtatatccataataattatagaaatgaaaacaaaatgaaaaatatacagactttagttttagatcttgtttcctgtttatttccattccccaaataagactgctttaagatcaattagatacacacatttagtctactgtgtatatcaacaagatgaaagttatgctcattttagtaaaaataaaaacatctaaattcatataaatgaatttttctgatttttagtttcttacaaccttttttttgtattctcagcacactagttgttaaaggaggggaaagagctcttaaaagaaattccatccccccaagtgttgaatttttttttctccattaaaatttctcacctcaaagtgcatggtatttcctggtgtaccaggagttactggggtaactggtgaatatatgggtttataaccatttctacaagtttcatcatctgattttatccgtggaggcgtggcaaaagatgggtccataggagtaatatcggtgtgagttggtgtagcatacggggaaggagtaggtgtggaggtttctgagtaaaccgaatctagcaactgataaaatcttcgtttttttagtggtgtagttaaatctgttggtgaaataataatctgtaagaaattacactgttgctatttgttaaaatctgtttgtgtcacattctgggaaagataaaatataaacaatggcagttatgacttttaccccaaaactgaatttcacggttttaaaaaaatggtactaacatgaagcagtgccccctttccctccccaattagcaagcattaccttgcctggagggattataggcctaggggtctcaaagtatcttacaagtaccgatgttactttaactgatttgtaagagtccttgtctgtctgaaaagcagccagtccagaagcctttaaatattcataaaccccagcatacgtggtattgtgaactggtatcttcagccaaaaaatacagaggacagaaaagagaaaatctatacaccaatgtgcttctcttctaaagtgcataccagtaactagaaatatgcctgttataaagctgtatgtatgccctgccacatttctcaaaccaaaactctgaaaaaaaaattctacctggaagggaacagctgtcatttaatagtagtggacttttattttcaccattgactgcaggacttctggatctttcttgacagggtgaattaaatctatgtaaaattgctgaattttcttcttccagagcttgtttcaaccatcgctgaataaaacagaatacatgaatgaacaggaatcactttgtagctgtttatatagcctgtaaatacagagccgattccaaaagcatttcactaccatggatggtagtaaggaatgagttggcatttggctcattctacatttttacttccaaagaaaagtttaccttcttgcatgaaccagaaatgttttcagtaggttcttttcttctccttttttctgaaaggaatggtgaagtaaatctaatataatgcttaggagtggagtatacatgggggctgtaagtgagacctggtaaagaattgagttgtgtagctaacacttcaggatctgtagttatgcgtagaggcctttctgaaaggccatctgaaggttttcctgtcttctcattcttctcacttaaccattcatta

SEQ ID NO: 39020 - DNA, 2300 bp, Homo sapien
actgcatattataaccatcagcttttctgcactcaacctaaagtcctttggaacccatcgaaaggtcaatgttattaccttgctcatttttggaggacttttacaagtattttgagaagtatctggggatggacattcattcgtagttgtgggttctggattttcaggatcagggtctataaagcagaagaaacctatagtaagtataaaattacacaataaacactgttttaacaccacaaagcaacatacattctactatccaaaccaactttttataaaggctctcttgtctgattttaaaatttgttaagaataacattatcggtcatctgcttactgaccttccataagttcactgaaagaagggactgggcccttagcttgcaactggggtatgtgatttgaatgagatgaaggtgaagactgaacatgactcggtgaacatgagacacatggtgattctccccctagagatgaagcagagcagacccaaagagaacattagagctgcaaagaacgaggatgcagagtgattaactgattccactttctggtgaaggaacaagctcacttaccactatctttatcttttcggtgatcactgagaagtaaagctctctgataactcctttctctgacttgttccactgaagttgaggcagtcctttcaaagaaaaatcacattatcctctattgaaagaaactactgctagttacattgttgcttcatagtcaacatgtactgtcagaccaaggcttttgatctactgggaaaatactttggtgttaacctttgaaaatagttaatcttggcagggcacagtggctcacgcctgtaatcccagcactttgggaggccaaggtgggcagattacaaggtcaggagtctgagaccagcctggccagcatggtgaaaccccgtctctactaaaaatacaaaaaaaaattagccaggcatggtggcgggcgctactcgggaagctgaggcaggagaatcgcttgaacttgggaagtggagcttgcagtgagccgagattgcgccactgcactccagactgggcgacagagcaagactccagctcaaaaaaaaaaaaaaaaaagttaatcttattttgctgactgctcccagaactgagattattatccttatttgaaggactcaattcctttgtctccagcaatttattggtgaaaagaaggcaaggagttgaagataatatattgacattgagaatgtcacttcaggttaccaaaggtaccaaaacatgcccctaacaaactgctatcaggattgcatgctttcaggtggaaaggggaccaaggagcaaagtgagtgtggctgcctgccatttgccaagatccatcctatatgcagctgctcctattccttctgaagaagcactaaccctggttgttctttcaaggtaactggtaggggttataaaggaagtctgcagaattgttgaatctgataaaaattctttggagaggatatgtgtgtgtaaagtatgaataaattaccaaggaataaatacaatcgacatttaagaacacaggccatacacagctggcttaaaatcctattagcagagagaatcttttaaaattgtgaccacgaagcactatcagcttagccttgggagaacaacaaataggaagaatacttgaacaaaagcttgttttttccagagtagcatacttcacaatgggcttaccattgaacttctggttcattcttctcactagcagtagcatccttaacagggcagttattgctagtttcttcagaagtggcattataaactgtagctggtgttggtaaaggtaggctagcagtgtggtccacctgctccccattgtcattactgctggcacagccatcaccattgttgctcaagcttccacttgcatggggtgatacactaatgagtggaaagttctctgtcttagagccacttttcctagcttcacgttgtctcttacggtattctaatagagaaaccttaagcaagaaagatgagaaaaagcaaatcttttattcttgttttttatgtcagaaccaatgcattcttttttgtctaaagagaattactatatttacattaggaaaattattttaattgattctgaacaaataattaacaattaccaaatgcctactatattccaggcattgtacttagatgatttacatacattatctcatttatcctcacaacaaccctatgaaataggtatattatcatccccattttatagatgaggaaattgagtaactcactcactcaaggtcacac

SEQ ID NO: 39021 - DNA, 2300 bp, Homo sapien
agaatatttttctggcttcaattttgtgtacataaattcttgttgtccatttagcatagctatgtcaacctgagttgtatcaacagatttggagttagttagaaaaggcctgatggtgggggaagaagatcaagtgacctgagtattgggatatctttatttctggggcggggtcggggaggtggtgcagtgaagtgtggactgtgcttctcactcttcgacaccatgatctgtgcctttgtgtgttgtcaggcaagcatggatactaaagggctgaggctcctgggactgcctggggctctcttcacatctcctttactgccatcagggtgttgtttagatcatggacccagcctgttaagcttttgaccctggtgtaggggtttaatcatgtgattcctagactatttgctgcataccaactgcagtatttgatttaaattatagaaagcttgcaaaatagattccaaatatcgatgtacatctacattgttcatttcattatattttaaacaaatttggtttaatgactgtgatatgtattcttttccattttcttaagtgatctgttggtgcttgagcttgactgtgtttgagatgtattagtatttcattttagataaataagagaaatggctcagtatgagtaacttctgctgtgacttcaggagtcactcatttgtttcagtggcataaacttactctagatccttgtgattaagaagctctgattaatagtttttgaagttggatagccattaaaagacaataattatttcactttgcaattcgaatgacctacatgaaggcatgtgtctgttttctgctaaatacagattttgtttgattttattttagtgagtacggctccacagcagaaacctgtaagtacttacgcatattactttatatgcaccatgttaaaagagaccgtttattattgagttgttcaaattataaaaaagttgtgtatttaaagggtagacacatttataaaagctgtgtatcctcaaataggtaagacttaatgtcttgttaattttttttttttttttttttgaaaactgagtttcactctgttgctcaggctggagtgcaagtggtgcgatctcggctcactgcaacctccccctccctggttcaaacgattcttgtgcctcagcctcccgagtagctgggattacaggcacctgccaccgcacccaactaatttttgtatttttagtagagaggggtttcaccatgttggccagactggtctcgaactcttaacctcaagttatctgcctgcctcggcctcccaaatttctgggattacaggtttgaaccaccacgcccagcctgtcttgttaagttttaatgatctgtgcagagttgggatagttagagcctttcaaaaattgtcttctttatgcattttctggactatggtggccaagtttagtgaaatgtgaggtgatggagttgaagtatttttatttcaaaaccactttacattatttctgattggctgctaagttacctgtttttctgaagctgttgttctaattttttccatgcggatgttaaataagaaagagactgatctattttgtggtcctgtcaaaacactatgtccttattagatactgggtgtggtgactcacgcctgtaatccctgcactttgggaggctgaggccactagatcacttgaagtcaggaattcaagaccagcctggccaacatggtgaaatcctgtctctaccaaaaatgcaaaaactagctgagtgtgctggtggacgtctgtaatcccggctactcaggaggctaaggcagtagaatcacttgagcccaggaggtaacggttgcagtgagctgagatcacgccactgcactccagcctgggcgacagagtgagactccatctcaaaaaaaaaaaaaaaaattagccgggtgtgatggtgtgcacctgtagtcctagctacatgggaggctgaggcatgagaatcacttgaactcaagaagtggaggttgcagtcagctgagatcacgccactgcactccagcctgggcaacagagactctgtctcaaagaaaacaacaacaacaacaacaaaacactatttttactgagacagctcttgatttggaatgtaagttctggaacaagagggagctttaataattaagcttcctggcctgctgagaagctcaagttgtttcccatagttcttccctggcttgagctgcttgaatttactgattgattgaaaggttggaggctgtcattgccagtgctttgcaagtcaggtaaccatga

SEQ ID NO: 39022 - DNA, 2300 bp, Homo sapien
aatctcttttctgaagcagcaagttgatacatggagcacaattctctaggaagggaggctgagatacagattaaagttaagttcccacctacaataacactacagtgataaaaatggggatgttgaggttgatgataagaaggagaaggtggatttaaactatggaaaaaccatttaacattggacaggcctggtatccttcattaactaattcagtaaatatttattgagagatgaagcagggagggctcatggcatcccaggcacaatactactttattttcatgggttatttcattaaatccttgccacagcctttcagatatatgttattatcctcattttacaggagaggagatagaggctttagagagtttaagtaatttctccaaggtcatacagctattaaaaatggcagaggaggcctggtgctgtggctcatacctgtaatcccagcactttgggaggctgaggtgggcgcatcatctgaggtcaggagttcaagaccagcctgaccaacatggtgaaaccctgtctctactaaaaagacaaaaaattagctgggtatggtggcgggcgcctgtaatcccagctacccgggaggctgagacaggagaatcgcttgaacccgggaggcggaggttgcagtgagccgagattgtgccattgcactctagcctgggcaacgagtgaaattccatctcaaaaaaaaaaaaaaaagggcagaggaggctgttcctaaatccaaggcagagtctgagctctgacaccctgctccttccaaaatgaggggaggggccctgctgagggctcactgtggcgccatgtgcctgatcctcaaggtgagtctcagcaccaccccagctataggcgctgtgctctgctctcccagtggctcggcagcttggctacaccctgtggtagattctgctctctcatcaggtattcatgccgcttttataatgctcattgaagttataagcttaaaaatttgggaaaaatccttattttaacaacgctgagaggatatttctgtacaggtccattgtattttatggaactaatttttattcctttttcctttacatcttctcatattcaactttgatttatatagtcaacattttaaaaaaaatttgctttactgcttaaaaaactattgaggtctattttgaaatcctggtactgttgatagcattttattggcactaatttattttttagtatgtgaactttttattatgaaagcacacttcagttttaaaaatccagttggaaatacttattagggataggaaaacagctttacacatgaaatagtctgggtaataggaccatgtcagttttattaacttaaaattatgtgctttagtcagtcgttgatgttttaaaggaaacgtgttagattgtctccttatcttttccctctcttattttcacccttccttcccttttagtctgttatctcccttccaaatcagtatcagcaattatcttttaattaagttgaactggtgcttacattcctgttgtagatgtctattgtcaatcctttcctaaaaggacaaatatattatctctgctcggtaaatgggtgttgctgttcacttgtactgtactgctaaggaggaggggaaaattaaggtataaaatcagaagtctctttctagaggagttaggaacactagatattaaatgtgtctttaattaaacacaatcaagaaattaaaacaaaggttaaacattttgaaatctatacatcggggttctggtttaatatttcattcttaagtgacaaaaatgattcactgagccatattttttagggctagtgaaatagaaacagccaagggttgcatatctgtttattacagcctgtgacgtgattacccaggcttctcaaattatctagtatatttaattcagatgttcaagatttcttgtttgtattttattttgctaaattgaaaatcatcttgtagaaccatgctagttctaccttaaaaaagaaaacacccctctgctttaaagaaatggtacttcctgctttcataaacagtcatgtgcatagtttagcaaggcctgatgcctctggagctttttccctttatagcaccattgaatcccagtcctaacagaagtactgcgaatcttgtggcctcattctgaacaaaagggattagagaagaaaaatctcttgatataaggcttgaaagcaagggcaggcaatcttggttgtgaatattttctgatttttccagaaatcaagcagaagattgagctgctgatgtcagttaact

SEQ ID NO: 39023 - DNA, 2300 bp, Homo sapien
tctccagcacctgttgtttcttgatattttaatgatcgccattctaactggtgtgagatggtatctcgttgtggttttgatttgcatttttttgatgactagtgatgatgagcattttttcatgtgtctgctagctgcataaatgtcttcttttgagaagtgtctgttcatatccgttgcccactttttgatgtggttgtttgatttttttcttgtatatttgtttaagttctttgtagattctggatattagccctttgtcagatgggtagattgcaaaaattttctcccattctgtaggttgtactcaggtcatttttaattttatactgacatgaagcttagatgtgcattaatttccattagttgtattttggccttgaaaatggttacagtacaaatgaaaatattacaatacattcctcctgtggctattcttctgtttccataagtcgtggcagaaaatcagttttgttttatagtcacatttgtgtttgtgttgaaatattagtatatcccagccatgatgtcagatgtataactatacaagtcacacaagttttctatgtgcacatagtgttctaaatatgtatatatatacttttttttttttttttttttttttgagatggagtctcgctgtctcttgcccagtctggagtgcagtggcgtgatcttggctcactgtagcctctgcctcccgagttgaagcaattctcctgtctcaccctcctgagtagcggggcctacagatgcacgccatgtattgtatctgtacatggtgatgcccggccaattattgctaatactgtgttttaaaaattaatttgtacatttgaattaagttgaagcataaagaatttctctgttaaatatttattatatttaatttttgatgggcacttcatatgcttgtgactggaaggaatgatttttattttggaaatattttagatctatgtattgtttgttttgtattcttttttgagatggagtctctctctgtcacccaggctggagtgcagtggcgcgatctcggctcactgcaacttacgccgcctgggttcaagcgattctcctgcctcagcctcccaggtagctgagattacaggcaccctccaccacacctggctaatttttgtattttttggtagagatgggatttcaccatgttaaccaggctggtctagaactcctgacctcagatggtctgcctgccatagcctcccaaagtgctgggattacaggtgtgagccacggcaccaggcctcatcccattacattctaaagattgtgtcaaaatgagttatgcttcttgtgaggtgatgggaccgttatatctctccagtgtctgtggtacaacagactaaaagatgaatatatttaatttcttaatgtttcttttgctaattttccttagctagcaatatatgtgttagctttagtgtctttttaggttcagattatttttggtagaccttaaaaaatgagaagataaaggatatccgaaagaagccttaaggtagatcctttacttggaagtatcaggctcttccacctgactccactcataataaaaaatgaaaacaaaagtggttgacgtagcaaagattttaacttttaaagcttgatagagctttgcaggtttaggaagataacttcccagtcttcagattgggatggtgagactgtgtggccccacctccatgcaggccatgcagaacacaggactgtagagaaacagaggctcattctcagttccaacaggaggaagagtgcccactgggcagccagtcctgttagggcaaggagcagcccttctggagacatggcagatcttaacgtttcagtgcatatggatgggggagggtgttctggggctggtggaacgtagagggcattcatggtggtgaaagtgggatgtaggagagggtttgggtgatgatggataactgggttcactgtgtgctaactgagctgaacagagtatgaggcgttggcctacattgtctccctggaaagactgctgtcacaggttctcttgctggcattgtgatgcagggctgcgtgaagccctccttacagcgggaggtgggctctgttggagtgggccctgtgcctctgctgtctcctactgctaacgtgaggcatcagctgaggagggatggggatgaactattttaggcagggggttgcagtataatctgagccatgctatcctatggggcctttttatttgatacttttgtttgcttttcctttttgtaagagataccatcttgctgtgttgcccaggctgg

SEQ ID NO: 39024 - DNA, 2300 bp, Homo sapien
cctgtatcttggagaaataattaactgtaacatcaccagtaatggaacaaactgacatcatattttgatgcactaagatgaatacaacatcatctatagtatagccaacaaaattgtttaacttgaatctaatcatagggaaacagacaaatccaaaacagggaacattctgcaaaatggtggaactggattcttcaaaaaagtcaatgttataaacaacaaaacaaaacaaaacaaaaaaaggctgggtgccgaggctcaggcctgtaatcctagcactttgggaggttgaggtgggtggatgacccgaggtcaggagttcgagaccagcctggccaatagggtgaaaccctgtctctactaaaaaaaaaaaaaaaaaaaaaaaaacaaaaacaaaaattaactagatgtggtggtgtatgcctgtaatcccagctactcgggagactgaggcaggagaatggcttggacccgggaggctgaggttgcagtgagctgagattgcgccactgcactccagcctgggtgatagagtgagactccatttcaaaataaataaataaatagaaagaaaaccaaaacacaaaaccaagaatgattctagactaaaggtgtttaaaaagacatgacaattaaatgcaacggatgatccttaatggtagactaattgggaaaaaaagaaaatcagcgacaagggatattactgggatattttgcaaaattgaatatatatggcctgtatgttacagatgattacattgtattagtatgaaagtttcttggagtgatcatggaattctgattatgtgggagattatctttattcttagtagatatgtactgaaatatttagggataaagggtaacagtgtctacaaaaactcaagtgattcagcaaaataaaccatacacacagacacatagatagcaaatgtggcagaatgttaaaaattggtgaatatgggttaatttggctgttaattgtattttccttgtaacttttctatagggtttgatatttttttgaatataaaaagttaaggactcttcaaaatccaagcagagtttcccgttctgatttatcatccttagtgtaagccaccttgtcaaagatacagttgtgtgaccaatgagggagttaatagtcagaatgcgtatctttcaaaaactattgtaattatttacataaataagagaacattgcagttatctttttgtgtcactatcaacttgattcacatcttttgtaggcagcctgataaggtggtttgtcgacggccaggcctgaatttcgatcctggctggttaaactttttaacctcgttgggactcagtttcctcattgtaggatgcagaaaataactacttggtgtgattgttgttttgaattgttatacacctggtgtttacggaagcgagtttcaattcatgtgcaaaacctttgtcctaccttgaatgctatctgtatcttttccttcattaaactcatgcaatcctggagggcacttagaggtgggagagaaaatgacttctccaaggtcacaccgctaatcgcggacccaggtttcccagcttttggtcgtgtgccctttccacgcctgccggagaggaggaagcggcgctcatggggttgcaaggatgtagaggagcaaagggagagaagaggccgcgggaagagaggtggtgcgagacccgcggaggcgccggccaaggacgggcgcatggagcagcgggcggcgcgaccggccggggtgcggaggggagaggccgcggcggggagggagggtcccgcgggtccggtgcccgggagaggcgggcggcctgggccagccgcaggatcgcaggaggcggaggcccgggccgcgggctggggtgggggaggccgagggccagcgcggccatgggcggcggccacttctgcacaggtgggtggggcgggggcgcggggcgctgggcgcgcggcgctggggtcccgacccccggggccggcgggtgggggcggggcgggggcggggccggacgggggcgggtcttgctgggtccctgctggagcggcggcggcggcggcggcgcaggcgcggttctcgtctcctcccggccggcggagcgagtggaggctgcagcccagctcgtctcggcgcccgcgtcgccgtcgcgaagccccccgccccgcttccgccgcgtcggaatgagctcccggaaaggtgagtggcccgcggcgcgccctctccccgccacgcggccagcccgggcgggcggcccgaccgttaatgtgtgtcttctcttccccagtgctggcc

SEQ ID NO: 39025 - DNA, 2300 bp, Homo sapien
tccagcctgggcgacaagagcgaaactctgtctcaaaaccaaaccaaaacaaaacaaaacaaaacagcaaataaacaaatgtggccacaactcccccctcacaaagctgataatagaatggtgggtttggggctgagatagtagtttaataaataatgtgaagacatttttaaaatatggcatattcatacaatgaaatactataaaacaatgaaaagattgtacagacaacacatgggtgaggctcacaaacaaaacgttgaaaaaaaccagccaaatacaagagtaattagtgtagggttccatttccataaaatttaaaagcaggcagcatgaatctgtggggttaggaattagaatagaggctatcttggtaggggcagtgactgaggagagaggagggggacttttgggatactggtaatatgcaattgtctttttttttttttttttagacggagtgtcgctcttgttgcccaagccggagtgcagtggtgccatctccactcaccgcaacctccacctcccagattcaagcaattctcctgcctcagcctcctggtagctaggattacaggcgcgcgccactatgctcagctaatttttgtatttttagtagagatggggtttcaccatgttggtcaggctggtctcaaactcctgacctcaggtgatctgcctgcctcggcctcccaaagtgctgggattacagatgtgagccaccgtgcccaaactattttttttattcttaattttttgagatggagtcttaacctgttgctcaggctggagtgcagtggcaccatctcggctcaccacaatctctgcctcctggttcaagtgattctcctgcctcagcctcctgagtagttgggattacaggtgcctgccaccacgcctggctaatttttgtatttttagtagagacggggttttgccatgttggccaggctggtctcgaacttctgacctcaagtcatctgcctgcctgggcctcaccaaagtgctgggggaggcagagtttgcagtgagccgagatggtgccactacactccagcctaggcaacagagggtctcaaaataaaaaaaaataaaaaaaatttttttacattgaatctctttcattagttacaataaaatggaaagcaaattcttttttttttttttttttttaagacggagtctcactctgtctcctaggctggagagcagtggcacgatctcagctcactgcaagctctgcctccagggttcacgccattctcctgcctcagcctccctagtagctgggactacaggcgcctgccaccacacccaactaattttttgtatttttagtagagacggggtttcaccgtgttagccaggatggtctcgatctcctgacctcgtgatccgcccgtctcggcctcccaaagtgctgggattacaggcgtgagccaccgcgcccggccggcaagcaaattcttatactcagagagctcaagcatttgagaaatgagtattatatcagagctatatccatgttctaagacttggaagaaatggagcccagggtgttaaacttagcacagattatggccagatcttctaatctatttgattatgtcctggcatattagacattattctaaattttaatacagccccaggtaaatctttgggcatcatttttgaactggcttatgtaagagtctcctatactattttatttataacaaacttgtcactattggtgattttctctagacaatccagtccctattcctttttgttttgtctgaatgttgaactgaaaattccctttgatatctactgcttaaataaatagcagaataagagcctctaaagattctcacttgaaatcagaggcatttaaaggaaagaaggaatgaccccttgtggtgattttaaaatatgtccagcattctttgataatcctcccttccagaaagggacttaattccccttctttaagcatgtgctgtacttatttctgatgattagaatgtggcagaaatgatggattgtgacttctgagggtaggtcataaaaggcattgaagtttctcccttgttatctcttggatcattcactctgggggaagccagccactcaagcagtcctatgaaggggtccgtgcagtgaggaaatgaggcctctgcaacagctatgcaagtgaattatcttggtaacaggtctttcagcctccgtcaagccttcagatgactgcggcctcaagtgacatcttgactcaccagctaaactgctcccaaattgctggaccacaaaaactgtga

SEQ ID NO: 39026 - DNA, 2300 bp, Homo sapien
aaaaaaaagtagctgggcaaggtggcaggtgcctgtagtcccagctactcaggaggctgagacaggagaatggcgtgaaaccgggaggcagaggttgcagtgagccgagatcgcatcattgcactccagcctgggcaacagagcgaaactccacttcaaaaaaataataataaataaataataccatgtgttactacttaaagcatgactatgtagtatttatactattatcacatttttaaactgaaatgatagtaaatgttacgggtaagcattatgttttccattttattctttttttgaaagttcttttggcacttgaagttcttttacatttcaaatctgtatcatattagattttctgcctacttttaagtttaatgagatgatgtaggaccaggtgtaatggctaatacctgtaatcccaacactttgggaggccaaggtgggaagatcatttgagcccaaaagtttaagaccaatagtgagaccccatctctacaataaattaaaaacttagccaggtatggtggtgtgcgtctgtagtcccagctactgtcaggatggtgggaaagctgaggtgggagaatcactagactagagcctgggagtagagcctgggaggtcaaggcttcggtgtatagttaatatgatttgttgactcttcaaagatttgtgcatataaagttttatctttatgcaaaatttagtaaaataaatgttgtttaattttagagctatactacaaaattcctggacagaagtcatggatttaatattgaaaccccgctctggaggtgagaataaaattcatgttaagaaaataaatagaatgtatggctaggtattcatgaaattgctttgaataaaagcttttgtgcaaattgacgttgttgtttcagtattttatttgtttttacaataaaagtataagtttatttatatttttcaacagttgtatatgtatatttaagatttataatttatatcctattttagcttttttttttttttttgataaggagttttagtcttgtttcccaggctggagtgcaatggcatgatctcagttcactgcaacctctgcctcctgggttcaagtgattctcctgcctcagcctcctgagtagctgggattacaggcttgcagcaccatgcctgggtcattttgtatttttagtagagacagggttttaccacattggccaggctggtctcgaactcctggcctcaaatgattggcctgccttggcctcccaaagtgctgggattacaggcatgagccaccatgctcagccagaatgttgctggctggtctcgagctcctgacctcaggtgatccgcccacctcagcctcccagaatgttaggattacaggcgtgagcaccacgcccagcctctattttagctctttagcttgttcagtgtattaattcataactcaatataaatatattttaaaaatgaatatatatttttcttcactcactactaaatctgagtgtataagaatctaaaacattttacttgtggttattttgttaaaacatagtgtaatggaatataaaaacttggcaaaaacaccttgaggatttgcagtgtgaagaagtcaccaaaaactttccaaagagtatctctaaaatcatcttgaatgaaaaggattaaactactgattgtcaaaataattgtgctcactttgggtaattcatttgcagactataaaaagataaaattatctaattttaaggaaagtaacccgttaaacttgacattacaatggaaaaagagagaaggaagaaagtactagcgtgtttttgtcatgttgaatcagctgttataatgaacagttaaatagcttttacttttgacctgagggtgattgtatgttgacaaagccaaatagttctgtaaactttctacatttcccatctttgcgcttcctcagatgagtggtagctataaacagcacctatatttcaagtagcattttctaattttgtgttctctgtgaagtgtactttaagttatggaagtctgtctattgggtaagtcatttaaccctagctttttccccccgcagctgaaaagggctacttggttaaatgcagagaagaatgggcaaagaccaaagacccaactgctgccctcagaaaactacctgtcaaaaggtgtgtggaagggcagctgcttcgaggactttcaaaatatggaatgaagaatatagtctctgcatttggcatagtgagtgcaatttgtgaagtcaggcaatggctcaaggcgttttaatgctttttaaattt

SEQ ID NO: 39027 - DNA, 2300 bp, Homo sapien
aggcaggagattcacttgagccagggaggcagagtgagctgagatcatgccactgcactccagtctgggcaacagagagagactgtctcaaaaaaaaaaaaggaaagaaagaaacaacattgggtgttagtggtgacactagagataaaaaggggagaaaggcttttcagtactctgtttctctatatacatttcctattgaagaaggcaaggaatttctaatgaaaatttctatatattgatagcagcatgatacagatttgggtagaattccagctatatataacatgtcttttaaaaaaagaaagggaggaaataaaaagttagatgtcagtggaaatttttttcaggcaatgaaaatatgaatttcttttccttttctcttttttatattttccaagttttctgtaatgagtttacaaaatttttctgattgacaaaaataatgacctttttttaaatgcttgataccattctttctatgggatttgtctctgtccccatcccttttctcacccctctccccacaaaaagtagaaaattccacagatattattgttctgttactcatcagcatgtaaataacaagaggctttaagtatataaaatatggccaggagtatgcaatttgaacaggagcacgtaccattacactgaaggaagaatgcagagagaagagaaggacacgcccacctcacctgctgcagtgccttttcctttcagggggtcataggtgtgctgtatcttgttttctgtactgttccaagcagacaatcagtatctcatgatcctctttctactcttttttgttttgttgcttttttttttttttttaaagaataactgcacaaagacttgcccacctgaataagtgcttgatgaactttaagctagggaatttcagctatcaaaaaaacccactgaaattgggagagcttcaaggaaaccacttcactgttgttctcaggtaaagaactgcaggtgggaatgtagaccagagggtctggccagggcatcttgagtatgttactcacggttggtcataaggtcctggtgagctggtactaacagaacaggagtggcagcaagggagggcagagcagggcctggcagggctgggagagcagatacctctgtgagagcaaatacctctgtaggatttgtgtggacaccttgccccttgaaaacctagtgcagcctttggaaagacaccatctccttcaaatattgtagtaaaagacaccgagccggctgggcgcagtggctcacgcctgtaatcccagcactttgggaggccttggcaggtggatcacaaggtcaggagatcgagaccatcctggctaatacggtgaaaccctgtctctactaaaaatacaaaaaattagccgggcgtggtggcagacacctgtagtcccagctactcaggaggctgaggcaggagaatggcgtgaaccgaggaggcagaacttgcagtgagccgagatcgctccactgcactccagcctaggggacagagtgagactccaactcaaaaaaaaaaaaaagacactgagcctgtgattccacttaaagcgcctagaataggcaaatccatggacatagaaagtaaaatagtggttactggggaaagggtagggtaggggtaatggaaagttactgtttaggggtacagagtttcattttggaaacgggaaaaaatttgggaagtagatagtggtgaggattgtccaacattgtgcatataattaacccatttatgctagtgttccattattggaacactaagcatgtaggaattatttatatcctactgctcaaggtcatcgccaaggtctgattgcaaaaattcaaaaaattgcaacctctgccataaatgggttaataccgccaaattgcacacttaaaaatggctaaaatagtaaatttgacattataaatatcttaccacaacttaaagaaagaaagagcccttgggaggtagagagaaagctgcaggagagtgaacgaaagacttggaagccaggccgtagtcatttatgagctgcatccctgagtatttgactgtaactttttttcctctggataatttgtgtccctgtagaaatataacaggaactgatgaccaagtacagcaagctatgaactctctcaaggagattggatttattaactactatggaatgcaaagatttggaaccacagctgtccctacgtatcaggttggaaggttggtatttaatttcttttatcaaaaatagctttctcataaacaaagcagggtttgttggtggtggtgtttt

SEQ ID NO: 39028 - DNA, 2300 bp, Homo sapien
tccattgtttggatacagcacagtttattcagctactgaaggacatcttggtctttttttttttgagacggagtctcactctgtcccccaggttggggtgcagtggcatgatcttggctcaccacaacctctgcctcctgggttcaagcaattttctgcctccgcctcctgagtagctgggattacaggcgcccaccatcacgcctggctaatttttgtatttttagtagagatgggggtttcaccatcttggccaggctggtcttgaactcctgacatcgtgatctgcccacctcgggctcccaaagtgctggaattacaggcgtgagctaccatacccggcccgtccttaagttttggcaattatgaataatgcagctataaacatacttgtgcaggtttttgtgtgaacatagttttcaactcctttaggtaaatatcaaggagtgtaattgctgaattgtatggtaataatatatttctttttttttttttgagacagagtttccatcttgttgcccaagctagagtgcaatggtgcgatctcagctcactgcaacctccgcctcctgagttcaagcgattctcctgcctcagcctcccaagtagctgggattacaggcgcgtgccaccacgtctgggtaattttttgtatttttagtagagacggggtttcaccatgttggccaggctggtctcaaactcctgacctcatgatccgcccacctcggcctcccaaagtgctgggattacaggcgtgagccactgcgcccggccggtaatagtatatttcattgtgtaaaaaacaaaacaaaaaaacaaattgggcagggcatggtggctcatgcctataatcccagtactttgggaggcctaggcaggcaaatcacttgaggtcaggagttcaaggccaacaggcaaaaaccccgtcaaaaaaattagtctggcatgatgtcaagcactcgtaggcccagctactcgggaggctgatgcaggagaatcgcttgaaccctgcaacagagtgagactctctctcaaacaaaataaaacaaaacggaaaaactattagaggctgggagcggtggctcacgcctgtaatctcaacacagaggcggaggcgggcggatcacgaagtcaagagttcgagaccagcctggccaacatagtgaaaccccgtactctactaaaaatacaaaaaataagccgggcatggtggcgtgcgccagtaatcccagctactcgggaggctgaggcaggagaatcgcttgaacccgggtggcggaggttgcggtgagcagcgatcgcgccattgcactccagcctgggcgacagagcaagactccgtctcaaaaaacaaacaaacaaacaaaaagcaaaaaaactattagagcctgggcaacatagtgaaatcttgtctctaccccccacccccaaaaaaattagcctgggtgcggtgggatgcacctgtagtcccagctacttgggatactgaagtgggaggattgcttgagcctgggaggtcgaggctgcagtgaactgtgttcacgccaccgcactccagcctgtgcgacagagcgagactctgtcaaaaccaaaccaaaccaaaacaaaaaaaacctatgatccggtttcttgaagcagatcctatggcaagccatcaagccagagcggtaagaagtaggaagatggtgcttttagatccactacattcccaggatcaaatgtagaacaatatttagtccctaaagtgattctctttccattattgtcaactgcgtggtcggtgcaacgtgaaagggccacaactatgtgaaggaaacacttagaatataacaccaaaggaggcaatcgctgccttagacttcctaaagatctaaagaactcttagatgcttggtgaaatcgctctctgccgctggtgcgactcaggcgcggtcgcgaggaaggtccagggtgaacgcgcgtaggctgggagtccgcgttggggcgctccctggcttgcaggccgctccgagtgggtgggccgggggcggggccggcggcagggagcggactccgcccccggggcgggtccagtcgggccgcggcgcgtcgctgcgccgcacgtgtgcgagcccggccgccggtgagtcggctggagcgcatctggtcctccgcgcggaaagcgctgcttttgcctggccgccctagccgctggctcatccaagtggccttcgccgctctcttgcgtcccaaccagagcgctggccacctcgccgcccagctcacgccgcgcccgcgctcccaggctccgggtaagtg

SEQ ID NO: 39029 - DNA, 2300 bp, Homo sapien
aaccaaaaccaaaacaaatgacgacaacaacaacaataaaacagagtgactacagttaataatttattgcatattttaaaataactaaaagagtggaattggactgttcctaacacaaagaaatgataaattctcaagatgatcaataccccagttactcggatttgatagttacacattgtatacctgtatcaaaacatcacatgtcagacggctgggcagccatggcgtcctatatcgatgaacacgactgtgagccgttggaccctcaagcaggagactcgaaccaacatggtgctggagctcgtaaggtcacttttgaataggatggactttgaagacttggggttggtagtagattgggaccaccacctgcctccaccggctgccaagattgtggttgagaacctctccaggacagtcatcagaggctctcaaggctgagctcaagtgccccgtgtatcttttggaatctgaggaggagactgccattgagatgcttcccaacacctttttcattccagttgcattctgccctggctaagcaagacaaattcctgtcccttgtgccgccatgagctgcccactgatgactacacttatgaggaacacagacgagataaggctcgaaaacagcagcagcagcagaaccgactggagaacctccatggagccatgtacacgtgaggaggctggggctgagcgccggtcctctgtgtcttccctacaaaccttgaatcctcattaaaatttctttacccgtcccccgccccgccccagaaaaaaaggccgggcgcagtggctcacacctgtaatcccagcactttggtacgccaaggcgggcagttcacccgaggccgggagttcgagaccagcctgactaacatggagaaacatcgtctctactaaaaatacaaaattagacgggcgtggtggtgcatgcctgtaatcccagctacttgggaggctgaggcaggcgaatcgcttgaacctgggaggcggaggttgctgcgagcagagataacgccattgcaccccagcctgagcaaaaaaaaaacaaacacacatgtacactataaatatatacgattatgttcccataataggtaatttaaaaaatagtatccttgtttttttttttttttttaaatgagacggagtcttgctctgtcgtccaggctagagtgcagtggtgcggtctctgctcactgcacgctccacctcccgggttcacgccattctcctgcctcagcctcctgagtagctgggactacaggcgcccaccaccacgcctggctaattttttgtatttttagtagagacggggtttcaccatgttagccaggatggtctcgatctcctgacctcgtaatctgcctgcctcggcctcccaaagtgctgggattacaggcgtgagccacagcgcccagccatccttgttttatgcttgcaatagtaatttgtagctcgattatatatctctgtgcacatgtatttgatttttcttctcaccgtgtggtttctttttcctctgagggttgctttcccccccccttgtttgttatggtctctatggtactccttccgtgttagtttgtttaagaggctgtcaagtccacaggtcctctacacaacccttgctgctaggtagctccctttcctcctccctggtaaaagacagggttttgggcgaaacacatgttagatgctctgttctcttcattcagctcccagaacgcttataaccacctctacaccctctaggcaggaaatcagaagctcatctctagggactctgaccaacgttaaaagaaatatctaaagatactgacattcattggaaacccccaactaaatattcgaaccaaataaccctgcaccgaagctcctagtcaacaagccccccacactctcagaacatctggatattgcctaaaatataaatttaaattattcatattgaatttaaggcgttgggagagggatatcttaaagttccatcattaagagcttcaataaagtggaggggacttttaccgcggtggagtgagcgaatcccttctctggagctccataggggagggtgcccgcttcctgagtggccgttccgacctccggtcaggagggggaggaacagagcacggccggcggctgcacgggcagggcctctctgggctgagaggaagaaaccagtgagacatcgagaggaagtcgctgtggcactcagtcctacggcctccgaggctgggtagtgagtgtgtcgctggccttagccagactccacaggccacgctggctgc

SEQ ID NO: 39030 - DNA, 2300 bp, Homo sapien
aggctcatactaccacacccggctagtttttgtatttttattagagacggggtttcaccatgttggcaagtgtggtctcaaactccttacctcaagtgatccaccagcttctgcctcccaaagtgctaggattacaggcatgagacactgtgcccggctgaatttttgtatttttagtagagacagggtttcaccatgttggctaggctggtctcgaactcctgacctccagtgacctgccctccttggcctcccaaagtgctgggattacaggtgtgagccactgcacctggccactaaatgccctttctaaaggcattgcctggatatcatctcatcaagtcagtgcttcttagcctggccttaattcagaatcacctggggtatgttggcaaaatatagatgctcagcctgttagaatgagatctttgtttcctttttttttttttttttgatatggagtctcgctctgtcacccaggctagatggcagtggcgcagtctcggcccactgcaacctctgcctcccgggtttaagaaattctctgcctcagcctcccaaagtgctgggattacaggtatgtgccaccatgctcagctaatttttttgtattttttagtagagacaagattttgccatcttggccaggctggtcttgaactcctgaccttgtgatccacccaccttggcctcccaaagtgctgggattacaggtgtgagtcaccgcacccagcttgcatttttttttttcttctttgaggagtcttgctctgtcacccaggctggatggagtgcggtggtgcagtctcagctcactgcaacctcctcccggttcaagtgattcttgccttggcctctctagagctgggattacaaggtgtgtgccaccaaacctggctagtttttgtatttttagtagagatggggtttcatcatgttggccaggctggtcttgaactcctgacctcaaatgatccgcctgtcttggcctcccaaactgctgggattacaggtgtgagccaccgtgcccggcccttcctttgctttgaaggaaaatatttagcaggtagagcatgtattaataagttttctcggcctggcacggtggcttatgcctgtaatcccagcactctgggaggctggggtgggcggatcatgaggtcaggagttcgagatcagcctgaccaacgtggtgaaaccccgtctctactaaaaatacaaaaattagccgagcgtgatggcacgtgtctataattcctgctatttaggaggctgaggcaggagaatcacttgaccccgggaggtggaggttgcagtgagctgagatcacgccactgcactccagcctgggtgacagaacgaaactctgtctcaaaaaaataaaataagttttctctagctggatcctctgctgagcctatggaggcagacctctagatgcttactggagccagtgagttaagtccctttctctacatgtatgtgtatatgtatgtatgcatatattttttattttatttttatttttttgtttcacttattgttttcaacacaaaggcatacttcttcctgctatttgtgtgtatataaaacagcatgttatgtttggattgattagtacaggatgaagaaatcaaacctttttttgaaggttttgatggatgattttcagttctgttacaaaaaatgtgtattttgaagggaacgaactaataaaaaaggttacatacagcctgggcaacatagtgagaccttatttctatttaaagaaaaaaaaaaaagaaaagccaggtgtagtggtgcatatgtgtagtcccaactactggggaggttgaggtgggaggattggttgagcccaggaagtccaggctgcagtgagctatgatggtaccactgcactccagcctgggcaacagcgtgagatcccctctcaaaaaaaaaattatgaaaattttatctgattgctgctgttctttctttctttcttttttaaaattatggtcaggtacttacaatttcatcagaaattcctaaaagaattcgaagtgccttaaaaaatgcagaagaatcaaagcaatttcttaatcagtttctggagcaggaaactcatctcttcagcgccattaacagccatttgctgactgcgcaaccttggatggacgatcttggaaccatgattagccagattgaagagatcgaacgtcatcttgcttaccttaaatggatttcacaaattgaagaactaaggtaaaatgggcctctttgttctcacaattactattttcctttgaggcttctgt

SEQ ID NO: 39031 - DNA, 2300 bp, Homo sapien
ctcactttgtcacccaggctgaagtgcagtggtgcagtcatggctcactgcagccttgaccacccaggctcagttgattctcccacctcttcttcctgtgtagctgggactacaggcacgtgccaccatgccccgctaatttttgttgttttttgtagagatagggttttgccgtattgcctaggcacgtctcaaattcctgtgaagtggcccaagtgattagcctgcttcagcctcccaaagtgctgggattacaggcatgattcactatcatcatgcctggctttttgtgcattttaactgaatgtatattcaatataaagaattaactgtatgtttattcaatataaaattaggttacatattatttgcatcataattaactctactgagtatctgatacatttgttggaaaaatttattgtgtgtgtatacatacatatgtgtgtgtatattaggtatgcttttgattctttttccttgacttgattatgtcagagatgaattacttactgagccaaagcaactcccagaaaaatactctcttcctgcctccccttctgtcatcctgcccatccaggttatgctgactcctcttcagaagaggttcaggtatcacttcagagggaaccggcagactaatgtgttaagcaaggtgtgttttgccagctcttgtccttggtttttattggtaacaaatgttagagtttctatacctttgctggtttaagttaaaatctgactctcttcacatttctgttttttttctaaagggctacattcctgttttgttactgctgttcatacatataattgaggacttgtgttcatatactgtaggaaaaatggtatttccgctcttgggcatcagatattgctgagttatcattgcaaaacaaagcaaagcaaatagtaagcacttggtatttcttttctttttttttttttgtgagttggagtctcgctctgtcacccaggctggagtgcagtggcacaatctctgctcactgcaacctccacctcccaggttcaagcgattctcctgcctcagcctcccaagtagctgggactacaggcacatgtcaccacactggactaatttttgtaattttagtagagatgggtttcaccatattggtcaggctggtctggaactcctgacctcaggtgatccacctgacttagcctcccaaagtgctgggattacaggagtgagccactgcgcctggcatgtacttggtatttctgctcttaaacctgtataagacatgcgtagtttttgtaatgcagactagcaattttttttttttggaacgaagtttcactcttgttgcccaggctggagcgcaatggtgtgatctcggctcactgcaacctctgcctcccgcgttcaagcgattctcctgcctcagcctcttgagtagctgggattacaggtgcccaccaccacgcccagctaatttttgtatatttaggtgagacggggtttcaccatgttgaccagtctggtcttgaacttctgacctcagctgatccacccacctcggcctcccaaagtgctgggattacaggcatgagctgccacgcctggccagcaatttttttcttgatttactttttgaaaataaaaaccataagaaaataatattaaaattattttcaaatgctatttcaaaaaatataggccatcagttctttgtaatactcatcattttacatattattgaagtgctaggttttaaatatatatggcattgtaaatttatgagtttattgacttaagtcatattattgaaatttgttgggagtacattagcaaacatttgattattaagccttgcaggagtttaaaatttggagtagaaattgtgctcttacatacaggaattttcaactaatttttataagtgttgtgcatatacaattaaatagaaccatgtaattgtaactttctaattggaatgacttaagaattcaaactattttcctccttccttagccagaatggtacttggctcaagtacttatgtggattggaaaccatactgaatttctggatgagaagattcagccaatattagacaaagtaggctctttggtaaacgcaagggtaagagactcagtcataagtgtttctgttttagaactgtatgtgtgcatggataactttttatttacatacctcatgtttgtgtatttttttagcttgaattttctcggggccttatgatgctggttcttgagaagttagccactgatattccttgtctgctatatgatgacaatctcttctgtcattt

SEQ ID NO: 39032 - DNA, 2300 bp, Homo sapien
atttcatttatatgaaatgtccagaacaggcaaatccattgagacagaaagtcaattagtggttgcctatgagttgagggagtggggagacggtattagaggataacggcttttttcttggtgatgaaaatgttctaaaattgtgatggatatacaactgaatatataaaaaaatcattgaattatacactattattagttttgagatggagtctcactttgtcgcccaggctggagtgcagaggcatgatctcggctcactgcaacttccaccttccaggttcaagctaggattacaggcacatgccaccacacccggcttatttttgtatttttagtagagttggagtttcaccatgttggccaggatggtttcgaactcctgacctcaggtgatccacccacctcagcctcccaaagtgctgggattacaggcatgagccaccgtgcccggtcgaattatacactttaaatgggtgaattgtatgacatatgaattctatttcaaactgttaaaaaaaaagtatgctaatgtgttaacatgtttttgctttcagttctttctacaacttcaacaggctgcactggaggtgtttgcagagaataatactctgagtaaattgcagctaggacagctagcctctatggagagctctgtctttgatgacatgattaacctcttagaacgtttaaagcatgatatgttgacccgtcaagtagaccacgtttttagagaagttaaagatgctgcaaaattgtataaaaaagaaaggtatgtcctctatgtaagtcagctcttaacaccagtttggtaaaagttaaagaatatgtggtcagattttcaaggtgtctagatagaacccggtttggccttatgtactttattgttgatggaaatatttctaaagtatgttctcttggacattttttttgagacagtcctactctgtcacccaggctggagtgcagttgcacgatcttggctcattgcaacctctgccttagaggttcaagtgaccttcccacctcagcctcccaagtagccaggactacaggcatgcaccaccacacaaggctaatttttgtatttttagtagagatgtggtttcacattttgggcaggctgatctccaactcctgacctcaggcaagccacctgcctcggcctcccaaagtgctaggattacaggtgtgagccaccacacctggctgacattcttaatcagaataaactgattataatttagttgtttgtaaatatatcaataggatagtgtgtgatctggggttgaatagcctaacctgtctcccattttgcaaagtaaagtgcacctgtggtactctgcatacttttgttgtggtttatcccactaccattcactgtgaacacctgtgttactttcatccttgatagcaagcagtatctttttgtcctagcatagtccctgccacacagagtgcttaaaattcgtttattagtcctgtttttactaaaaattagaggataatattagctgatgtcttaattaaaatgctaaaatcaggctgggtgcagtggctcacacctgtaatcccagcactttgggaggccaaggcgggcagattacttgagggcagcaattcgaaactagcctggccaacatggcgaaaccctgtctctactaaaaaattcaaagattagctgggcgtggtggtgggcacctgtaatcccagctacttgggaggctgacacgagaattgcttgaaccctgtggctctagcctggccaacagagcgagactctgtctcaaaaaaaaagaaaaactacataaataaaatgcaaaaattaagtgacattttaaattgtaattgccttatatcagtaattcacatattaaaatttggggatattttggatatatccccatattaaagagtatttgagagtgaaaatataaatacaggtacatttattttctgatagagcttttaatgttaggctgtatattttttcttatccaaaatgccctaggacagaacacttcctcaaatttaaaatgatttaaaaacttgaaaaatagaaactgatgaaaattttttggtaaaaatgtgttttttccagatggttgtccttgccatctcagtcagagcaggcagtgatgtccctgtccagttcggcttgcccgttgctgctgacgttacgagaccatttacttcagttggagcagcagctttgtttctccttatttaaaattttctggcaaatgcttgtagagaagctggatgtatacatctaccaagaagtaagtaagaatagactg

SEQ ID NO: 39033 - DNA, 2300 bp, Homo sapien
aggtggtctccatctcataaaaccagctccagcaaacaggggttgaagctcaggatccaggctgctctgtggcccacaacccagtcgagccaacaggccaagaccttcctgactggtggccagcgccatgcctgcaggccgctcacaccagagatgccacttagaactctccactggggagttcgatcggtagcgggagcggagagcggaccccggagagcggaccccagagaaccctgagcagccccgccgctgccggcctagttaccgtcataccacgggaggagccgcagctgccgcagccggccccagtctccatcaccgcaaccaatgagcagcaaggccgagacccagcagccacccgccgcccccgcctttccccccaccgcccccctcccgtccccccgccgcccccgccctcagcgccgccgacaccaagcccggcactacgggcagctgcgcagggagcggtggtccgggcggcctcacatcggcggcgcctgccagcgtggacaagaaggtcatcgcagtgaaggttttgggaacagtaaaatggttcaatgtaaggaacggatatggtttcatcaacaggaatgacaccaaggaagatgtatttgtacaccagactgccataaagaataaccccaggaagtaccttcgcagtgtaggagatgaagagactgtggagtttgatgttgttgaaggagaagagggtgcggaggcagcaaatgttacagatcctggtggtgttcgagttcaaggcggtaaatatgcagcagatcgtaaccattatagacgctatccacgtcataggggtcctccacgcaattaccagcaaaattaccagaacagtgagagtggggaaaagaccgagggatcggagaatgctcccgaaggccaggcccaacaatgccggccctaccgcaggcaaaggttcccaccttactacatgcggagaccctatgggtgtcgaccacagtattccagccctcctgtgcagggagaagtgatggagggtgctgacaaccagggtgcaggagaacaaggtagaccagtgaggcagaatatgtatcggggatatagaccacgattccgcaggggccctccttgccaaagacagcctagagagtacggcaatgaagaagataaaatcaaggagatgagacccagggtcagcagccacctcaacgtcggtaccgcagcaacttcaattaccaacgcagatgcccagaaaaccctaaatcacaagatggcaaagagacaaaatcagccaatccaccagctgagaattcgtctgctcccgaggctgagcagggcggggctgagtaaatgccggcttaccatctctaccatcatccggtttagtcatccaacaagaagaaatatgaaattccagcaataagaaatgaacaaaagattggagctgaagaccttaagtgcttgctttttgcccgttgaccagataaatagaactatctgcattatctatgcagcatggggtttttattatttttacctaaatatgtctctttttggtaataacaaacgtgttttttttaaaaagccttgtttttctcaatacgcctttaaaggtttttaaattgtttcatatctggtcaagatgagatttttaagcactttatttttaatttgtaataaaagtttacaacttgattttttcaaaaaagtcaacaaactgcaagcacctgttaataaaggtcttaaataataataataaaaagaactctccactgggcaccctcaaaattgcacaagttccttctgttattagttcatgctgagttgtgatgccagcacttcaagccttgttaatcattggatcaacaagtaccgagctaggtgctagagagagatggaaaaaggcacctgggcccagccctaagcctggatcgcggacagtgacgttggtccacacctcacctgccctctctgccctgctacatgccccaggcttgccctgaaccgtgagctctagaaattccaggtccgggtcgcagccacagggcagtcaggcgtgtcacgtgaccgcgccgggtagagggagacagagtcgcacggctgagacgccaggcagtcgcctagcaacagcgggacgcggagcgatggagaccagcagcagggagctccaagccgcggagtatttggaaaagcatcagatcaaggaggtggttagctacctcaccagcgccctccttttctttcggccgggtaagggcccccatgccccggtacagccatacctccatgtggggttcgcttcccacacgaaacccccctct

SEQ ID NO: 39034 - DNA, 2300 bp, Homo sapien
ttccccgctccttccaactcctgataactcttgttctactttctgtctaggtatctcatgtaagtggaatcatccaatatttgtcctttgtgtctggcttatttcatttagtgtgatgctttcaagtgtcattcatatagtagcagaatttcattcatttttaaggcttgcataatattccactgaatggatataccatattttatcttgtcatctgttgatggacagttgggttgttttcacgtttgtggttttgtttttaagtgactatacttttggactctgttttaagttcaagtatttgagacctgaaaagatttcaaagcaacaaagtatccagggtgaaaataagagaaaagggagacagatcagcagtgctgcttcatgagacttgaaggagcagctttcaaagcagaaagcagaaaaacaatttttttctctaaaacttctttttctccctatctttgtcacctctccctgctcaatcacctgatgaaagtggagaagtagtaaaagctagtaacagttaactgtgactattcctcatctaactcttctgctaatgcggatgtgtttgattttggttttgccttgtgttgttttgttttttactgcctaggaagcaggtagttctacctcttattgtgacattgcttttttataagcttaaccataattaagatgacatgtgttgggttgttttatacacacatagaattcattcattggttcattgaaaaaaatatctctttagcacctactatgagccaatcatgccccacagtgcgtaaaagggcttgtcaaaaagtaaattgaagctgggcacggtggctcacacctgtaatcccagcactttgggaggctgaggtgggcagatcacctgaggtcaggagttcaagaccagcctggccaacatggtgaaaccctgtctccactaaaaatacaaaaattagccaggcatggtggtgtgcgcctgtaatcccagctactcgggaggctgaggcaggagaattgcttcaacctgggaggcagaggttgcagtgagccgagatcacaccactgtactccagcctgggcgacagagtgagagtgtttcgtaaacaaacaaataaataaataaatgtaaattgaaacactcatcctcagaaaatacaattaaactacaacttaatattaagtaacaggcatgggtgccgagtaaggtactaatgagtggcccatcaccaggacaaaactttttttcatgccagtataacagtttcctaaaatcatagctttgtatcaaagaacgtatgcataggactgcatttcttcattactgatatttttggtgattgccctgatcttgtttacctggttgatcttcctgtcaggttccactttcaaaggaaagcaactgtatggcaagtacaacttacttacctgcaaatgggtgaatagttgtaactgaattcatagaagactggtgtaggttcagttcactttgtcacgttcccatatctcatgttccacttacactgttgggctttcccatcattcctgtcatctgcgccagggacaacaagtggggcagaacctaacttgactgtgtcactggagagagctggtcactgcaaacccttcagccttgattgttttcccttatgcaaagtcaccaccaatgtgccctccctgaggtactggcaaggctaatcaggctgtttttttttttttttttgagacagagtcttgctctgtcgcccaggctggagtgcagtggcatgatctcggctcactgcaacctccacctcccgggttcaagcaattcccctgcctcagcctcctgagtagctgggactacaggcacgcgccaccatgcccagctaattttttgtattttagtagagacggggtttcaccatgttggccaggatggtctcgatctcctgacctcgtcatctgcccgccttggcctcccaaagtgccgggattacaggcgtgagccaccgaacctggccttaatcaggctgttttctgagcaccattaaactgggtggatcttgttacctcagaaaaggttcatttggtttattttgtttgttctccgctcttgcccttagaccatcatctgcaaatagcataagcagcagcacatcttcaaatcatagcggccacactccagagcccccactcccaccggttggaggtgacctcgccagccgactgtccagtgatgaaggggagatggacggagccgacgaatccgagaagctagactgtcagttctccacgcaccaccccagacctctggcggtaggcct

SEQ ID NO: 39035 - DNA, 2300 bp, Homo sapien
atacttttgtgtcttaaaggtttaatttttttttttttttttttactaaaaggcatgtaccccttatctaaggttgatttaatattcatcaggtaataaccaggttttgcaaagaaatgttggatgccacacaggagaggtcctagcagaagataaagatgcgcaaagcgtactttgccactgttttttttttaattgaggtgaaatttgcatcacagaaaattaaccattttaaaatgtacaattcagtggtattgagtaccttcacaatgttgtgcaaccatcacccctaaagaagaccctgtgcccattaagcagtcactccccccgccttcttttcccagcctgcccctgacaaccacaagtcggctttctgtctctatggttttacctattctggacatttcatataacgtgtggcctttgtgaaccattgttttggtaggcattctcccccctccaaatctactgtccttggccaagatcagggaccaaactttctaaatatccagaatgaatgaaatctccctgcttaaatcaatagttccaacaacccacaaaagtattttccaatcattataatgacctctctactctctctaaggcatagtgctaggtaatgaagtggactctgcctatcaagatggtcagaccctgagcgaagagggagtgggaaggcctgaggtgtcttcaggctgcctggggaccggggacccaggccagacagacagcagctccagggctgcggaaaggcccagccctgcacacacagcgctggctctgatactcctctgaggagcctgctgcctctgaccacaccttgtgtgtgtggttcaggaatacccaagttcatctgccaaattcaggatacaaccctgactgttccgggcttttctttctgcctttccctaatctcgtctgggcgtgctctcttaaaggggaagtggtgcgttctgactggccagggccctcatccaggagccaggaaacatctactaccacgagtcgcgttgcccagcgtgtgtcagcctccttatccaaacggcaaggcagcctccccgggatgtgtaagtgtgagcgcagggcacgagggccacacaggacggcgtggggctgggcgcaggtcacggaacagagatcctggcaggcagatcatgctggcagcccacgaggcatttagcaaaatgagtgttagcatagacagtgctctccggctgtgggctggagctggagccgagacagggctgaggcggggagcggggagagtagctgcctcagaaagaggtcaggagtaggaggctgggttggggaccagtctattttggacagcccttctggaggcaccagcctccggcctgagaaggagtggagtggaaaattttctagcacacctttcagagcaccgggaagccagctgcaatgaaccttcccggcgtgtcaaccccaacgccccatgtttatgtccgtgtattatctactcagtgcacttatctactcagtcattgtgtttctttgttgtttttatatgtactttgtgttaagacatgttcagggtcctttctattcaaactgtacaaattgtttgaaactagcaccctggttttttccttctttcctgtccacgatggtccttgtccagtgcatgcacactgcaggccctgaatcaacgcaggcgactggcccacaggtggactgacgggctcactaggatgctgggcagcgtgtctggctggtttctagctagggctctgtttcctgtgtgcccagagaaataaaggggaaaaagcacacccactcacacacacagtcagttcctaactaaatgccacaagcgagtgactggtggcaggaaaatagaccctttgctgtgttttaggcccctttctgtcctgggtttttgtttgtgtggtagtgatggttgatcttaaatcatgtaaaaagtttgttttcaccaaaataactcagaccttttgcttctaaagaagggagagaaaagggggccagaaaggaaaaaaaaaaaaaaaaagtatgtgtctgtacgcatatgttgacagggcataaccacaccctacttcaagacaacttcctgtttgccgctgccaactgccactccaaggagaacagaaatggttccgttattagtggctgctgtgggaccacgacagtctgtggggtgagtggctctgagcgacaccatgagcttagcagtgagtggagacttttcaccttctcttataagagaccatggccctgtgctgttgaaagtagacactggtacagatagaaataaagcagtggtg

SEQ ID NO: 39036 - DNA, 2300 bp, Homo sapien
cacagaaaaccaaccatctgaagtgttgattcataaaatgagttccatctttccacgcaggcttcagctgccttccagggtgacatccctttttatgagggggaccattctttggcatctaatggccttttctccattcatttgggatgaccaatgcacctatggcctacttatgtctgaactctttcaataccaccaacctcttctgtccccttgtgccatcttcccacccccaatttcagccaattatgtttataagacatcagttagtgaatcacaattcaaatgaatccacctatttgcttagcagcaagtggcccccggagttgctccatttgaagcccataggccagagttacatacggcaggcttgcaaatgagaacaggatatgatttatttatgacgaccatatgtgtttgatgcccaattgcagcaggttgtggcttctcttgcatatcttggtctgggatgacctatctactcagtgtgtcccatttcaggtaccgtatttccatgctgggaaaagagagatgatgactgctgaggggctgcacatacagatgctcctaaccctgcttgccacataacaatctgtgaccaaatgcaaagtgggccaaatgtaacttgctgcaaaggtttgccatgtacaatggttttcagtggtgagtggagaagtagctgctggaatgactgaccatgtggggttcattaagctgttgtgcattcacccacgagaaaggctgggatgcttgtgaagggaactccactcttcatttcagaaattttaacgccccaccatttggcaatgatgctcccaaggagaatggcagatatgcatcagaaggttcaaacgtggagtccaactgaagtgcagtaaacttctgccttcaacagtctcacccccctttaccccccccccagttgtatttatactttgaaagaagttaacatgaagcagtagtcacctgggcgtgctcaatttttgacaagccttagtcactctgtacccagcagaacaattcacattatattcgaaatcctgtgaagattctgccacacatgctaacactaaaatgccagtagctccacttaccttctttattaagcctcataacctccctgctttttccaccctcttttccagcctcttctaaatctacatctgcagatgaaaaagaaaaggaaaacagaaaataaggaaaaaaggggggaaaaaagccaaagtcaaggggggagggagagtgtttatttgcaaacagatcgatataaatactgtatatgaaattctttcaaaaattgacaatgcaacattttctcccaagtctgggtttccatctacctggcccagataggtacccaaaaaactatgcaagcagcaacaaagtagccttttaaacggacaacaccgtggggctgcgagcccaccccgcgggctgccacggggagccgggcacagacagacagacagccctggcagccgggcctctccctgtgcattgatgatctgtctctgtgtgtatttatttagagagagagggagaagcatggaggacaccgggggccactctctctctcacacacacactttttcccagtggctctaggtgaatggaaaggttacaggataataaaaggaggaggaggtggtggggttcttactgtcggagcagtgtaatttggcggcgtcgatccaggaggaccagggtttgcccagaaacgcctccggactgggcactttgcgatccagtgtcgccattgctcttccttcttgttgctttttccctgttccttcggcagcagcagccgagagacacgggattcgagaacgctccgacgtcatcttcggaacgttccgacattgagtgttctgaaagggggagggagggaggaagggcgggatgggaggagggcggcggaggaggaggggagagggagcggaggaggggcgggcgctcgggctcccggagccggctcggtggggctcgcgcgcccgcggccgccaggggcagcagagaggcacctgcagtccgcgcccgcccgcccgccggggccgcccgcctgccggggaggggcagcgcggacgggcgagcgccgcgtgcgggagagcgaaggctgcagcgcgcccggcagccgggatgcagcggcgccgcccaagcctggggcgcaggggtcggggcacacggggataggcccgacgcggggccgaaggaagggtggtctttcccgcagagttgccgctggaggaccgaaagttttgcaggcagcccttgcttccagcttgtcgctctctccccgcgtc

SEQ ID NO: 39037 - DNA, 2300 bp, Homo sapien
aatttgatccaggcctgggtatcaaaatgcatcacccccaagcccccagtaacaattctccatcccaggcaaaccatgctcaacacccaaacacaccatgtttatactcagcttgaagcctctgctaataccattattccccctccctccgcaagaccagtcttcaccttaccattacaaatctttggcaatttccaagatgcagagcagagcccatcttctgttacgcagtttctgttcactcctaactagatttcggttcctctatgaactggcacagctgagagaccaccccacccactgcacaggccagtccctgtgtacctgcctgttttcccaaggaatcggtaagtttcacaacttccttcttccagagaccaccagactgcatctctgtgagggtgaggatgggtctcactcatctttccctcctgacaggagggcacagctgttccatgacaggcaatattggttgacttaagatggacagatggaaggaaggaaggaaggaaggaaatgtcaagcccagggtctagcatataacaagaggtcaacaagtaatacatatttgttaacaccaccaattcttacaatgggaattcttcacccagcgacaccttagctatgtaggagcccttcgaaagagagcaaaggcaaatgcagtttatctgagtctgacacaaacaagccgactcacacaaacatcacaactaaaggcaaatccgcagctcctccttcatcgcccatcctaacactggcttagcgatacagggtgccaagctcagggaaattattagatggttcagccagggcagaactcagtcagtacaaagcaacttccaatcagtgcgcttcagctgtgacaacttgggaaacagcagtggtgagagctaaaagggtgctggcgaaagagaaaaaaaaatatgtcgcttgtggggtgagggcggtgtccatatagtttagataattctagtaaacaaaaggatttgttaaaaagaagtaacagaagactttttaaagccttctttaaagggtgaaaatctcaactaaagcacccaacgtccaaaatccagaggaaatctagcgctccctttctagctggctagagcagttaagcctgaagtgaattctcccaggaatcagattcctggccaaaggttgcctgcgcaaacccgggccaccctcgtctcacggcagggagcgctggaaacggctcaggggctaggcccgttagcgtcgtcttccaagagccgtaaattcgccctcccgctctgctgaccctggagcaaagtccatgcagtggttctctgagagccggagatacgcaccgcgcggggaacccgggggtccgggggccctaacttttgagttttgcacgccccgcagcctgagatgggaaggtagctcgtagcgctccaaactcacctgcgtttcagaacgacatctacccactggtttcagctcctagagcaacaactgcagaatctccatggtccaaagtcctccaggaaagagaagaaaggggtgacgggggtgagggctgggaggcgaggtcaccagggtcccttccctggctcgggtgggggtggggggcgcaacccctcacggctcctccccaccaagccgtcgggaccccagcgggggcgcctcgcgttgggcgacagggacgcggggagagagcgacaagctggaagcaagggctgcctgcaaaactttcggtcctccagcggcaactctgcgggaaagaccacccttccttcggccccgcgtcgggcctatccccgtgtgccccgacccctgcgccccaggcttgggcggcgccgctgcatcccggctgccgggcgcgctgcagccttcgctctcccgcacgcggcgctcgcccgtccgcgctgcccctccccggcaggcgggcggccccggcgggcgggcgggcgcggactgcaggtgcctctctgctgcccctggcggccgcgggcgcgcgagccccaccgagccggctccgggagcccgagcgcccgcccctcctccgctccctctcccctcctcctccgccgccctcctcccatcccgcccttcctccctccctccccctttcagaacactcaatgtcggaacgttccgaagatgacgtcggagcgttctcgaatcccgtgtctctcggctgctgctgccgaaggaacagggaaaaagcaacaagaaggaagagcaatggcgacactggatcgcaaagtgcccagtccggaggcgtttctgggcaaaccctggtcctcctggatcgacgccgccaaattacactgctc

SEQ ID NO: 39038 - DNA, 2300 bp, Homo sapien
aatatatattgagtacctactatgtttcagcccttgccagggtcctattaggaaaaaatagtgtggcacatgcctgtaatatcaacacttcgggaggcggaggtgggagaatcgcttgagcccagaagtttgagaccagtttgggcaacatagggagacgtcctctctaaaaaaaaaatttttttaattagcctggtgtggtggtgcacgcctgtggtcccagctgctccagaggctgaggtgggcggattgcttgagtccaggagattgaggctgtaatgagctatgatcgcgctgctacactctagcctgggagacagagtgacagtgagatcctgtctccaaaaaaaaaaaaaaaaaaaaaaaaagtatttttaaaacacatagtatgggccagtttctttcacttctttctcttgtgtatcgcttgcgatgatactgtgtagcaggtattattttccctgatttacagaagtgagtggaactgagattctgaaaggttaggtaaattgccaaaggtgacacagcaacactcccttttgttttgttgttgttgttactatctatgtgcttcgaacagagacctatcgactagctttcctaatcttactacctttccttcatgctttacacaagaaaagtcaacttttcttaagggaaaggttcttgttattttgagcaggaaagtaaatgaccaaaattgtactttggggaaattaacctaagtttctgtaggatgtgctgcgggccagagcccaggccagaggcaaggaccttaagccagggcagtagcaacaagcatgggaaggggcccggcagcaggccctggaggctggaaagggcttgtcaaatgtttggatgtggtggaagggaagggcagccttgccaccctaggtttgggacgcaggggacacaggggacactggcaggtggcgcagcctgggtcaaacccctcactctctgagcccttcttgcttggcacccttgcaaataaatgccttcctttctattgctgcaaaaacctcggtgtggatatccggttttactgcacagggtgagtggacccagtttggttccataacactgtctccctctatccctcgttggtgacctccgtgtagcaggtgctaaaagctggttcacctgtggggcatgtgtagttttcagagcgcctgtggggtctcgtccagactgggaggctctgactcaactccccaccttcttcactgcattcctgcccccagccttgggctgctggcctctcctcccctagctggcagaggaatgggagaggtggtccaagcccagctgccttccactgtgcccactacttctcttactgcaccatgtcaaggggacaggccactgctcggccgttctctctctgctctgctgttgctccttctcagtggagactagaccccagcccgcgtttgttcacatgccacatcttgtgccctggcacagggctgtgtggaacagaaaggcatcgtgaagggcaagacctgcatcactccccagtgggcagaagcctcaccactccagtaaccttccttcacagccttcttcgagggctggaggggcggtggtggggggtggagtcagagggcagtcttccacctcaagtcagcctcgaggaggggtctgctcccagctctcagatcttgtctttagaacgagtgccagttaattcccaagtctgaatcctactcattgattcaggacagcagaaaaactcccacttcccacccctgtttctggaaatgaccacaagcctggctacagggcgaccgagaccatcatgggtggactacgcacgtccagctcttagtgtggtctccgtgtctcggttttctcttttgacttctcttttggagctcttggttgagacacttggtgagtgtggacttttaaggtaaactctgagctgaccaggactggctggttggtctcttgggtgctatgcagtcacagaagcaggtaatcaaagaacaaacagtcctgtggtgtttggagtctcccttggctaccgccaaagcctctgtttgatttcttgcatggcaacaaaaccaggaggggaagctgagtggcttctggaataaactttgggtgtgagacgggattcaggctgtggctaatgtgctggaagcacgcacagttgtgaccatcaagtatgcaggaagcaatcattctcctggctctcctgggtgccatgtcaggtaggaactcaattttgctttggaaccttgcttgcctacttggtctgcataataccattgaatgacaatgtcccccagaaa

SEQ ID NO: 39039 - DNA, 2300 bp, Homo sapien
tggagcacccagcatggactagatgagccttcagagcagagtttcttaaacagcggaactgctggcattgagccaggtaccccattgtagaggggttgtcctgtgcattggaggatgtgtagcagcatctccagcttctatcccctaaacatcaatagtagctgtctcccctagttgtgaaaatcaaacatgttcagacaccacccccggccccccagctgagaaccactgcctgagaaggaaggagggatgatgggaagaaggggcttttcctccccaggtgtcctctctctgtcccgtggggaggctgggagcctgtggttgccacctctggcatcaccttataatcatccttccgaaacattaaagtctatgcagattagctgggcatcttgtgaaaaagccagtcctggttcagagggctggggtgggtgggcctgaggtctgcatgtctaaccagctccctggtgatgcttttactaggagcatgcttggagcagtagctcatggctgtgtgattagcacaggcatcttagtggcctcttttttggaagttaacagaacccgctcatgatgaccaaagcaaaaacatactacattagcaacaggggcattcacagaagggaccgaggggcttggcccagcctgggggcgctggggccatatccttccctcctggctctggttttggctcctgccatcccacctctttggccccattccactttgtctattcctagatccatcaggggcagcattacagattgcctgagaaggggatatgtcaagtaagggaaaggatgaatgggcctgtttcagtgggacactggggtgaccttaggctgaacatgattactctcctccagcaatggagtatacccacagaagtccaccttgtgaatagatgtggggggaccctggatccagggaggagctctggtagggagggttggggtgaagccctggttcctgcctttctctgactgcccctgacttagctattgattccctgccatttctccttcctctggccctacctaccttatagggatggtgagatagcacagcagaaatattctgagctcacgaaaggaatgccgtcacttagatctgagaggtactatacccctttcaaagaagatcccacatgggaagacctccacttgggtaactgggaaattagaggtgactacttgccccactgaaatgattttccctcagcaaaaggacttcctgcagagttgttttaaacaataagcctcccttagagcattcaaaattactcaatgtatagttagttaaaactcccaacctatcagtctcattactggcctgttccaaaggcattggtgaaggtctgaggaagatgggtaagttggtgatttggggttatcttgcaagaaggacagtgatggggcctggtcttcttcaggggacctatttctcagttcagagagctgacctcatgattaatgcaacttggaaaggtgcacgagttctgtgcataaattctatatcctcaggcaaaaaaaaaaaaaaaaaagacaaggaagaaaaaaaagtgagcaaacacatgagaatagagaagctttacaatttttctggcttctggtggcagccatgggatgggagtcaggaacaagggagggaacccgcagctctggacatgaccctggcatgtaactctggacacagtgatatctaaaagaatccagggacatctgcacaaaacgtgggaaaatgagaaaagatagctggataggccacctgtccttatttcaaaagacgttaatgccaaggctgatctgaaatgacatcaggcagaggtgcatagagtcagagactgtggcccatgtaaattgttgcaatgacagcgtggtactttcttcacatccacagggatgtggtctttggggatacaaaagccagccacccctcctttccactgctgtgctctccctctgagcatgttgatgcaacttgaacagctctgcactatatttagcactaaccaaaataccaatcgcctagatgctaccttcccgtgcccctggaaattagctgtgtctgctgtatctctgttccagcccgacacgagtgtacacagtcctggaggaactgagtccaggaaccatcgtggccaatatcacagcggaggatcctgatgatgaaggttttcccagccacctcctctacagcattaccactgttagcaaatatttcatgataaatcagtgtaagccactcacttccatccttaagtgcatcctctaattcagccatgtggattgtcttacaat

SEQ ID NO: 39040 - DNA, 2300 bp, Homo sapien
cgcccaggcaggagggcagtagcaccatcttggcttgctgcagcctcaacctcctgggctcaaatgatcctcctgagtagctgggactacagtcacaagccaccatactcagttactttttgtgtatttttgtaaagacgaagttttaccatgttgcccaggctggtctcaaactcctgggctcaagtgatctgcctgccttggcctcccaaagtgctgggggttataggtgtggccaggagcctggccttgtttttttaaataaaggttttttttggaactcagccatacacaatcatttacacattgcctatggctgctttcacactgcaatggtaaagttgagtagttgtaacagagataaaaaatagttgctatttggcccttttcaaaagaagtttgttgattcctggtctatgtccctaaactccttaatttaaaatcagacccaggtaattcttatactcagcattagtggcaaccatgaactaattttgaatctttgaggtatcaacaaaggacttagatttgaagtcctatacttttggcttcagagcctactgagctagaaatattctctgagatttagttagtagaatctgccctggattattggtggcaaatccagagagaaatcatggttttaagctacacctccactataaaagagtaactacaaagtcagttattagtgacttaaagggaaaacagaggtgttttttatgtgtgatactggtcattcatatgtatgagaaaacacatctgctaattatttgtgaagttactttaaagggaaggctatttaaatatgaaggattattaaataacattacaagttttatttacatatttatttttaattttgctgctggatcataagaatggaaatggtaagtaatacaacagtcttttatcattcatatttaattctgtttcttatgtcataggagacacaagaaaactagaggttttcataaaatacttctcggttgttaaaaagataagacgtcaactgttttaatttgcagtgcttatccaacatacttgttaggaatctgtgtcttctgcagacttttcaaatcttatttaaaagggaactggaataatcttatagataattatattttgttaaaattctttataactagaagctatttcttgccattttgtcatcccaacaaatttttttactaaatctatcagtgtgccctttatttctcatattttgtctagtaaacttttaaaaatactacccttcttaaagcagcattccaatctatttttgtaggtggtttttgtctgataaaactataaaactgacctagttgcatcattcagaaacgtaaaaagtaattttccacctcagaatgaccaattagtggtcatataaagagataatccaaaattccttaagtaggtttttattgttacataatgggtgcttcttgtctataaaagtctagcttctaaatttaattttcagttctatttttaatgtaaccataaaaatattaaaagattttctttgagagactgggtgcagtgggtcatgcctgtaatcccagcactttgggaggccgaggtgggtggatcactccaggaggtcaggagttcgagaccagcctggccaacatggtgaaaccccatctctgctaaaaatacaaaaattagctggacatggtggtgggcacctgtaatcccagctactgggaggctgaggcaggagaatcgcttgaacccaggaggtggaggttacagtgagccaagatcacaccactgtattccagcctaggtgacagagcaagactccatctcaggggaaaaaaaaaaaaaggttttttttgagatacccaaaatttaagatatagccaaatatgacattaatttttaggtactattaatgaggacaagcccttttagcaatattctcaattctgtgctaaggtgtttctaggagtatttcagttatgaaaatttaaatctacttcaattctcttttgaagtaaatatagcacttttttttttgttaagtagcaggagtttaaggtttcaaggcaatgtggaaaattgagaataccagaaaatgaatccaaacaaaattagggtatcccaaattctaaaaatctatgactcatattgtgaattgttgggaggagtagagctgccctaggcagctgcaggttgtgcattgcagagctccaggtggcaccattcgcttagagtgcagtgtgactagagtcctgagtagagcaaatactatctgaagggaccagaattccccccacgttccttcaacctag

SEQ ID NO: 39041 - DNA, 2300 bp, Homo sapien
tacagcatctttagtgacaagttttttacaatttatggttgggaaaaatgaaaggcaatatttattgttagcaactattgatccagggttaaaaatgtgaatcattgttgtgattggctctcttggggctagtcacacatactctgccacacagaatgaaatatgatgtctcaaagtataaaccatttggtataatctctcctacctaattgtttactgcaggaagatagtatctgggtatgaaagtatttaattcagtctatattcaatgtatcataaactaataccaggtataacatatacatttattatgaaaatttcagtttacttaaatataatatttgaattttacttttttccccaaaggaatgtttttaatatatttggggagtattttttgaagtgtcactcattgttttgcttaaatgtttctgtctctgttgggaaagtccaataattcatacatttattttaataggttgaatgaggcatcatttcagccacctccaggtgtaaacatatgtgatgtaaattggaaagattacgtcctcataggcgattactcttcttctgcacaattctatgttacctttgcagtctttgtgttcctgtactgcattgctgcccttctgctttatgttggctacacgagtctgtatctggatagtcgtaaacttcctatgatagtaagtaatcactttattttttaaatacaaaaataatttgtataagctaaatatagattttcttatactggaaataaaaattcttggtgtaagccagttcagcatattttagcctgtgtttgccacgaggttgagctttctcccattaagtttaactcaattttttttagcctatttgcactataaggaaagtttatttcttttttaaatctattttaacttggaaaaaactcagatatgtaataaagcacatcaggttacaaatagcaaaaaaattaagtcgaaattcttttaatttgaagaattacttatcacaacatagtctcataactctttctgcttcttactttttttctttctctaaaggcccactttatacttctacaaaacttattgagtttaattatatcatgggttcacaaactatgtcccagaggtcactgtcttattttttatttttacttctttatttatatatttactttttgagacaaggtctcgctttgtcgcccaggcaggagggcagtagcaccatcttggcttgctgcagcctcaacctcctgggctcaaatgatcctcctgagtagctgggactacagtcacaagccaccatactcagttactttttgtgtatttttgtaaagacgaagttttaccatgttgcccaggctggtctcaaactcctgggctcaagtgatctgcctgccttggcctcccaaagtgctgggggttataggtgtggccaggagcctggccttgtttttttaaataaaggttttttttggaactcagccatacacaatcatttacacattgcctatggctgctttcacactgcaatggtaaagttgagtagttgtaacagagataaaaaatagttgctatttggcccttttcaaaagaagtttgttgattcctggtctatgtccctaaactccttaatttaaaatcagacccaggtaattcttatactcagcattagtggcaaccatgaactaattttgaatctttgaggtatcaacaaaggacttagatttgaagtcctatacttttggcttcagagcctactgagctagaaatattctctgagatttagttagtagaatctgccctggattattggtggcaaatccagagagaaatcatggttttaagctacacctccactataaaagagtaactacaaagtcagttattagtgacttaaagggaaaacagaggtgttttttatgtgtgatactggtcattcatatgtatgagaaaacacatctgctaattatttgtgaagttactttaaagggaaggctatttaaatatgaaggattattaaataacattacaagttttatttacatatttatttttaattttgctgctggatcataagaatggaaatggtaagtaatacaacagtcttttatcattcatatttaattctgtttcttatgtcataggagacacaagaaaactagaggttttcataaaatacttctcggttgttaaaaagataagacgtcaactgttttaatttgcagtgcttatccaacatacttgttaggaatctgtgtcttctgcagacttttcaaatcttatttaaaagggaactggaataat

SEQ ID NO: 39042 - DNA, 2300 bp, Homo sapien
tccactggtgggcttgaacaagaagcaggagagaaagtgaggagaggcagacagaagcaacagaaagtttagcgcggaagttgagaaagggcctggccaattccaatttctaaggccttcaataaacaaaaagaagaagagatgccaatattggtttactaagtcatggtatgttttagatctttaattaataaagctgcatgtgaacatatctctaatctgtcaaggcatatctcattttgaaataacattaagagctgggcgcggtggctcacgcctgtaatcccagcactttgggaggccgaggtggcggatcatgaggtcaggagttcaagaccaacctggccaacatggtgaaaccccgtctctaataaagatacaaaaaaattagccggacgtggtggtacgtgcctgtaatcccagctactcgggaggctgaggcaggagaatcgcttgaacccgggggtgcagaggttgcagtgagctgagatcacgccattgcactccagcctgggtgacggggcaagactctgtctcaaaaaaaaaaaataataataataacattaagagtctaatttgaatattcgtgaatatgaagctcaagctaaatagtcttactattcactactccgtccccaggtgcctacccagaagaccgcaacagaatgagagtaaaagcttagaaaaacgggctaaagagaacaaaaagagaagtactgagaggaagatacagaaacaaagtagaaaaaaaaggagagagaggaagctggaagacctggagcaccgctcatcgtggtctcagacgcaccaggtagcagtgtatggtcaccttccactcacctagccctaaggggtatctatgatgctttgttgcttagtgggagaaatctgcaaccatccattaggaacccgctgcaacccccccacctcccggttcaagcgattctcctgcctcagcctcctgagtagctgggatgacaggcgcgtgctaccacgtcaggctaatttttttggtatctttataagagacggggtttcaccatgttagccaggttggtcttgaactcctgacctcacgatccgccggcctcggcctcccaaagtgctgggattacaggcgtgagccaccgcgcccagttcttaatgttatttcaaaatgagatatgccattaggtgctcattgagcactgactgtgctggggactgaggaacgggagccaagataaacataaagattgtctctgtctgcatagaaaatgaaatgtattttttgcactctctggacagcaaacaaggagataggtctcgaaagagaaagggttcgcttactacaaggacgttcaataacagttgtcaaccctgacggaataacctcagtggcaagtagcctgcaaatcatattcgtgcttgaaattcaggtaagtccttggaagctggtttttcatatacacgaatatgaccacattccagctgtccaggaactttccaggtactgaagaagccaggaaggagatcacactaccttggggctcccgtaactgcgtgccaagaggaaagtatcacctaagccgaatcttaaaggggtcagcttcttgaagaaagataccaacgatgccttaaaaagaggactgtcgaccgacagcgtagaagaggtgaaagtgtaggtcaccgagggcctgtccggccacgcctttccttttaggtataaacttacttcatttttcaaccatggctgcgatggtaactttgaaaataaacctaatttccatacgaatatttggtgattcacactttcgaggcaccccacagcacggtagccagaagtctgttgttttgcaattttaatcaaaggcccctaacacatgccttgaaacacaacttcatctgtgccaatacattataaattcataaaaaagttgagatctgttaagggaaggagaggtcagcttcggtgtagtgagctcagctgtggtgagctcggggtcaagtgagggtgtctctgaggccagcgcccccaagctgcgcaggagcgggcgtgggcgcccccgggtcagggctcttcgcagtcgcgcgggtccggaagcgcggcgcgggcccaacgagcgcacgcgtacacgcgtgcgcaggggaagaccgagtgccaggggctgaaccgcagggaagggggcgcggcgcacgcagtatggcgcccaacatctacttggttcgccagcggatcagtcgactcggccaggtgcggcctgaggagaagcctcccggtctccgccccggcccgcccctcgcctccccagccgccccac

SEQ ID NO: 39043 - DNA, 2300 bp, Homo sapien
tgcagggactttttttttttttttttttttaagcttttgagtgtttcacacaaggtatgttacagaagacaagtgcctaagtcagaactatgagaaatattgccatctgacaggttagattaaagaaggagagcacagcatctgggaagactgaaaagggaaccatagaaataggggaaaaaaggtgaaacatgggagatgtcattgaagtcaagagaaagaaagcatcaggaaaattcaggtgtcatggagaaagcaagtaagatggggacagtgaagtttgctagacatgatacaagtagatcgttaggtgacttactgatacaacgttataagtagtgaccccttaactgtaggagttaattcatacgttgtaaagttctccagtattggtattcattgatcttaattctctcctttttaaagagaaaagttgcagacctgaatatgaagaggagcttctcttcagtcatatcttaattttccatttagcctacagatgcatgaagtagagaattgacatcatagctactggcagcctctgtagctgttaagaagagtgttcactaatgagttttatataaacaggttctctctcaattttggattcgggtagtagtctttacaatcttgaaatgtgcatgctgcactaccccaggtataccattgacagtatggggaaaggttctaagtctagtcctttaaaaaaaaaaacacacacacacattgtataaagtgattatttcagacataaagtctgactcttcaaacagttatgagttaaacttatacctacttgggctttataataaatgaatgtgctatctttttattatttactgaggagaacagattagaggcggactagaaaattagggagaatgaccaattgcttggcataattaaatggtaattttcaaaattaagttgtttgagatcttttaaaattatttacattatatattaacaaatatttacacaggttgagcatcccaaatccaaaatgctccaaaatctgaaactttttgctcaaaggaaatgctcattggagcatttcagatttcagaactggatttcagatttcagaactggggatgcttaactgataagtataatgcacatattccaaaatctgaaaaaatttgaaattcagaatacttctggtcccaagcatttcaaataagcgatacccaatctataattacatattgaatacaaatctatcccgtaagaactgatattaaggacattgcaaaaatcactataaccattcttatccaatagaaactctcatactttattttccatcttaattatgttttgcttaaactaagtatttgaattcttattccctgggcatatattaattcgtagtagataatctgcaaacaaaatacatgacttcctattactagccacttgaaaatataacaggtagttgactatatgtatgtatggtatagtataaataattgcctctaagtataagattttgaaaggtaaaaaaacaaaatgtatgtctgtactattattggtatatagtttcaaaaattcacagaagggagccaggtgctctcattgcctaacaaaataatggaaatatgtattcattctaacatcttgacatacagtataaagggcactcagcaagtgctttttagttagactgattttaaatgagtagattcaggaataccagaaaacacacacacacacagataattggttgaaaatacgaggttagaaacttaaccattgaagaggagtaaggctacttaaagcgttaaaaactaattgggtaaggtatggttgacccagctacttcatttgccttacgatgtatattcattaaactaagtcactcaccttctctgtgatgttgatggtttggtatagtaaacatgagatatgattaaaggtgattcagggatagatcaagtgtctgcctaagtaaatctgtgttttcatttttttttctagtaccataacagcttgggggaaagaccatgaaaaagatgcttttgaacatattgtaacacagttttcatcagtgcctgtatctgtggtcagcgatagctatgacatttataatgcgtgtgagaaaatatggggtgaagatctaagacatttaatagtatcaagaagtacacaggcaccactaataatcagacctgattctggaaaccctcttgacactgtgttaaaggtaaattttcatatgtaactttattattagaatccctctgtaggccagctgcatcaatactacttttcatttatatacacacaatttcagagct

SEQ ID NO: 39044 - DNA, 2300 bp, Homo sapien
agcaatgtcaatacaatattttttctttgcacagatataagacctttttattttaaaactgcaaattcaactcaaagattgcaagatcaaattttgcatcttaaaaaaatactaccataaacaaagcccacattataatcagaatcctactttcttttctgcataaagcagcatagaacaacggtcatttatagatacatgaattccaggaagctaaacaaataagaatttgtactataagtaaagtaggttatataaattttaaatgaaggaaaaaacaccaaattaaggacaaaaattatctttttccttctttgaattgcactccttgaaataatataaaaaaactcccaaaatcaaatattaaaaaataatttgtttaggccgggcgcggtggctcacgtctgtaatcccagcactttgggaggccgaggcgggaggatcacgaggtcaggagatcgagaccatcctggctaagacggtgaaaccccatctctactaaaaatacaaaaaattagccgggcgtggtggcgggcgcctgtagtcccagctgcttgggagactgaggcaggaggatggcgtgaaccagggaggcggagcttgcagtgagccgagatccagccactgcactccagcctgggcgacagagcgagactccgtctcaaaatagaaataataatttgtttaaatgcgtttacaaataattttccccggtaaaacacagggaagatcaaccaataaatacataagccctcttgtttcaaacctcgttgctgaaaataattgtaagtgtactagtatttactacattggtgagtgcctggtgataccttccacttccatgatctttgccctgtattgtatctacgtgtagatgaggtgattgtcaaaaatatatactgacttcaagacatagtgttgactgaggttgtctttattagaagtctcagccatgcctccagtttcgagatgaatctcaattcacaagttccactatgaatctcaattcacaagttccactaccaccaccaccatcactgcccccagatagaatgagacttctaataacttgaaagacaagtctataaatatcctgtaatcgttttcactgtatcactttttcctggctacttttatccgataaaaacctcaatttatttttaagctattaaacatgcggacaaagggaatcttagttttatgcaaaaacgcaaccacgcatgagaactgcgcaagtctttcttggaatggtctgtatttgggtgaagtcatcagacgtcattacacttctttattttggggttgccaactcgtttcccaggatttaaagactataacgatgataaaagtcagtgtcgcaccctgtcaaaggcttggcccgttgccttttccttcccggcaatactcggttcaattaggtcttgtcccctcattatctgtgaggactgaattccacccccgcttttcaacgcaggctctttgctcgggaaaagtcaaaccatctctcaaaggatcaaagagctcagccatagacagagccgccggaggaaagcggagtcgctgcatcagatgaaaggggcccctcagcctcactcctcaccgcagctcctgggatcttaaagacagggtcaggaggatcaggagggacaagagggatggaggcgaaaggctggatccttaatccaggccggagacaaaggtgagtaactgcgcgtggtggacgggaagatgggcagtaggaggctcctcgccccctagccgggtggcgtgacttcaggaggacccagaaaaccggccaggactgggtaggacggaaggtcccaggcggggcgggcgaaccggctcctcgtggcactggcaaagctgggaacgccccctccaggccccgccctcccgcgcccgtgccgggaactcgaacttaggtaagcgcccgggtcacgcgccggggctgccccgctgcctccagcttcccagagctggcgtctgggaggaagagcgcgtgcatcacgtcctcctccccgccccgcctccgcgcactgcgcagcgcgctgccgcgccccgccctttctcggcccccggagggtgacggggtgaaggcgggggaaccgaggtggggagtccgccagagctcccagactgcgagcacgcgagccgccgcagccgtcacccgcgccgcgtcacggctcccgggcccgccctcctctgacccctcccctctctccgtttccccctctccccctcctccgccgaccgagcagtgacttaagcaacggagcgcggtgaagctcatttttctcctt

SEQ ID NO: 39045 - DNA, 2300 bp, Homo sapien
cagtagaggagaatgcagcactgagagcaaaagtgacttgtggtttgtttagaatcactgagcagaaatggaaccagaagttggatcttcatattcctagctcactgtactttttattactcaaattgccttcatggtctccagtgagagtccattcaccctaagacaatttttttcatctattttcatttaaatgtcaagaaaaatatttcagacatacagaaaagtaccaagaacaatatactgagactcatgtatctactccccaacttaaataaaatattatagtcataattaaagccctttttatattcattgttaatccctttcctctatatccccccaagatgtaatcagtatcctgaatttgctgtttatcatttccatgaatattttaaacttcactacatatgtatatattcacaaataatatattgtattactttgcatgtttcaaagctttataaatgatgtcatactgtaaatggtattctgtgccttgctttttccactcaacctatttttgagatttatggatattaatatatgtattctagttctgtgttgttgctatatattgaaagaatatacaggtatttatttttctgctattttttgttcattgacatgtaaattggttccaagtttttctcatttcatgaacatttgcatactgtcaccttggacacactgaggatatatactaggagccaagttactaggtcacatagtatgagcatctttaaatgtactggattccaatgtcagatctagaaacctagcttcactgggtttggtcttctaaatctatctgcttacttgctgtattagccagggtttcccaggggaacagaatagaatatatctatacatgaaagggagtttatcagggagaattggctcacacaacaggctgtctgaaaggtggggaagaaagaagccagtagtggctcagaccaagtccaaaagcctcaaaagcagggaagccaacagtgcagccttgggtctgtggccgaaagcccaagagcccctggcaaaccactgatgtaagtccgagagtccaaaggccaaagagtctgatatccaagggcgggaagcatctagcacagaagaaagataaaagccagaagactcagcaagccagcttatcccaccttcttccacctgctttgttctagccgagctggcagctgggtggatgaggcccacccgcattgaggatgggtcttcctctcccagtccactgactcaaatatcaatctcctctggcaacaccctcacagacacacctagaaacaatactttaccagctatctaggtttccttcagtccaatcaagctgacacctaatattaaccatcacacttgccatattgctgacttttcagctaagtgcaagtttgagattttaatgatggaagagcttgacacacgtagctaccttttgaagactgaagatgcagggttagtttgcctacagttatcactggttggaaatgcaaggagacagaagtctttgtattgagctggttaatttcgaggcttatagtgagctccaaagagagaatcaaaacatgtagctttgaatgggagattgtccctttgtgtcatcctgtggacatggtaggggatacaagtagaggcagccttccaggaaatgtagtaaagatcaaccatgtgatacaagttggttggtgctgcaaaggtcctgacaaagtcttgccctgtggttgtttctgaaacaccaccattcgttaacgcagtcctccactaaaatgcaaacaactggacaggagggttcaagtaaattatcagtgtgttatttatttaaatcttaatatgaaagcaatagtggtggtgttggtagtggggggtatgtgtaaaatctcctgagggaaatggatagctacagatgacaataaactgggctgagtctttaaagcccatttcaattaccatcttctctgtgaaggattccccaatgcctctgcctgcatgtattttccctgttctgatctccctcagtattttatgtcttttcagtaacaattatcacacacactgaattttattttaaatgtgcaaaatcagggaaccatgtatagtagagcaaatgtttattattacaaaagaaaacaccctcaaactttgtggcttaaagctaccatgtgtttgctcataattctacaatttggtcagggctcagcagggccagttcttctcagcactaggttgtgtcagctatgatccttcatgtggttgcactcagctgactgctcacctagggcttgaatgttcaa

SEQ ID NO: 39046 - DNA, 2300 bp, Homo sapien
tatacatttatgtaaatgtctggaatatatttatgtggtaaagaccctgaagaatttataaaatgatgattatcaaggaagggaggggattccaatatgaaaagccaggtctactttaatccttgttttatccttgcttttcattatgaagcccccctaactttctcatggctcactctagattttgggtattccaatggaaattattcaaatttcactttactatgtgtctcagaattacggaaagagcaaattgtgatgtaaagagttgttgctatatcattcctttataaggatttaggaagctggtatttggctctgtaatcttgttctgagatcagagtgtgcttttctaggaaaatgattttctattcagaaagttaccatgattttgctagagagctggttcctggttagatgttttatttttgccataagcccattgtgtggagttttatttttgccataaactcattgtgtggtgagagctttcaagaatttgacatctctggtgtagagctttcaaattatttattttaggttttattgaaactgaacaaacaaaatattattcataaatctattataagacagagaaaaactgctcaattctgggtggggtggaagtaggaataggggtacagctctgtccttcgtcattctacttatgcataaagcatgttctattgaattccttagagtctggacagcacagtttgaaaaaccttcagtgaaatacaaagatcactagattagaaatcgaaggatttagaatcccagttctgctatcagccagctgtgttactgaacctctatggtacagatttcctcacctgttaaataaggagaatgaactaggtctctttcaggtcaaatatttgaggaaaccattagcaactacatgtaaatcacaaaactcctatactttatttgttcactactgcaaaataagatgtttcctgggtaaaatccacatgcccacctcaaagttctaagtgtcaggagattttttcttttaaccttaagaaatttaaaggagttctgtgaaaattgcaatataaaatatctaattgtcctgttctaagcagtttcaacatttctgactctatttgggataatcggtggtatttcattgattcattcggcaaacacattgagtgtccactacctgacaggaactgagttaggtatagaggacagaaaagatgactaaaggatgtccactactctcctcccaatacaaaaggtaatgtgttttgaacaatttgtgtttttcaacgaaaccttatctgttgtctgcgatgatgcatcctttctaaatgataggggtggctttgacattttaaaactaaatgaaaaacgaattggcatccataaagaactgtgtatttaaaactatattttcttttcacagaatggctttattgtaatagatctttgatcaacttgagcaaagagtatttagttttatagggtatgacatgttttgctttctggataagcagggtctctcttaaatatgaagatggctccagtgtccagagggagactaaaatctctcagctgccagccacgcacattacctgaatgattctggattactactggcttcttgagatgggctggggtcaagacagggaagagttttgaatgaagatgccagaagaggcctttgagagggtggatgggaattgcgaaaggcccatttcccctagacttaaacccaaattccctagctgtgatgataccaggaacatccttcagggaaatctccctttgttatccacactggtagagctcccagctcaatccacaactgcacaccccctcactctaagagtcactcttcccatggtgtagccaacatccaccctcttactctagacgtggcagccctcctagatccacccaaccgttgacttacgttcaaaggccatcacccaccccagcaccatcttccaggaactggcctctcccccatcagtccccgcccctcttctgagagcacccaatgggtggagtcggggctgcggtgggaggggcctgaggcgggcacatttaaagaaaggcagccggcgaaaagaggcaagagaggagaagaaagagaaaccaggggggcgaggcgccgtccaatgacaaagcccaggggtgggcgccggccgccatcttgtaccgggcagcaggatattcgcccgcgtcctccgccctcggagggggaggggcggcggcggaggcgagaaaagtagcgagagacgccagcagcagccgccgccgcggagccaacgcggactgggacggcg

SEQ ID NO: 39047 - DNA, 2300 bp, Homo sapien
aatatgctatcgcacaagatactcatgggggatttaacaccaaattttgttttggaacctatagtcactcactgttccaatctgaaaaatacatagatgtatctcaagtgtatatattggttaccagctggtagtttctcaaatatctccatttctttcagctgcttcacactcactaccaagcaaaaaggtaggcttcctatgagcaatgatatgaaataatgtcataggtaaatcaaaataatctagatgaaaataaaatcagagtcacaatccaattagtatttaatatctctgtaattgagtgtatgctaataatctttgaacatttagtttcttaaaacagaaaaaccaaatacaggtacattcatctcattcattacatttaattttctactaacaagaatgttcaagttttacagggcgagtatcccttatctgaaatgcttgggatgagaagtgtttccaattttgattttttcccagttttggaatatttgcattatacttactggttgagcatccctaattcaaaaatccaaaatctgaaatgctccaatgagcatttcctttgagtaccatgttggcactcaaaaatttcaaattttggagcatttcaggtttcagattttttgattaaggatactcaacttgtactatcaaactgggagctcaaactaggacatcattccaaagaaaccttccagaatgtcatgacgtcgtaattaaatgtttttgttacagaaaggggtctcagttcagaacccaagagagggttcttggacctcacgcaagaaagaattcaaggcaagtccatacagtaaagtgaaagcaagtttatcaggaaagtaaaggaataaagaatggctactccataggcagaatagcggcatgggctgctcgactgatgatactttttgttacttcctgattatatgctaaacaaggggttgatgattcatgagtctccaggaaaggggtgggcaattctcggaactgagggttcccgcctctgcccctgccgacttcttagaccatatagggtaacttcctgatgttgccatggcatttgtaaactgtatggcactggcgggagtgtctttagcatgttagcgcattatataattagtgtataatgagcagtgagacgactggaggtcactttcatcgccatcttggttttggtgggttttggacagcttctttacgcatgctgttttatcagcaaggtctttgtgacctgtatcttgtgccgacctcctatctcatcctgtgactaggaatgccttaacctcctggaatgcagctcagtaagtctcagccttattttacccaccccctattcaagatggaattgctctggttcaaaagcctctgacaggtagaaattcagatgttagaatattttacctccttaaaataatttaaaggaccaattactgtatagcttatttatttggatattttatatgatgttttctaaacatatagtatttgtcagtgtttccagtgacaaggttttttgtgaagggatttagaccagtggggagcccaaggatatttattttgctgtcgttcttgagtcactataaatatttcagttaagagtagtcataggagagcaagcaattggagctatctggatttgaaagtacttcagctttcttcagcatccatgctatcagtagctgcctaaccttgccttctgatattatgcaagaattggacgcttctagctaacaaaccttcactcatgctggcttttcccatcctttgatcccttaccttgatgctgctttatgatgccaaaacacctcaaagcttgaacttggatagcatcaaaacataaagacagtactgaatcagctcatgaatcctcaaaatcaaaagtccttctcccctgtccgcatgtccagcatttgtgacttagtgaatcatagggtggggaagtgactcacagtcagcccaacagcactctttttttcattagttgtttctgaagaattgtaaagttctgaattcaaagcgtgcttataagttatcgagatggactttttctcccctgcagcatgccagaaactatacaatccaccccctctgaaggagtttgttcatttaaaaaaaaaaaaagggtaagcatgtttttaaaatttagttgcagcagacagtacagaaaacagttattatggccacagcacatgttgcctgggtctgctgctttttcttctttcctattttctctcatccctttgttccactaaatcctcctgctcctacccccttttaccaccaccccctcc

SEQ ID NO: 39048 - DNA, 2300 bp, Homo sapien
cagagcctttgattgtgttttttttcccaaccaaaatgatttctgtgtccacagattcacagaagggaaaaatattattaaaatgggatattaatgaggactgaaggtcttctaaatattctggggatataaaatattcttactcgtaaaggatgcctctacacggaggaagtatccacagaggaaggaaatctttgccattacttcttactgggaacatttactacagatagtcaaattttagtggctatattaagatttggggaagagcagggtacttttaatctcaagccaccaataaacctgacatatttgccagtttagtcataaaacagaaaatcctttgcctaatcaaacttagcttaatagttccttcagaagcaggcagggccaagaggctgagtctcgtgtttctggaataatgtggcatgtgtgtgtgtatgtgcagtgccagattgggacttggccccctggaagtgactgagccaggacagggaagggatctattgaatggtctggggaacagggctggccaagctcatggtccctctgaggtcagccctcccaccctcaaacctcctcccactccacccacccccaggaaccctcccacacactctgggtaaaacacagcttggcaagctctcacatcatggcttggtggctacagtgtgttgatcttccctcaggaccaaccaagaaagctagccttggtgcttctaaagctgccagcctcctaagggagtattcctatataggaatatactttgagaagctgataagacccctctaaatatttgggaggcagcctttgaattaaattatttgcctgctgatgtcaactattagagtgctatttaaaagttaaaacccaagaggcatatgtaaaaggaaataagtcaaatcaatcatttatctcaatatcagagtaattcagaggaactcttaattacatacctccaagagacttgtgaggtcaactccattctatctgctgcccttgaagctcagctggagtccctcaacaccccgattggaggatgaactctagcatagggaattctgagatggagggagggggcgctggttcaggatgcttggaggttctagaaagaactgaggtcacctggaagatacaacgctactctaaaaatgattcaggatggcttttctatgcattctctactcccataggaatcaggggccacctcccaggatggaatctgcctgatgctgtaacagtgttcagctccccaatttccccatgataacaggcaacctccttctgttttgtctacagttaattaatcagtcattgctgacagtaaggctccatcctcaacacaggatattttctgaagcattaatttttgtttcaatagttgatccttgtttggaatataatgtgttacaatgtagtggtacttagtattaaaatcaaaatacctttttattcatctttcaattttaatacttttagcatttcaaccattatttgaagggttacttactgcagtatgtcacatttatatacacacatgcacatgctgcagtgctttcagtttgagccagtgatattttaggccccaaatgctctgaaaaaatagagaaagctctcaccaagctaaggaagtgagcttgcagaccatgcctttaaaaattttcagcttgataacttagtcctcaagatgactaggtttctcttcccccacccctcagttagcatgtgcgaacaaggattcttttgaattcccaggaggggaatgagtttaatttgactggtaaaagtcttcctaataggatacctaatactgtggctcttagaactagctacaaagatatttcatatgtttatgtctcataatgggtaattttggtttggatttatgtcattttgtctcagtatcacaatttttgaaaaattagttcaaagagaaaaaaaaaagaaaagaaaaaccatggtaaacattgctcagtctcatactcctaccctctctatgctaaaacaggaaatgcatttctgacacttttaaaatgagcaatcacacgtataatcaacttggttaaaacttccttcctggtaactgcaacacttcctctgcatctggatatgaagggagccccagaaaagcggaagaatttagacgcacactgggtaggtttgaatttgttttgttttcaaaaattaaacaaatgatccttcagcatcatcgcctccgctgctttatcaggtattgcttccttctattttttgctctttgtggggtctgactcggaatagtggcacttccttctcggct

SEQ ID NO: 39049 - DNA, 2300 bp, Homo sapien
gaaggaaatctttgccattacttcttactgggaacatttactacagatagtcaaattttagtggctatattaagatttggggaagagcagggtacttttaatctcaagccaccaataaacctgacatatttgccagtttagtcataaaacagaaaatcctttgcctaatcaaacttagcttaatagttccttcagaagcaggcagggccaagaggctgagtctcgtgtttctggaataatgtggcatgtgtgtgtgtatgtgcagtgccagattgggacttggccccctggaagtgactgagccaggacagggaagggatctattgaatggtctggggaacagggctggccaagctcatggtccctctgaggtcagccctcccaccctcaaacctcctcccactccacccacccccaggaaccctcccacacactctgggtaaaacacagcttggcaagctctcacatcatggcttggtggctacagtgtgttgatcttccctcaggaccaaccaagaaagctagccttggtgcttctaaagctgccagcctcctaagggagtattcctatataggaatatactttgagaagctgataagacccctctaaatatttgggaggcagcctttgaattaaattatttgcctgctgatgtcaactattagagtgctatttaaaagttaaaacccaagaggcatatgtaaaaggaaataagtcaaatcaatcatttatctcaatatcagagtaattcagaggaactcttaattacatacctccaagagacttgtgaggtcaactccattctatctgctgcccttgaagctcagctggagtccctcaacaccccgattggaggatgaactctagcatagggaattctgagatggagggagggggcgctggttcaggatgcttggaggttctagaaagaactgaggtcacctggaagatacaacgctactctaaaaatgattcaggatggcttttctatgcattctctactcccataggaatcaggggccacctcccaggatggaatctgcctgatgctgtaacagtgttcagctccccaatttccccatgataacaggcaacctccttctgttttgtctacagttaattaatcagtcattgctgacagtaaggctccatcctcaacacaggatattttctgaagcattaatttttgtttcaatagttgatccttgtttggaatataatgtgttacaatgtagtggtacttagtattaaaatcaaaatacctttttattcatctttcaattttaatacttttagcatttcaaccattatttgaagggttacttactgcagtatgtcacatttatatacacacatgcacatgctgcagtgctttcagtttgagccagtgatattttaggccccaaatgctctgaaaaaatagagaaagctctcaccaagctaaggaagtgagcttgcagaccatgcctttaaaaattttcagcttgataacttagtcctcaagatgactaggtttctcttcccccacccctcagttagcatgtgcgaacaaggattcttttgaattcccaggaggggaatgagtttaatttgactggtaaaagtcttcctaataggatacctaatactgtggctcttagaactagctacaaagatatttcatatgtttatgtctcataatgggtaattttggtttggatttatgtcattttgtctcagtatcacaatttttgaaaaattagttcaaagagaaaaaaaaaagaaaagaaaaaccatggtaaacattgctcagtctcatactcctaccctctctatgctaaaacaggaaatgcatttctgacacttttaaaatgagcaatcacacgtataatcaacttggttaaaacttccttcctggtaactgcaacacttcctctgcatctggatatgaagggagccccagaaaagcggaagaatttagacgcacactgggtaggtttgaatttgttttgttttcaaaaattaaacaaatgatccttcagcatcatcgcctccgctgctttatcaggtattgcttccttctattttttgctctttgtggggtctgactcggaatagtggcacttccttctcggctagattatctgaaactgttgtcggttcttgagatgatactaccaccgaatgtctgtgtttcattgtctagtccaacctgtattgtggatatctacaacgttccggcaatagttttgcaggtgcatcacatttttgtttttgttttgggaggaaaagggagggcacggcagccaggcttcatatt

SEQ ID NO: 39050 - DNA, 2300 bp, Homo sapien
ccggccggccgctccgagtgcggggtctgccgagcccacgcccacccggaactcgcgctggcccacaagcaccacgcgcagccccagttcccgtccgcgcctctccctccacacctccccgcaagctgagggagctggctcaggccttggccagcccagaaaggggctcccacagtgcagcggcaggctgaagggctcctcaagcgctgccaaagtgggagcccaggtagaggaggcgccaagagcgagtgcgggctgtgaggactgccagcacgctatcacctctcaataccaactctgaactgcccacatttagattccagagaaataaatcttaagctattgtatttcgcattttctgccacatgtgagcagtgtttatcataattaatacaaatattatcacaaatttagacaggtgatacacatgcatcttagattaccagatccgtaaaaataataatgcttacacggtagagagtagtactaacattgtgctccaaccggtgacatgtgaggctcaccatattttataaaagtttaattctttttttttttttttgagacgaagtctcactcttgtcccccagcctggagtgcaacggcactgcacgatctcggttgactgcaacctccgcctcctggattcaagcgattcttctgcctaagcctcctgagtagctgggattacaggtgcctgccaccatgcccgctaatttttgtatttttagtagagatggggtttcaccatgttggccaggctggtcttgaactcctgacctcaggtgatccgcccacctcggcctctcaaagtgttgggattacaggcatgagtgagccactgcgcccggccaaaagtttaattcttaaaatgctcgacacaattagaagcacttaactactgtatatttaaagcaacgtaacattattactataaagttgttaagaaatgaaaatagagaaatacattggctcatggagtcaatacaggatgcatcattaacaaagggttaacatcaagatccatttttacaagagggactagttcgttacatctctgatttctagacttggagtttccccagtcatgtgtttactcttccgtgggtgggaagataaatcagaataaccaagtgagcttgctcttgaaatattttatttacaatgatatgataattgtagaaaatgaagtatgcgtacttaaatagaatttaattgacaaaagacaattttctctacttcaaaattgtaaacatttgcaaagtaagcctcatttcaaagtcaaagccttctactttaaaagcacacattagtaattctatttttctttatactgaagtatttcaatttttggacatacaagtcaaaaatcattcaaagcataaaggaaagtttcaaaataataagcgcctcatcctgcactatcctatttaaaagagatcaactaactttgataggtgcctctcaataaatggtgcctttgtctcaataaatagtaaatgcgtggagtgcacaacggaatagcatcagtaagacgaaacataataaacaggatggatcgggaaaggctggataaaatgtggggaagaaaaagaaagacgtcacaaagatggggtagcatttctttgtccaaaagagaaccagtaccaccataagactttaaacaaaggacattagcaacacttatcatgcaactagattctagaaggaaaataaaatgccactactaaggtggaggctgaagtttcaagacaaatctcctggcaccacctctgcgggggttcaccatggcgaatgacgcctgggaagcggggcgagtggccagcccgctcctggacgcgcggacaggtggacacgaaggcggcctcgctgggcctccctccgcctctcccggcccgggcgcgcagccctgcggtggtctgacaggcgggtgcgcggcgccagccagcggaggttgccatggtttccgggggtcacgtgggcgcgctctcctgcgccccctcccgcgcaccgcggcggggcgggggcggggcgcccgggcgggggagaggcgcggccgcggctggagcgggaggagcaggagatgctgccagccctcccggggccgcgctcgctcagccgccgccaccacacggagcagacgcgcgccgggagccgcgggccgggccagccgggccgccggggcccagtgcgccgcgctcgcagccggtagcgcgccagcgccgtaggcgctcgctcggcagccgcggggccctaggccgtgccggggagggggcgagggcggcgcccaggcgcctgcc

SEQ ID NO: 39051 - DNA, 2300 bp, Homo sapien
agtttgtgtactggagaggggtaaagcagtatgtcaatctcttgccagctcttttttttttttttttttaagagaaaagttttttagttttctaggaggagttagacataaatatctcaaaacaattttaaataattaggtgaacttcacagatttttcttttttgtcaagaaattacatgttggagtagagtttatattttctattctagtacacgatgaccctccattgtaaaaaaaaaaaaaaaaaaaaaaagcatacacaaagtagcagagacattcatttctttgagtcactaataatttctgaaagatgataaattcaaatcctgtcctttttcctcagggaaaaaattaagcattctgttggctctcctctgaattattttaataaaaaatagaatgctttattactatttgtgaacatagaaagtaagtatttgattacacgggaggactactttataatttcacttcacggattcaaatggggaattctcaagaattttaaactcgatttcaacatgtgggggcttattttggatttcttgatttgttacgcggctttcaggtatatttaaaaatccaagaaatgcaggaggttttaaagaaataactagctgtgtgatttctggctctgtccaaaggtttgcttttacagatttcttactaatgtaggttttcctcatcttaattctaagcatatatttagtgatctaaagttagaaaatctaaagcacaatttaaatgattaaacactaaaggttcaaaggggggaaaaagcttaatcatgcctttgtaatgtgaatggtaaagacaccaattattgactagatgcagccgactgtgaatggacagccatgtttaaagagaagttaactataaagcagggaagcgtctctggtgagtcagagaattcgtaacttgaggaactcctagtggaaatgaagtggaaagacagtttctttcatcaatgagaaaacgtctagaaggaaaagagggttaataaaactcaccagagaaacttactgataatgattcacaaattaaatcagtttacgtcatacattacaccctttgtattacgttaaccaacgagcatactaatcagtatggaaaatgccgctttaacttgcctcaatttcgtaatcgcccgcccccgcccccgctttgtaaattctctagactccagcttctcgcttgctcacagtccatcccccagcctcactcttcctggcacttaggtggcggctcaacaaacttaggtgaactgaacagagctgacaaggcaatctcaagttgctgtcctgggagtggtgaggcaaggcacaagagaaaggacttctagttcttcccactgccagtgcagcccccagcatcactttcgaccccttcgtgcctggggccgtgatttgtgggtgatcaagtccctcgctagcctgcagtacttccgctggtgcagtcatctccttcccctcgcactaaaacaataccctggcctcctgccaaactcttgagcagcgagcaactctggctgtttatggcccggattgggtgctgcaagaggcttgggccgctctaagtgttagcagaggcccggaggaaaagaagaggcccaagctttaaaacactcccttcctccgccccctcccttttgtcccagacaccaaaacaaacgagctgatacacgtgtccctatgactcttgtttactatcaagactgcgctgtgcgagcgcctctgggatacgtagtccagctcttccccggccagcagtctcccacagccaaggaccaaggcttgagactacgaacccacaatccatttcggggacaaagtttggcttgggtccccggactctcggcaatagtccaatccgaagcacttactcttgtgattgacatgccatcttctccagtaaacacaacacaaaagtcaatacatgcccgccccccgagacggaccacggtaccacccaatgggaaaggggaagaaccgaatggcagttctgcagtccaataagagggcgaaagagctgggcggggctcaacccccagggggttgaggggagggggaagacgaagcttgaaagacttggtaatggcgacgggtttggtaagtaggaaagtttcggttgaggagtaagagctgccgcgggagcagtaacccgcgcgggggaggccgacgtcggtcggagagggggtacgagagctgctggtggtgttgtcgtggccggagcggcccgcgcctgggctgccggcacttcgcggcaggtttgttgtctttcagttagggaagaggt

SEQ ID NO: 39052 - DNA, 2300 bp, Homo sapien
taaaggttcaaaggggggaaaaagcttaatcatgcctttgtaatgtgaatggtaaagacaccaattattgactagatgcagccgactgtgaatggacagccatgtttaaagagaagttaactataaagcagggaagcgtctctggtgagtcagagaattcgtaacttgaggaactcctagtggaaatgaagtggaaagacagtttctttcatcaatgagaaaacgtctagaaggaaaagagggttaataaaactcaccagagaaacttactgataatgattcacaaattaaatcagtttacgtcatacattacaccctttgtattacgttaaccaacgagcatactaatcagtatggaaaatgccgctttaacttgcctcaatttcgtaatcgcccgcccccgcccccgctttgtaaattctctagactccagcttctcgcttgctcacagtccatcccccagcctcactcttcctggcacttaggtggcggctcaacaaacttaggtgaactgaacagagctgacaaggcaatctcaagttgctgtcctgggagtggtgaggcaaggcacaagagaaaggacttctagttcttcccactgccagtgcagcccccagcatcactttcgaccccttcgtgcctggggccgtgatttgtgggtgatcaagtccctcgctagcctgcagtacttccgctggtgcagtcatctccttcccctcgcactaaaacaataccctggcctcctgccaaactcttgagcagcgagcaactctggctgtttatggcccggattgggtgctgcaagaggcttgggccgctctaagtgttagcagaggcccggaggaaaagaagaggcccaagctttaaaacactcccttcctccgccccctcccttttgtcccagacaccaaaacaaacgagctgatacacgtgtccctatgactcttgtttactatcaagactgcgctgtgcgagcgcctctgggatacgtagtccagctcttccccggccagcagtctcccacagccaaggaccaaggcttgagactacgaacccacaatccatttcggggacaaagtttggcttgggtccccggactctcggcaatagtccaatccgaagcacttactcttgtgattgacatgccatcttctccagtaaacacaacacaaaagtcaatacatgcccgccccccgagacggaccacggtaccacccaatgggaaaggggaagaaccgaatggcagttctgcagtccaataagagggcgaaagagctgggcggggctcaacccccagggggttgaggggagggggaagacgaagcttgaaagacttggtaatggcgacgggtttggtaagtaggaaagtttcggttgaggagtaagagctgccgcgggagcagtaacccgcgcgggggaggccgacgtcggtcggagagggggtacgagagctgctggtggtgttgtcgtggccggagcggcccgcgcctgggctgccggcacttcgcggcaggtttgttgtctttcagttagggaagaggtgggggtggggaagggaggggcaggagcgcgggggattgggcagactggagggctcgggtcctcgttccttcttctcggagggttgcccttggggtgggggcagttaaccgttcgattggtgcccgcggcgagcccaccggagcagcgtctcccgcgagctcacctgggcttcggggcggcggcgctagggggtctcgggcgggggccgggaggaggcagggggagggcgaagttccgggccaggtcgcgcggtgggtggccgggccgggtgtggagatggggcgggccagggcgggggaaggggccgacgcagcgccggggctgcccaggaaagtttgacttcaactccccgtttgtgggcggagggtcggagcttggccaggggtggggggctggccggaggtgggggaccccagtgaggcgccgcctccttctggactgagggggattctggctgagctgaggagctcgcggagccgctgggccccggggctcattgttacgcagttcgaatgaatgggctcccaggcgcctgcgcgctggggctgagccgaggggaaaaacaagcccggagtccgggctgcggtcacatgatggggggaagggaggggaacgcgatgaatggcgaaagagggtgggggatggacttggcgtgaaccgggaggcaccgctctgtgtgacccaaagaggaggcttggcaggcgattccagtctccgcctttcaacctatgctgccaccgcaggccgattgaaacaaa

SEQ ID NO: 39053 - DNA, 2300 bp, Homo sapien
ttgtaatacatcaaaatgtaaaaatatctaagtctggttggtggggttagaagtaatcatattcctttttttccaaaaaaattttttttcccattttttttcacagtgattgtattttctagtcaggaatacatttcaaaaccaaaaagatcatgaaaaagtcttcgtagaaagaaatttatcagtgtcatcggtgtttattggtaattaacatcatgacttagaaagcttataaatattaagtgattaacattttttcagtgcagttttgatcagcctgcactgggtgcttgactttcagtgacttttaacagcaatatattttattgctttattttgaggaaaaatatgttgttgcaaaagtcaggatttttttgtgtatttcatattcactcattagaactttttctttaagagggggggtcttgctacattgcccaggctggattccaacgcataggctgaagttgtcgtcccccttcagtctaccctaagtagctggaactataggcatgagctactgcatcaggctagaacttttttaaaaaatggaatttagactagagcctgagaaatcagaaaaatcttaccattgttgcttatgttaaataaagaactaattcgatcgttgtccaaagggtgaaataaaagagacaaccacattttcctttcataataatatttagttgttggattttgctgagaaattatttaaatttattaacccatattctcttccttgtgataattttgtaggcttgcaggtagatttactagttgtttaaatttcccatgatgattattcatctttctatacataatatcctattcagaatgacaggtatcttttattatggctaggtcccaaattttcattaagaaaacctaagaacatttttatttttatgagaattgtaatatatgaccattttaagaaactctgaaatgttatttagaaaatgtactttttttggccaggtgcggtggctcatgcctgtaatcccagcactttgggaggccgaggcgggtggatcacctgagatcaggagtttgagaccagcctggccaacatggtgaaaccctgtctttactaaaaatacaaaaaattagctgggtgtggtggcacgcgcctgtaatcccagctactagggagggttaggcaggagaatcgcttgaacccaggaggcagaggttgcagtgagccgagattgtgccactgcactccagcctgggtgacagagcgagactccgtctcaaaaaaaagaaaatgtatttttttaagtgtgctgaagtagttcactttcagaatgaagaaacaaaataaaaaacacagtaaatagagacattaaaatagaatctttaaaaaaggacaaaatagaatattcttccagttttttttaacttttattaaggaaagtttttaaatttccttttgaatttgaaggtacaagtgaaaaaaagagtcctattagtctcagtttttgcatctgaaaggacggttactaggttaaataaaagtatatacaatgccatttttcctcagcagaaaagacttttttttataattcaagatattaatcttttgggattgaaatgtgatttagtgctgagtattcagttgtaggccaagatgttaaggagtcatccgggtctaaaggatttgagggagctataaatggcagtgtatgattaagttaaaatctaacactgtggccgggcgtggtggctcacgcctgtaatcccagcactctgggaggcccaggtgggcggatatcttgaggtcaggagttcaagaccagcctggccaacatgacgaaaccccatctctactaaaaatacaaaaattagctcggcgtggtggcatgtgcctgtaatcccccctacttaggtggctgaggcgggagaatcgcttgaacccaggaggtggagtttgcagtgagccgagatcacgccactgcactgcagtctgggtgacagagtgtgactatgtctcaaaaaaaaaacaaaacaacattgtcatgtctctgatttattttaggtttgtgtactgcccaaattgcatggcttgacatcatttcttaatgtcgtttttattttaagtcagagcaccataacatggtgtgggaagtgaagacaaatcagatgcctaatgcagtacagaaactcctgttggtgatggacaagagagcctcaggaatgaatgactcattggagttgctgcagtgtaatgagaatttgccatcttcacctggatataactcctgtgatgaacacatggagcttggtaagcaaaattaaaa

SEQ ID NO: 39054 - DNA, 2300 bp, Homo sapien
tttttgtttttgtttttttgagacggagtcttgctctgtcgcccaggctcgagtgcagtggtgcaatctcggctcactgcaagctccgccttccgggttcacgccattctcctgcctcagcctcccgagtagctgggactgcaggcacccaccaccatgcctggctggttttttgtattttaagtagagatggggtttcactgtgttagccaggatggtctccatctcctgacctcgtgatccgcttgccttggcctcccaaagtgctgggtgggattacaggcatgagccactgcacccggcccttcctctcctttttaaagagtattagtacagacatgcataaactttttctgttaaggaccagatctctatttggcatctcagacaattatcctgatttgggaccttaccttcagatggttttccctcctccacctggctgtcttcctctctgcttcctttccagactgctgagtccatacacatcattcatcatcctctataggcttgtttctttctgttaccccacccatgaatatctggtctgtttgtgagggaaggatctgggtatgctcctgggagctccatatactctaaagggagcattgtctggtaaaagagacttttgaggggaagaaaagagggcaagggataaagttttttttttaaggtgatctttgaggagaaaaaataactagaccttatatgtagttgcttttcagcaagtttgtattagaaaacaagaaatagtgtccagttacaaggagggtggataggctgctctctgctataaaaagtgtaagcatttttgcttaaggtagttcttgtatctgcccagtgatatgtggttggtagataaagagttcagagttggttacactaagcttaaatgctgtcttcatactgagacttactgagtacatcaaagtagaagaaagaaatggataggacgccctgcattagagggggtattatcattcacaaacgaaatatacacatgtatatgtattgatagaaaaatgaatgggataaataaatgaaaccatagtcgtagtttaaaatatattgtcaaatctgaaaaaaacgatgtctaaaatgtgtgaggagggtttggataaggagttaaggaatataattataaaatgaaatcttgctgtctttactagtgtttaccataaatgtgttcaatgtaataacattggcgttttaaatatgaagttctttcattaataggaaagatctactttaaggacctatgcttatggttgaaactgttgctttattttagatcatctcctgtacacatcatagccactagcaaaagtttacattcctatgcacgccctccaccagtgtcctcttcttcgaagagtgaaccagccttccctcatcaccattggaaggaggaaacaccagtaagacacgaaagggtaagtttatttatgaggttaaacttttacaaagtttgtacaacagttgaagtacattaacattcctcataggaagtagtctcactgttctgttagtgatctggatttgattttatatacagctctgctatgtgttaggaaagcttattattaatgggaatgtgcgtataactaaagcttccaaaaactttgttttgtgtgtgtcttttttttctttttttttcttttttttttttttttagcaaattctcccacagcctgacaaccctcagtttttgaaggcattatattttccctaaggttagaattactaagttatccacctataagcatgggcctaaagacgtgggatgaaaacagatattaaaaggtatattttaaaaacaaataaaaaagttgataatatttttctccataggcaaatagtgagtcagaatctggcattttctgcatgtcctccctgtcagatgatgatgatttgggatggtgcaattcctggccttcaactgtctggcactgttttttgaaaggtaaaacaaacaaacaaacaaaaaccttgaattttccacagcttacttgtctagtacagtcacgtgtctaatacgtgttttctacctaaaccttaggcacacgactgtgctttcataagggaagcaataaggaatggcaagatgttgaagattttgctagagctgaaggctgtgataatgaggaagatcttcaaatgggcattcacaaggttgatttaaaattcttaaaaaatttttcaaaatctttccaaatgaaacaagatttattgttaatctacagaaatatcctccattcactttgatatttaaatgacatcgtacattttaggtagagcat

SEQ ID NO: 39055 - DNA, 2300 bp, Homo sapien
atcatatcaggaaaacaaaattatttcagtttgtttcattattgctgatgctaaattagatcacttcattaaattggcatatgccagagtgctccttgtaatactatgctcttatctttgtaattagtaatttataggtgcatactttgagactatgtgatgaatatcttgttctcaataactttttttttttttttgagatggagttttgctcttgttacccaggctggagtgcaatggtacgatctcggctcattgtaacctccgcctcctgggttcaagcaattctcctgcctcagcctcccgagtagctagaattacaggcatgcaacaccatgcctggctaattctgtatttttagcagagatggggtttctccatgttggtcaagctggtctcgaatcctgacttcaggtgatccgtccaccttggcctctcaaagttctgggattacatgcatgagccaccatgcccggccaataacatttcacttagtgttttggtatccatcgatactctttgtcttaattaactttgcaaccagtagttgtaaaatggtgatttttttttctaattctgtcattctttctgcatttattagctgatactcttttgtaaagagcatttccatcctttttaaacatttgagtttcactgtgtactcatgaattattttttaatcattgttttataattcattaccatcagtattattttggatggccaaattctctgaaatttgtgttgtggaagccccctccagtcaacttgatgtatccttttgaaaaatttcatttgtcttcaaatactttattgctcactggcacaatatctaccacattcaccttgtattttcactgctccaaatatgaaatcactcttttttccactgaatcctgctttgtttttattggagaatggtcttagaaatcaaaatttggacactacatatacttattactattgaggaaccattgtctctctgactttccagtggatagagtggggaaatacctctgattcctgttacgtatttgtgtctttattctgtttacactgagaaccttattttgctccattccaaaatatacctaaactagtttcaggattactacttcaataccacatccagcaaaaatctatttaataaagttcagtatttctttgtaatttttttgtgcataaatgtgtctcactaaagtcagcgttctgtaagtaaaaattccgtgaattaaaattgttttcctcctgtgtggttatattgtcaatttgatatacagttagttttatttgtttcggtatgtgtttatgttcagttttagggttttttttttttttaagaaaggggatacaacacacatacacacacatgtgcatacacaggataaatgggaaattagtgaagatggtttcctacaagaggcatgagagtggtaggaaacagaggaagactcacctccatccctgtacctttcacctgtttcatttcccaccattctcacacctcttgtaggaaaccattttcatcaatttccattttatccttcctgggtatgtgtcgcttccctttctttcttaagcataaaaggttaagattcttactcaataaattatttcctaaagaaggaacttctcattttttagcttgcgtatggtttttataataacatatatatatatatttgcctttggaaaactttatttttcattgttctttctcactcataaccagggggacctggacgatctaccatgccaaccccaggaaatactgcagctttgcgtgcctcattctggaccaatatggagaaacttatggatcatatttatgctgtttgtggacaggtaaatatttgaaggagtggaaaaaacattaatatggattaactcctggttattccaaattgtgtgaccttgggcaggttttttaatcaatgagcattcaaaatacctccactagctgatgataatgtacgtaaaggttgccatttcccttttcttgctttttctattgcctaagctttacatttgtttcatttaaggtacaacatctacaaaaagtattggccaagaagagagatcctgtttctcacatttgtttcattgaagaaatagttaaggtatgtttaaaggaaaatatttttacatctttcttgtacaaaacaggaatatatgagtcagcatcatttgtgttactactaccttatagagtggctacatatcagatggcaatagagaagtgtatttcttgacaactataataatgttccttgcaatataaatgtaatcatggggctggg

SEQ ID NO: 39056 - DNA, 2300 bp, Homo sapien
atctgaatataacttgaaaacactgtctcacaaagagttaaacaaagcacaaaaatatacttcaacaaaaggaatcaaagttgacccaaaggatgtttgacttgccaaaagttatataggtaataaatagcaactaaatctagattatccaattctaagtcccaagaccttcataattttccaaagagagaaggccaaccgcctagtacagcgtggtttgcagttttaacattgactctgctgctaacttaccttgaccctttcaagtcagtaaatttctctgtacctttgtttcttctacttcatggggatattctgatgataaacataagcaaatacttgaactctggcagaaaagcactctgctgtgttaataatctcctcatccccatcacatatttccactgatgctatgctttctctggtcttagttttaagcttaaatgaatgtgtgtgctgtggtgtgtgtgtgtgtgtgtgtgtttcggtgtgtgtaagttttctttataaatggctggcattctagcaagatccttttccccaactttcaaaacgcatgaatagcagcacaacattttcatttttagaattaccaaagccttgccacccaaagctgtgcagaagattttagaaattcacaacaaaattttccaccatattactctcaacttctatagaaatgcaactcacaactcatattggtcagctattcccctataaagattcaacactaccagtggaagattataaaaatgcatacggcttttcaaataataagagaatagttccaattgcaaataaaaaccagtatacattttgaaaaatgaaggtcactaaatattcctaaaataatggaaacaggtgataattaacattctaacagtttagccacatgtaatgtcctctattttgtcaacagagtccagctgttttatctacttaagtctaaaagaaatttatcctcatcattaaaaacaggaacttatttataggtaactaaaattaacagaaatttaattttaaatattttaattttatttttaatattaaatttaatttaaatttaatttaatttaaaatttttaatttaaatatttaaatatttaattttaaatattcagtacttgtaccattattttcattttgaaaatgtatctatcttataatgatttggctttataacttataaagacatgtaacttactttatcctttaaaataatattttactaacaatattagcgtgtagctacatatcatatttaagaaacagcaatctactaagaaatgtgcccaggtcaaaaatagaataagccaattgaaataaaatattatagcaaatgatcagtatacatctaccaaataaaagggttatgaaaggtgaagaccaagtagtaatctccaaaagtaatacaatgattactgattgaagttttatacccgagactaagctactataatgaaatgtttaaaaaatattttagggtattatcaccttaggtcaatctgattattattttgaatgaatgaatgaatgaaatgaatgaatacccaaatgaatgaatactgaagtcatgacaatgtttaacaccttgagatgctcacaacaatttggaatacccagagaagatgacttgaatacaaacaaactatttaaaattcactgtggctcacagtaaagatgcagtgggtttctatttgtagaacaaagaatctcaatcaaaaacctatatatgactaaaatattctcaaatgcaattatcaaggctttagaaagcatatatactttttactatgtaattctttcctgttcccccacctccctgcatttttttttaatgtttggcataagtgaccaacaaaccagaatagaatacacatttttaaaatactaatttacacatattctatttaagaacaacatacaaccactcataaatttagcctttttaaaagtgtcctttatataaaacagtggggagcgggggaaatccctgctatacatatgaagcacagtttaagcccaatacaactgaccaatcaaaattagtgaatacactgcatctctctgcagtggagagaagcgacaaggtaggctgtcattctgcaaaagctgcccgaacaggctttcctctgaaaagcagtgccgttcctttttagaaagactgaatctaaatgttgtctctggagacaagaagccttcagtatgttaaattactttcattatgtattttcagatgcttattgattccacagtaggaagagtgagagactgcagcagcctctaagcagcactacatg

SEQ ID NO: 39057 - DNA, 2300 bp, Homo sapien
ccaggagaatggcgtgaaccccggaggcagagcttgcagtgagccgagactgcgccactgcactccagcctgggcaacagcgcgagactccgtctcaaaaaaaaaaaagaaagaaagaaagaaaggagcagaggctccacttccgttgcaattgaaaaggcaagggaaaaaaggtgcaacagatggttatacgttgaggttaaattcataggtttgatgggcaagaaatggagaaagttcacatctgatggatcctctttttctccccagggaagcttaaagtcatttgttgagcttgaagcgaaaggtttgaaaagggtaaagaagatttaaacaatcactgtggagaatggcagagaaccaaggaggaaaatacagaaggcagaactgaagagtatttaccgtccaagaactgattacaattcctgaaatacatcctactgaaacatatatccaatgttccactgttcacctggggaagtcctgtctacagtttaaaacgtctccacctagaaagccttttctgacatttcctaaccagtttccaacccccagttatcattctcctctgtattaatgctctactttatatgcaatcctactgctatcttacatcactatattacagcacctacctttatagtctacaagattatttcctctactagatggtgaactacttgagggcaaaaattgcacgtgtatcaggagcaactgcaaatatatcagggtctctgccttgtatctaaagtttaaattcagtttagccaagttttagacagagacccggtcctagagtttccaacatgaaatagttcagaaaacatcattgcttttgacaaaagtacataaattatcatgaaaaggcacgtaattcaggatgacaataaaatatttaacagtcagagaaaataaacaataatttggaactttatttcatttattacccacttcggtcttcaaatgtgtgcatgtgcttctaactgcgatgatgaatttaaaaaacattctgcacctactgtatgcaagatactgctattcacactgtgggatattaaaaaaagtttgcaatacagaagagattaaaacaagtatacaaatgattttagtacaaggtagaatgcgatggccactagagaaaaaattaagaacaggtgagaagggctttatttttatgcttataaatgtgaactttattctgaaggataagagattcgggacatggtaactggattgacacaactgaatatgcttttcaagtatattatatctaacttttcttattttgggcaacttctctccaaactgactagcaataaaatctgactgctagattctgtacaaatggttaatcccaacctgaacaaatgtctcaaaccctcccccacgtgtcactgtagataactgcctcataaaggaggaaaaaaaaaaccagcctgtaagaggggtcacctgtacagtccatttgttaaaggagtaagcgtttccagctctactttaaaacaaggccctatttcattatgcgtctgccgtctgttctagagcttacacttttgaagagctcgaacgctacaccccttcgtcaagaactgcggcagcagccggtggctgccaacgcggtccacagggtttgggctcccgaaacttcagggaagctggaggcatggggggggggggggtcgagttgaaatgaggaacacacagaaaccaagtgtccccaagactccagaaaagagggagccagtcccagagtaaataggttggctagaacagtacccaagccagggggccgggcggaggggagtggtcacgtccagactggaaaactttctgcaaagcaacgggttgggtccacctcgctgtccaggtgcggagcagcgcagacccccaaccccacgacctggtcagaccccgtctccttaccgtcctgcagaagttcccggactgtagctgcagccgctccagagcctcgagctccgaggccagctacagcgacgctgccgccgccaccttccatgttggcaggtgccgggttgatgtcgtcagcagcagaacggctccgcccaggtggtgacgcagaatcccggcgccgcccgcccacccagcccatggctccaggcccacctggcgaactgactctcagcccgcgcctgggctaagcctggctaggagccgcgcaggtactcgagcagtgggcgcccagggtccgagtgctctgcgcccagcgcaccgagggagccaaggccgtcgggccggcgctttcagctgtctctcgcagcagctcagggccgcgccccctg

SEQ ID NO: 39058 - DNA, 2300 bp, Homo sapien
atttcacagtgttggctacttttcatattccagtccttggcctcagtaacttagaaacaggtatgtatgaaggaaaaatgaagcagaaaataacaacaacaaaaaaaagaatcagatatgggccaactttagaatggtctaattgctcaaactttagagtctttaacctttaggcaaggagttgaaattaaaaatagccaaggtacttaaggatgtcaggatcttgcaagaaaccgctggaagcaccaatatttaagtaacagaggaaaaggggagagcaaaagagactgaagatgaactttggagctgggaggaataaacctaaagagtgatactcagaaaacgagagagaccattatgaaggaaggaggggataggtatcttaaacatcaaagtaaggcaaaaataaagcgcaatggcaacaaggtcattagtgattttagcaagaattacttcatttttatccactcctgcagtcatagtaaatggcatacagaaggcctcaatatttatttgctgaaagaataaatcagtaggtttcaggggactgggctcacacctgtaaactcagcattttgggaggccaaggtgggaggcttgcttaaggccaggagtttgagaccagcttgggcaatatagtgagacccccatctctaaaaaaattataaaaatcagctgggcgtggtagcaagcgactgtgatcccaactactccagaagcttgggcaggaggatcccttgagcccaggaggttgaggctgcagtgagccacgatcctgccactgcactccagcctgggtaacagagctagaccccaactcaacaaaacaaaacaatcagtagctttctaccttagttgtacactacaatgacccgaggagcttttaagaattagcatgcccaagccataccctagaccaattaaatccaaacgtctgggctcaggatgcaggcatcagtgtttttattaaagctcttcaggtgatttcaatgtgcagctaagcttggaattactggaataagtaaatccaaagattccaaagcacctggtacaattgtttgtttaaatgggttcctaccttacctattaactccttttagaatatggattgagtcttatgtttgtaaactcatgagagcatgcagagtagaggggtcaaaactttcgctgtatgaatgaatattactcactcttctaaaatcttccactggggggaataaagccaaggaaggaaaaacaattcctaattcacaagtaatgaatgaatcacccctattcccatcatgactaagatcttacatactagggaaaatcctctgagacaaagagagcataatgcagtgtagcataagacttgcttacctgaggtgttatgagtatgaaatgcattgagttataaaatacttagaacagcgataagcacaggataagtaatagcacctttttgaaacagaatgtagaaaaccacgtagctctggaactggataaaattggtttcctggatacatacctactgtacaaaatgaaaaagtcatcttccagcttctttttgcgaagaagcttaagactgtcttgcatacttgtggttgcctgaccctgttaatttatcagtatttatcttagaagaaagaaatctaggtcaaaaacgcgaacgtattagtaaagaagatacaatgggaaccaacctgatgctcttacagcgtcaatactgttagttgagatgtggaccatctatcagtttgtaattaagaaaaagtctggcacgtgactgaaactgaggaagaagtagaaaaggcaaaaggtcaaaggtctcatgggaaggaaggagggtagagacagtgagttttattggtccttttatggttcagacttccttcttcatcgactctccctaattctcttcactgttcatccccagcaacttttcttcccaagcatttcctgcgggcttttattaccccaggagtgccaatcaaggcgtggaacagataaagctgtgtagcaactaacgcgtgactcttgtgagtgtggagggcaaacgaagctccctgaaacctccgctctgctctcctgccttacgccgcgcggcccctgttctgaggtttaatacttgcttcacagataagcgctgcggccacgttccggtgcccaccttctccttggctagggcacgacgccagcccagggggcgcggccctgagctgctgcgagagacagctgaaagcgccggcccgacggccttggctccctcggtgcgctgggcgcagagcactcggaccctgggcgcccactgctcgagt

SEQ ID NO: 39059 - DNA, 2300 bp, Homo sapien
actgattgttttgttttgttgagttggggtctagctctgttacccaggctggagtgcagtggcaggatcgtggctcactgcagcctcaacctcctgggctcaagggatcctcctgcccaagcttctggagtagttgggatcacagtcgcttgctaccacgcccagctgatttttataatttttttagagatgggggtctcactatattgcccaagctggtctcaaactcctggccttaagcaagcctcccaccttggcctcccaaaatgctgagtttacaggtgtgagcccagtcccctgaaacctactgatttattctttcagcaaataaatattgaggccttctgtatgccatttactatgactgcaggagtggataaaaatgaagtaattcttgctaaaatcactaatgaccttgttgccattgcgctttatttttgccttactttgatgtttaagatacctatcccctccttccttcataatggtctctctcgttttctgagtatcactctttaggtttattcctcccagctccaaagttcatcttcagtctcttttgctctccccttttcctctgttacttaaatattggtgcttccagcggtttcttgcaagatcctgacatccttaagtaccttggctatttttaatttcaactccttgcctaaaggttaaagactctaaagtttgagcaattagaccattctaaagttggcccatatctgattcttttttttgttgttgttattttctgcttcatttttccttcatacatacctgtttctaagttactgaggccaaggactggaatatgaaaagtagccaacactgtgaaatagtaggattttaagtatagcaaatgtaaaacatttacaaactccataatttcatcactcgtacctgtacctcttggggtataaaagtgatttacaatgcaattgtagaattataattgaaattttcactagataatatcacattaaaatttttaaaaataattaacgtttgtttatcttctgattcacagacagaacaggattcaagaattacaataaaagcaccagcatatcttttgaaacactgactacttaagagttgctctattaatgccatttaactttcctgaataaaacaagatatttccaaatgccagtcgagtatcatatataaaataattcaaaccaaatttcttggcttaccaatcccaacaaagtaacatgtaaaaaatttttaaataacatgaaaacttacaacatggtaaactagggaaaaaaaaaaaatctcgttttctgcatcttgtgtttccacaactatcttgggtagttttccacatctatttatcttacaaatagaggcagcattctatagtatcatattggatactgtgaaaataagctattaataaaaaaatttctgagcccacaagcctgataaaaaatatatgttgttggcagttgaaattgttagaatggaattaatatagtgaaaacatattttctctatacaagcttattgtctttttcagatttgaaacatatctgtattaatgaagagtgactgcatgcaaacgacaatatgtcaggaaagaaaaaaagatcccatagaaatgtttcattctggacagctggtaaaagtctgtgccccaatggttcgatattcaaagtaagtgttgcaaaatgattaatgaactaagatgaaatttcccttttatgctctgactttttaaaagtactgtaagaccacccaccatatgggaacttcaaactcttagctttggaatcatgacttagaattgagtcatgatgctactacttgcctagtatatatgtgatcctgagtaaacaattaacttctctgagctgcactttttatatctataaaaatggtggtggttgtaactcctacctataagtatataatggatattaaatagatataagtattgatgtatagatttttatgtgaacttaagtcttgggacaaataggagtgcaattatgggtcctaaggtagttgtgtgttcagttttcgaagaaatatttcttcgtatcttttgctcatcttctaattggattgtttgctcttttactattgagtttttttagaagtttgttataaaatatacgtaacataaaatttacctctcgatcatttttaagtatacagttcagcagtgttaattacattcacattgttgtgcatctgatctctaaaactcttttcatcttagaagatggaaattctatcacattaaactgtgactccccattccactgttcctcacagcagcccctggc

SEQ ID NO: 39060 - DNA, 2300 bp, Homo sapien
taattgcaatctaccatatcttaagtataggaaatttggtgtccaacctggagatgattatatatttgaaatatttcctagagaatagtaaccaggttttgtttttaactttaaaacctaattacttttgtgcctctcagccgttgattgtaactttaaagtcccatggttttggagtgttattaatagattttgttatcggtgggcatgcactgcaagaattaagtatctcagactgaaataaaaccgttcataattaaagtattattttgttttgccaacatgaaaactgttataaggaaacaattatgtaaaactgtttaattcacgtttgggaatattgaatgaatccattttaacataagcactgtggtgccatcttttttctcagtacattctgttttcacttttcagttaatgcatttttttttttaaagataactcgctgtttcattttctatgaatactgtacaaaatagggaggtatggtcagaactctgaattgaattaccctagtgttgtgagcacagcatcatcactagagtaatgtgctcggtgtttggaaggaaccagcgtggatgggcaagaagttctaacacttttgattaaaagtaacttcctggccgggcgcggtggctcacgcctgtgatcccagcactttgggaggccaagacgggcagatcacgaggtcaggagatcaagaccatcctggataacacggtgaaaccccgtctctactaaaaatacaaaaattagctgggcgtggtggcgggcgcctatagtcccagctactcaggaggctgaggcaggagaatggtgtgaacctgggaggtggagcttgcagtgagctgagattgcgccactgcactcctgcctgggcaacagagcaagactctgtctcaaaaaaaaaaaaaaaaaagtaacttcctggctaggcgcggtggctcacacctgtaatcccaacagtttgggaggccaaggcaggcagatcacttgagtccaggagttcgagaccagcctggccaacatggtgaaaccctgtctctgctaaaaatacaacaattagctaggcatggtggcaggcgcctgtaatcccagccactctggagactggggccagagaatcacttgaacctgggaggcagaggctacagtgagccgagatcgcaccaccacaatccagcctgggcgacattgggagactccatctcaaaaaaaaaaaaaaaatcttccttatggttaatttatgttcaaagtctatttttctattttttctgttacatgtgatccagaatattagtgataaattaagaaaaagcaccaacttaaatgtgtttttgaatgttttatattctataattatcaattttcaacatttatttactattccccaaataattgttaccaggatagtacttttattaaattcctgatacgttgtcaatattgaaaaaactcaacaacttaaatgtacacgcacagtttgaaaagctggaaaatagtgaaagaatatccccatacccacctttcgtaccagtccccaaacatcacggtaaagtttactgtctcttcccagcccatggacgggaacgggaacgcctacggaatatgttgtgacatacagttgatcctaggttctccagaacaaaatgctgcacgaccacctcatcctggccctttattaaatatagcttaattctggacacaaacagttcccaccatgaagagagagtaggtgaccggaaaggagtgcgtcttaagcgcgttcgctgaatttgcaccacccaatccagccccgccgcccggcgccgctccttagacctggaccccggcaccctcccgccggggccgcacttagcagtggaaagtctgtcctcctgaagaagttgcgctccgacctccaagcatcaggtcaaaagtctaactcattctctgacctgccgccaattagaaaacaactgttgccaataaacgtggtcgcgccgcctgtgacctcagccgggacggacccgcgggcgggagcctgcggggcgtgaggcggggtggggccctggctcccctcccccgcccagccgcggcgtctgacgtcccgcgcgtcggcggccgcggagcagcgcagggagccaggcgggctgccggcgggtaagggcttctgcgacccggggacccgtggggcgtaggccgcggagggagagcgccgctgcctggtctggagaaccccgcggagctggcctggcccgacccggcccggcccggtccgcggcgcggtggtcgagggcccgcggcgccttctgggagcg

SEQ ID NO: 39061 - DNA, 2300 bp, Homo sapien
aaccaaactcttatatagagagatgcatttcaaataagaattctattagccaagctaagttactcttttgcctcctgttgttactcaagtcttttctcttctgtccttctgccagccttaccccactccttaatcctctgaaccagcaaaccattgccaagttctgatgcaaagtggtttataggcctgactggaccagactaaaagtgttcaaaatagcaagcaacaaggagcagaaatccatattagaatgggatatggactatatttatattggtacagaatgccttcaataaagagttgtgagttgtgtaggtgagttgccatggagctacaaatatgagttgatattctgaaatcctagacagccatctccaaggttaagaaaaatccttatgcactcacttgcaaagatatccacagcatgctcttaatggagaaaaacaaagccttagatcaaatatgtaaagtaatttttagttttttgaaaaggtatgtttgggctatagataaatctgttcaaaaaacatgagagaagataataatggttgaaaggagacacagtgcttgccctcaagaagtttttgtctagtgagggagagagaacttgtatgtaaataaaattgtgttactaaggtagatagtgagaagtaacttaagagaggatcagataaggtattaagagaatacagaaaagggtctggattaattctgaacagcatcaaagaatgttcttgcaagagatagtgttttcaccagatcttgaaggtatggatgagggtatacagagtgagtatattcagattctactttaaaacaaatactttcctctgttgtagtggagttgagctatacatccaacaataatgaaaaaatacacgcatatatacatatatggagagagatacatattttagtacatgtagcaattgattaataaatgtacagtttaagtcgcatgcaaaaccttggagtgatagcaaacttcattgtaggatgtttagcagcatctctggtctctactcactagatcccaatagcatctccctaggtgtgacaaccaaaaatgtctccaggcattgacctctggaggcaaaaaaagccctttattaagaaccagtggtatacataagtaaaacatacacaagagattcctcccctcttctctgtatgtgaataaaaattgcaaagttcatgacctggattttccttttaggtttcttctttagtggttcttaacttcattgggtgaagtaagcctttgaagatctgttgaaagctgttgactcattcacttctcaggaaaacgcacatgctgactaccatttcagagaatttgcatcagggttctctggggaggagttctgagttctgtttccaggagctcgtagaattgtcatggtctgcatatgcaaggcaggtggattacggaaggttgatgtacagaggtctgtattttggagcctcttctgtatttacttcagaacactaacaatcaggcgagaatgttctggtttatcaaacccttccttctgcctttcatcttaaccatgcattagttttaacaaagttcatcccaacagaagacaaaacactgatgaggtaggatagctccagctcctcctccctctcttctagtcttgatttccatgtagtccagtttattccttccctgattgtccaggagaatgagaaaaagaaaaaacagagtctagtgggtaagaaagggccacctggacggcttgatttggattgtgaaataaaacacacacacatgcacacgtagaataagtggctaaaatctgagtaaatcgtgaactctctgtatcctccacccattgaatactcctaaaagactttctagaaattcaaggacttattaatatagaaacctggccattgttcctcttctcctccccatgtggtatgagagcacctgtggcaggctcccagagaccacggacctcttcctctaggcgggctctgctcttctttaaggagtcccacagggcctggcccgcccctgacctcgcaacccttgagattagtaacgggatgagtgaggatccgggtggcccctgcgtggcagccagtaagagtctcagccttcccggttcgggaaaggggaagaatgcaggaggggtaggatttctttcctgataggatcggttgggaaagaccgcagcctgtgtgtgtctttcccttcgaccaaggtgtctgttgctccgtaaataaaacgtcccactgccttctgagagcgctataaaggcagcggaagggtagtccgcggggcattccgg

SEQ ID NO: 39062 - DNA, 2300 bp, Homo sapien
gccgggcgtagtggcgggcgcctgtagtcccagctactggggaggctgaggcgggagaatggcgtgaacccgggagacggagcttgcagtgagccaggattgcgccactgcactccagcctaggtgacagagcgagcccccgtctcaaataaaataaaatttaaaaaaattgagaagccactgcctagtatatgcctctaaattggacctctgcacctagtggggcagcagtttcccaggaagagaactctaaggaaggggagaagagaggtgactctctccactaaggggctctacaggaaagatacaggccttgaagggtaagcaaccatctgtcacagacctatggtagctggggagaagtgttaaactcctgctggagaccagaactctcaatctgccaacatcttaccttgcagcgtggccactagcccagtactaactcccgaaatgacgtcactaagcagccattccttgactcggtatttggggagccactccaagatgggcacaagagtctttagcacaccaaaggctctctttcttgaacaactgtcaaaaagcaagaaaactgggttttcaatccaatctcagtcacaaccaatttgcaaatcacaaagttatgaactggattctgctgatgtttataactatttggaaaaaggataagtatttcctggaaaataataaccctgaagtgcttaccatgcttttgccaagaactgtatctatccttttaaatgcactcttctagagaacacaggattaagtgtcccacccctcgctcacatttttaatcctctgaaaaaatattcctacacaaaaacctattttctggtccagccagagactgatggatgtggagtctctaaatggagattacttttcagactcctaatccaggcgccttattattattattttctttaaagaagataaacacactgagtatattttggcaatacaagcctggagctagtttttacaaaaatcttagcatgaggaatgtataccttataccttgctacttggtagtttttaaattcagtgacctacagatgaaagaaaaatatcaaaagtaggtggtataactcctgatttgaataaattgttttttaattaaggcatttatgggacgattggacattttaataatgactcaatttttgatattaggaggttatttttagatattaaggtgtgatcatgaaatgtggttatattttttaagagtctttaaagatatgcagtaaaatacataaagacagtatgctatatgagatttgcttaaaaataatactggagggagcaagtaggtgtagatacaagaaacaagagtaacttggatttgatcacagttgaggccgagtgatgggttaaaaacggtgggggtggggagttcattatactactacgtctacttatgcatatatttgaaatgttctataatgaaaggttttagaaactctaatttctttatgtttgtgacatctagttacggcatgtttgggtttagagactgagggtggctttccccaggggtcccacagcctgctgatgaagtacttggcacaccccgcgctcccctgggttctagcttgcatcctggtctctaactgaatggtagcccgcctacttagcttgagtgtttcaaggactcctcctggtcaagagctgggtttccctattcatttcatttaaacaagctcccaagaaggcaacagggacccactgtaccccaagaggcactccaagtttccttcagagaggaaaaagagagacggggctcctagaacccactctccccaaaggcgagtttcccaggtaagttcatttcgggcccgagactgatggagccaccctcccaccagaagggcggcgtggaggaccggagaccgaaagtcgggcctctgggagaagcagctggcgcccaggggctccgccgcccgcaccccactctcgcccgctggggacgcccttccctccccaaggcgtggacgccccgctccgcttctctctacgcaggcccgcgcggccgctacctgcagcacttggccaggctctcccgcagcgtcttgcgctcctgcaggcgccgctcgtgctgttgctggaaagcgagctcgctgtagaccggccgcgacaccatgtagctgcagctgtactcggggagctgcggcggctccgacctgccgcctggcgctgccatgacctgcgagccagaggacagcgaggagggaggacacgcggtaagcgaggacgatcggaggggaagagcgaggaacagaaagaacgggatcacc

SEQ ID NO: 39063 - DNA, 2300 bp, Homo sapien
ataaaatacaatttgaaagctctttttaattctaattatttaaatattagcatcagcagacattaataatactattctgaacctggatttccatgaatctgaaggttaaccgttagctgataggctaagtatgatagaacaaaaaaatcaaagccagtggtggtgatgagcatctgtagtcccaactactccggaggctgaggcataaggaccccttgagcccgggagtccaaggatgcagtgagctatgattctgccattgtgttccagtttgggctgccccatctctaaaaaaaatttttttaatatgaaaaagaagtactttctaagtgaaaacttaaaaaaaaaaaaaaaacccaaattggtgaaaaatgcctgactatatcaacactgtatttagaaaaatagggaggtatgggaaaaaggttaggcaagccccaatgcccaaaacaataatcccagaaactgaaagcatcttgaaaaccacctagcaatacagaactttacatttaaaaaaagcaggggtaattttgattcacaaatgtccttagttgtgaatgtacctaaaaacttgtttataaagctgcatatatagagcagaaaaatcttttacaagatctcaggaaaataatcaccaaataacatggtgcacttaaatcgcactgatcatcacagcatgattcacaaataataccgtacaactacaaagatataacacatcgctacacatactttatttgcaattcagtaccatgaaaacatttctctaagaggtcaatgtaataatcttttattgatataggaactctggcactgaaagcttgaataacccaaggtaatgatgtcgtcaccaagggaggacaagaatagaacccaaatcccttgactcccaagcttgtgttttccattaattgtgctcctttctattcatccaagagcatcaagtgtaaaaggctggagaaaggagtggacacaaatgagccaagtccgcaaggtggagactgcactgaaggtcctaggaatcgccccttggcactttccttttgtgttggctgaggaagatgaaagcagcaacaaccacaaactcctgggaccaagaactggaactaggtactgcttgttgtggtaactctcttcctcattttaggcctttcctttttaacctctccttccggccaagccttcgcgctctcttcccctccctcggtttctatccgctcccgttagctccactccgcacattcctgcaaggtgtccccgttaagaggaggcagctgcgccgcactggctctccaccctccatccggccctggcgcccagtcgtcaggtgttcgagaggttcgtagcgtcacaagcgctctccctagaaagtgagtggcagtcaagcattataaacgtgtttcaactgtaaagagacttaagagatgggaaccggggcatataccaagttagctctgcgtgggtctaggtagctcgtcacgacaaagcaaaatttagacaagcgttgagactttccttctagctccgagtttcacagctccgccatcccctgagcaacctcccactggagggcgccttccggagcgcgcgtgtttacacttttgctacaccaggcggaggaaacaagcgctcgctgaccccgggggattccaaaccgttactccgcccgccggggtggggccagcgcaacggccgagcctgcgcagccagccggctccgggggccccgcgcactacaagtcccagaaggcagctctccgcggggcgggcagtcgccttatctgcttctggctcatttttaccactgctctccccttccccggtccccctggtgtcctttccacagttaaaggctactttctcttgaagcacatgaggagaagccttagcaacctcaataccgaagttcttcgcgcgctcgctctttctgcctccgcccgaactatgcctgagtccctcacaggagttggatagtagaggcgagagaaggaagtctttgcaggccaaaattgggacaacctgcttggacttccgcctcccggcctccggaaggcagtgcgcacgcgctcgctgcgactccggcgcggttgacttccgctcccactgtgctctgcgagccgaatcatggatcacactggtaaggaggcggaggcagtgggggtcccggttccaagcccccttggccggcctggggctggtcgcacagcaggcaaaagggattatgctcgccccacaacactagggtgtggcagtgagaagaaatctcacagatgccttcctgtgcccggcaggggcctgcgg

SEQ ID NO: 39064 - DNA, 2300 bp, Homo sapien
ccagaaaaattactccaaggggctccccattaacactggatttattctttggtcattctaagaattagcacttctgtaactgtatcccagattttgtaaaagatcccagattttgtaaaatatttattggttctttttattcaagataaaaaatccccaatcttttttaaactatatgatatggaagtgttgtgcctttttaaagtgaatttatctgaagtggccagtagtccttagtcactttctatgtaatatctaagaaatttttgttgttaaggactttataatttgttactgtattcaaaaggaaatagtgctttatgctctgattcttaatttaaaaacaacaaaaagcaaaaaagtcccaaagaaacccagaatgttatcattattaaatgctgtacctcatgaacttgaatctgtgaagcagagtgggaagggccagccagctcttgaaagtggtagactatgcaagcaacagtagagacctcaagtgttcaggatggtgtgaaaaggacttgtaatgaagtgttggtattttcattattcacaaaggtaaaacgattaaaccattttgatatttgaatatttaatatttgagggacagcattgaactgattatatgtctacaacgacttgctttttagttcattggaatgtcaggaatactttttgagcaaggaaaaaagtcattcatatttcttttggccaatgcattgcttgtaagtacttttacatacataagcaactacaatgaaaacagatcaaatacattaatcagcttgtgagtctatttaatgaagtgttgaaagctgatcaagttgggttaaccctaactcaagattctagctaaccatgtaattccacccctctttgttttaggattagctgttataagagtagtaagtagattaaaataatcgttatggacccatttttaattttgtttggtattttgttcagaaaaagtgcaaatgaatgtgaacttattgtgtgtctgtaatcctagtagccttggaggccattggtactagcttactacttccaaatttggctttgctgaatttaatgtggatggtttggctatcagtcttgactgtaatatttcctgcaggggcagttatacaaccttgttcaataacttgtcatgtttaaaacactacaaattaaaaaatacgttatttgtatttcctattttaagcattttccttctttagtaggtcaagttaaatattttctgtattatatattttcatctacttgaaaaaaggtaactcttaagctttagatggagtcagttctatgaaataatactcctgttactcatgggacaagaattaatttattctatagacaataacaagcaaagactccagggactagaaagtgacacttgtttagacctagttgtagtataggaactttgcatcctcttaaattataattttccattacagtgctgactaagaactcagtcacatgttatagcacaaatacattattgcatgtttttactactaaatggtataatgatttttactatatttctgaatgatttttagaataattattttgcgcttaaggaataatcacatttcttaacttcattttcaaacgcattgtttaattttgccttcatcagtattagtaagttcagtttactaaatttattttctgctttgcatgcttgatgatcagacatggagacagggatggttttcgttctttttctccttcttactctttttcttttaaaaaattctcttgtagttcaagacaatggttcttgggttcattaatggtttcatgtttctgtaaacttctctggaattatatgaaaaattttattcacttttctagggagaggtcctataacttttatcaatttcttaaaggattctgtatctcaaaaggggttaaaaagcattgccttaagtgttgatccaaaataaataaaattagcagttaaacttaatgtaatattgaaaatcagaacccagatctttaaccttgataatgttaggtatggtgttttaatacctgtggcagaataatctttaaaaagaaaaactaaaagaaattacaacttttttttcctaacacagacaatgagttacaaggcactaatagttctggatccttgggtggtcttgatgttcgcagacgaattcctataaagctcatctccaaacaagcaaacaaagcgaaacctgcaccgcgaactcaaagaactataaacaggatgcctgcaaaggctccacctggtgatgaaggtaatttgtttaactaataggtccaac

SEQ ID NO: 39065 - DNA, 2300 bp, Homo sapien
caaagttacagcccatactaaacactaattaaagttagctaatgttgataaaagcatgataagtggcaccacagctcattcagttacgcagttagcacaggtgtgagccagatttaaaaacacaggttagattaatttctaacaaacgctaatgacctgtccacattcttttggaattgtcttatagcaaacataattcattgattgaactgtcattgaaccactatttattgagtcattgttctgtggtagattcattctaggtactgggcatacagcagtgaattcgccaaagtccctgcctgtgtggggctttcattctaatgagaaagccaaacattagccaagtaaataattgtgtatttttaaattatgatgctatgttttaaaaagtacatgcaaattaaccaagggacttaaaaaaatactctgagagaatgccacaagaggggctaattgagattaggaagtcaaagtggttctccttgagaaagtgatgttgaagctaagtaacagccaaaccgagagagagagagaagtgcatttaagcagagaaaatgatgtctgcaaagagtgggcaaatttgggactacaggaggccaccatggtgggagtggagaaaacaaaagtaagagcagagtcagatgaggttggagagttgtgcagggggagatcatgcaaagactttggaggcctgttttccctctgtgtaatcatcagccccacaaagaggactagtgtgaaaagatcattctgattaatgagtggtaaagagatggggagggctgcgagaggaagcaagaagtgcagcaaaggtaagagtgaagatgaagaaaagtgatggctttgggatgtattttggaggcatgctcaatagggtttaaggatggattggctgcgggtggggagaaggtctgcaagaagaagtgtcagagatggttcccaggtctctgacatgagtaaaggggaatattctttactgaaatggggaagactagagatggagcagatttgggaggaaagatcaagaggtcttaatctcgatatgtgtcgtgtttgagatgcctatgaggcatccaagcaaagatgtggaataggcagttaaatatgtggacctagagagctggggttagaaatctgaatgttgctgggagccataggactcttatttagggtaagagggtagcaagagaggagaaggaaattcagaacagaatcttaggaaatgccaaagaaagagttagaggagaaattggcaaaaaggatgaggtgaaaaacaagtgtgttaaaaatttttttttagcatttcaagaagagaagattttagcccggcatgatggctgaggcctctaatcccagctactcaggaggttaaagcaggaggatcacttcaggccaggagtttgagaccagcccgggcaacacagcaataccccatctctaaaattaactaattagttaaataatttttaaaataaaaagaggagttcatgaaagtgtagtcagcaatgccaaatgcttttaagtaagatgagagttgaaagtattcattgtgtttagcaacatagggtttattgctcttaggaagagctgtggtgggggcagaaattggaatgcagatatggcctgtggctgggagttgggtgagtgttcctaatgagggcctttatcataccaggagttaacctatacaccacacttctgcagcccatgacagattccatggagtcatccagccaaaaaacaccaccactaaactctcatctaaacaggttggtgaaatgtcaaggagataacccttgagaagattctttttttttttaagtacacgtgagcatctgctgtgcaatctctgcaaaccaatgaaattacgtacacacaagtgcattaaaccacccactggtggtttaatctcacaaggaacttgaggaagcaatcttcatcatcacttctgctgatcaaagtctcaaaggtcaagaccacattgcagtcttttcattgttgtaaaagttaatgagagttaattattaaagctgacagaaaggtaatttgtccactgtcttacatagcctatatatagacatccctatgcatatggatgcacacagagcctgtagacctgagtggatggacactgcctcttagaactagaacttagaactttatcttgaaaatgtaccactgttgcagaagctcctcacagagtatgtgtcaggtaggaaccaaatttatgattgttatattcaaactggttttctgttccttgaaaatggtattttttctgatcaaagcctatttag

SEQ ID NO: 39066 - DNA, 2300 bp, Homo sapien
gccagcagtggcaacccgcttgggtcccgttccacagcgtggaagctttgttctttcactctttgcaataaatcttgctgctgctcactctttgggtccacactgcctttatgagctgtaacacagcgaaggtttgcagcttcactcctgaagccagtgagaccacaaacccaccaggaggaatgaacaactccagacgcgctgccttaagagctgtaacgctcaccgcaaaggtctgcagcttcactcctgatctagcgagaccacgaacccaccagaaggaagaaagtccgaacacatccaaacgtcagaaggaacaaactccggacacgccgcctttaagaactgtaacactcactgcgagggtccgcagcttcattcttgaagtcagtgagaccaagaacccaccaattctggacacaatatgaatatggaaagttgctcatgagatagttttaagtgaaaaaaatcaagttagcaaaataagtgtggtccaatttctggttatattccttagctggaatataaacactgctagtgtgggctgtccattgttgacatcgctccctccacctcccgtgtgttcgcattaatttatatgcgttgtggcttttgttctagctgagaggagaagaggtatagttggtacaagagatgaggaggaatgtggagaaatatggtgagtgcagtaaggaatctatttcctgcctcacttctcatactgggttgagcccctaggctttgtgaatgacagctggaaaggatggaagtgtttcattttttaaaaataaaaatatgatattgtaattttggacaaaggagtagggaacaaagcccaagaaagttcaggaaagaattgtgagattttgtgcatatggagcagtaactcctagaccagatgtcaaagactgccatgaagctggagaggagacaattctccccatctgtgtggtggaggctgctcaatgtcccccaatttcgcttcatctcatcttgcttattaatacaatttcagttaggcactcagctgacaggactatgtttcacagatccccttgcagctaggtgtggctttgtaatcagatggaatgaggggatatgattgtagaaactggagcagccatcttgaatgaaagatgcaaggcaagctctgatgatggcagagtcacgagataaaaggagcctgggaccctgtcacaggacagagctgccagcaataccgtctctataacaaacactaaatttaattattcatatctaaatctgaacataggcagtaatttctaaccagtgtttagcccagcacaaggcctgggtggtagacttccaataaatgtagaattaagtttattcacactatatagacttattgcaaggcaagaatgagaccttagactttcgtgctcaatcttgaagacaatgtttttcaacccttttcaacagattctctctcaaaacctaaaatctcatccaccatcccactctctttttaccagggagatgtgtttctcaactaaagaaatagaagaaagtgtgttctctacgtattgtcagttagctaattagagcagaatgctggtgatgccaaaatctgtagccccatcccttatatggcatttgagaggagcgagtataaagcagtagataataccaaaggttttggcctcagggccgcagttatctctcctttgtgagaccttgggggcactgtttaacctctctgggtctcatccaagaaatggaaatactaataatactccatatggttgttgcaaggatgaaatgagatgtctgtaggaagtgccgaggaatgcctagcacaaccaagagcttgttgaacttgtcacgctttactgtcgataatgtgcattaagcaaacgctagttttatttgtttatttcatcttctaagtataagaatacattgtagctcgacattttggcaccagcccctaaagcattcccaccaccacccccgctgcgacaaagccctgcgctccttacgacagcgtacgacgccgagcctgacaggaacgcctcgtgcggtagaaccgcgcgggccaatcgcgctgctcccgggtgatgacgtaggctgcgcctgtgcatgcgcagggaggggagaccttggcggagcggcggaggcgcccagcggaggtgaaagtattggcggaaaggaaaatacagcggaaaaatgcagagctggagtcgtgtgtactgctccttggccaaggtgagggccgagtaggtgaggtcgtgttgagccagaggcacggaaggtcccgctcagtgggtccggtacgc

SEQ ID NO: 39067 - DNA, 2300 bp, Homo sapien
taaatgtaccattttctttctttcttttttttttttttttttgagtctcgctctgttgtccaggctggagtgcagtggtgccatctcggctcactgcaatctccgcctcccgggttcaagcgattctcctgcctcagcctcctgagtagctgggattacaggcatgcgccaccatgcccagctaatttttgtatttttaatagagacggggtttcgccatgttggccaggctgatcttgaactcctgacctcaggtgattcgcccgcctcagcctcccaaagtgctgggattacaggcgtgagccaccacacccagtcaaaacgtaccattttcttgaatccagtttctcaaacgtagtgatcttttgtgaggcactcaaccttgctgacgactgaggtggtgatgaggatgtatgagatcctctccttccctcacaacctggctgtgcagtgacagactgaagccccgaactgtaacgaaagactgaaggtgacggtgtaacagcagagagatgcatgatcctagaagatgggcatgcaccagccagcccgagccagggctaccaaaacgttttcctagagaatcagagctaggccttaaagtgtgaatggaattgtggaaagttggcacaaaagtaagaaatagtgtgagtggaagagagaagagagggttttgtttttattgagaatcattccacatagcttgatgagagatatggttggagatgctgttggcaaaaatactaggattagtaaaggaatttggactataatattcacaggaagctattgaagcatttcaagcaggggattgtcattatctgagctgctttaaagtggactgaaagggacattgggaagaggcagaaaacagttgagaggtgtttcagcatccagggcagaagggatttgggctggaaccaggggagtagcagaggtagtagtaaagagaaaagtgaagagcaactgtttgttttccatttcaacttggcaattgattgattcagagaggtctttttataaacaggcagtggtgggctaactatcttttcattgtttgtttcttattctagctacccgaccactgggaaaaagctgtcatcacagtgcagcgacctggaaggattccaaccagcagccgatgtggtaataccatccccgatgatgacaaccaggtggtgtcattatcaccaggctcaaggtcagtgtgacggtggtttggcagctcaacgggcttcatatgcaaattagtatttttctaatattttgcgagttttcaagtcaccatttcagagccagacgttgactgctgacttttttcctttggaattatcgatgcagagctttgtttttaatttttattttttggatgcatgaaggttgactttcgttgttgtctttcttttttgtttgggggcagatatgtcgtccttcctcggccggtgtgctttgagaagggaacaaactacacggtgaggttggagctgcctcagtacacctcctctgatagcgacgtggagagcccctacacgctgatcgattctgtaagtgcgagattgcttctggcatatgcaggaaagcctgggcggaaagtgcccagctgctctcagggtgttttgttgaggggtaatgctgaggccagcgtaagcagaatcattctttcttgcctccacggttactttgcttatactccaccccatggaaaggatttattccttctaaaaatataaaatgtcttttaaaaaaaacagcatttcactaggcgtagtgactcacacctgtaatcccaacactttgggatgctgaggcaggaggatcatttgaggccaggagttcaagaccagcctgggcgacaaagcaagaccccatctctaaaataaaaataaatagcatttaaaagccatcaagctgtgtaaaacatatctaaaatttcctgccaagagtatttaggaatagggaggtttatactttatttaatgagtctaatgatttctgttcaagggtcaaagaagcatttgggttttctacacgtttgcttgcttaaacccatgccatggggcaccactgtaaggatgtttggccgttctcatttcttcacagcttgttctcatgccatactgtaaatcactggacatcttcaccgtgggaggttcaggagatggggtggtcaccaacagtgcctgggaaacctttcagagataccgatgtctagagaacagcagaagcgttgtgaaaacaccgatgacagatgtttgcagaaacatcatctttagcatttctgccctgttacaccagacagg

SEQ ID NO: 39068 - DNA, 2300 bp, Homo sapien
ccattgtgatcttatttgatctctgtggcttatgcttcaagatctccctcttgaaactcttttctccttagctcaatctttgattccatgagcaaatctccagagctcaagctttgattccatacaatgtagagtttgtgttgtttttacttaaaacaggaggaggctgagcaagtatatgagagcactgaacttagtagatgagaggagggcacacttctaggagagaagcacaaaagatacaggtgggaagggaggtaggcaaattcatagatgaagtggtcagaaggtgagtgttacacacactcctccccctgcacatatacaggcaaatttttaaaaacctaattttctcagtagtgttcaatttactactgcaagtgaggtgatcaggagagcaggtaggcttctgaacagtgctgaaagtaaatgaccttttgcaaggggagaggacgctgagcagggacaggtagcaaggagggctcagctgctgtgagagcagaggttaggctcaagaaagaaaaggagctgaaagatgcttgcagtgtgtgcacatgaaaatacgaaactctggcccagggtattaaaagctcaacaggaagaaaagacatttgccttttaatatttttcttttaattaagccctgaagaccctccattgcaattctacagcctcccaacagcaaggactttctcagcgctttcaggctacccagccggcgcagaggatcctaagcctcagcagaggcaaaacctccccaggctgtagcagggcaagtgctgatttggtgaataattaatgcctcactcacctagaccccaaggctcccgcctgcctcagactcgtgcaggcttacgaactcgtaaagcagctgactctatggtctaatgattaaacttctctgggccttatttcgttacagctaagttaaaaactgaccagctagccgcttaaactcttctcccggaaatgactggaaaacaagccaagtctcctgactggactgacaactaactatactccctgaattccagccacatttgcccagagcaggactccaagctttgactctgtccattgctaagggtagcagaatgggtggtggggtcccgtcaccaacctcttttccctctccaacccctagaaggtggtgagtttctatgtacccctaatttcaccaggcaggttacactgtgttgttagagacccttcattagaggccctctccccacctcagcatttgcacaccatggagaatcgtcgagatgagcgttgtggggaagtgcctctcatgagagatttccacttcctggctgtgtcaactcttccacggcgagatgggaaacggagtcagtaacaataatagtgtcatttgaggaattacctgagctaaagccatcatctggatataggtaggaagatttttttttttttttgagacgtagttttgctcttgttgcccaggctggagtgcaatggcacgatcccggttcacggcaacctccttctcccaggttcaagcgattttcgtgcctcggcctcccgagtagctgggattacaggcgcccgccaccacgcccagctaatttttgtatttttagtagagatggagttgcaccatgttggaagtagattttttaaaaacagaactggacgttcaattcaatgccgtgaccacctgggtaacagggattacagataggtcctgaataaatgtgtgcgcaaagaattgcagggcgcacagagcttctcctccttcctaggaagacactgtagatgtcgcgcccatcccaagctcttggatactaggggcggagaggaagtgtcactttctaaagaacaaacacgacaggtcgaccctgtttctaaagggttaacccgccttccccgagcgcaccgcacgagagttttagccgtgggcacgtttggtgattcacttcttgcgaacgtaaatgcgcgagtccgcggtaggtcccgccggccccctggctgggcaacctgaaaacccacctcggagacgcccccacgcatccgcccccctcgctggacggccccgccgcgcgccgttctgggacgcgcaccccggggcggacccgccctgggacctggaagcgccccagccccgcagcgatcgcagattcggctttcaaacaaaagaggcgccccggggggtgggaccgggacctcacccggtcctcgcagagttgcggccgcccgccccttcagccccggctctccgtatgcgcatgagcagaggcgcctccctctgttcctcccaaggctaaactttctaattccct

SEQ ID NO: 39069 - DNA, 2300 bp, Homo sapien
tgagacaggggaatcacttgaacccaggaggcagaggttgcagtgagccgagatcgcaccactgcactccagcctgagcgatacagcgagacaccatctcaaaaaaaaaaaaaaaagaaagaaagtactgtttctttaaagagccaactccctgattctatttaaaatgtcattttacttccctcacaaaaaaattcttgtcacattgcttcaaaaatattacagaaagtaaaatatttcatttatattaagaaaaatagctaaagcaaaatgactacaagcagaatatatattcatgtcatgtcactcaaatgctgaaaatcatttttggctcccactgttctctgaacagtgtaagttccttagcctctgacacagggacttgtgccatctgctcccagcccttctaagcacactactctcctgccaagagtgatccatgcactgtttcttgtaccaccctgagctttagctcctgtaattctctcagtttagaatatctcttacccctccccacaccccacagtctccacaagtttaacctgctgtcctcccaggtctagtttcaatgcatctgaagtccttcctggagtattttctccttcctctgaaccccatagcatttgccttatattgatcacttctgttcctgtgtgatcaatatttgtatataatgacttataggtcctcacctgacggcaagccccctgaggataagatccttgtctagttcatctctagcttccctatgggaattgtaggtgttcactaagtagctggagagtgacaaatggctttgctgtaacacaggagtatccaatcttttggcttccctgggccacactggaagaagaattgtcttgagccacacataaaatacactaacactaacgatggctgatgagctaaaaataaaaataaaatcacacacaaaaaatctcacaatgttttaagaaaggttacaaatttgtgttgggccacattcaaagccgtcctgggccacatgtggcccctgggctgtgggtcgaacaagcttgctctaacagttcatcttacactttagttctcaataggggccaaatttacttttctggaaagtagagcatggatgtatttgaaagtttctttggggggcacagtggctcatgcctgtatccccgcactttgggagggcaaggtgggtggatcaggaggtcaggagatcgagaccatcctggccaacatggtgaaaccccatctctactaaaaatacaaaaaaaattagctgggcatggtggtgcatacctgtaatcccagctactcaggaggctgaggcaggagaatcgcttgaaccaggaagtcagaggttgcagtaagccgagattgtgccaccactgcactccagcctggtgacagagtgagactctgtctcaaaaaaaaaaaagtttctttataacatgctactaacatgttcctttactctgtattgtctcactccaatcccagaataggcctctgagttgtagcatcaggtatagttacccaattacatagatgagcaaaaattgtgagactttttaatgtcatggaggaccagaatccagttttgttgacttcaaacgcagagcttctccagtgtctcattcattgtgcttaaatcttcatgacaggtatctaaacatgttaattgcttttgagtatgtacttataataaatcattctcaggacattttgtagaatacacacaatgttccaagtctttagtattttgtttttccaacaagcacttgttcagcaagtattcagcactcagtgagcactgtttcttccagagagaagggacagctgaggatgaagaagaatctataggaagctacaatctaatccctgtattctaggggcacataatcaagtgcaagtgcatttggctgagacatcattgtggttatacttttaagatacagtgtttgttaaggagacatgattacctaaaaccctgcttcttatttaagaggaaaacgtgcctccagaagacatcgagaaggttgcgaatggtgtgcttgacattcacctaccaattccatcccaaaatctaaccgatgaacttgtcaaaatacagaaacatatgcaactctgtgaggattacaggacagatgaaaacaggttaaatgaagaagcagatggagcccaaaagcttttggtgaaggccaaagcagctgagtaagtactgtattaatattcttatcttgctctaacagaccatctgctgaaaggacatcaggaaaatgtttgcctagggatctatagcattcaaatgaaat

SEQ ID NO: 39070 - DNA, 2300 bp, Homo sapien
ttaaagcatagcaaaccgtcattggctaacatgtgatcttttcctggaaacattttggtgaaaggaaattgtcttgacaggtgtattgatggttactatggaaatccttcttcaggacagccctgtcgtccttgcctgtgtccagatgatccctcaagcaatcagtattttgcccattcctgttatcagaatctgtggagctcagatgtaatctgcaattgtcttcaaggttatacgggtatgcagtatagtgcttgatgcaattttttctctttatcccacactgtaatctgtaaaatgatcatatattcatgacttatctgtcttggacaaatgtgtggtgcagaaatggtaagaagacacaatgtgataaatagctgctttattgaacaaagaatttgaatgattcacaaaccaatgacaattaaaactcatcagccactgagctatgattgtttgcaaataatgttctagaaaactaattgaccaaatgagaccaaatcaagttaatttatttaaaataaaattatcacgttaagtaagatataaatgtgataaagtagcatatatattatatataacaagcaactaaaaaataaatggaattagtcaaatgctttctttacataatttcaaatattcaatttgatatttcacagacattactaatttttttcaggtagcttgaagcaatatttgggcattctacagccatcacataagtcttaattcaaaacatgtatctcttgctcaattgaaaattttattttaaagactttaagagggctaggcacagtggctcacacctgtaatcccagtactttggaaggccgggaagtgggtgagggaggattacttgaggccaggaatccaagaccagcctgggccgcaaagcaagaccctgtctccacagagaaattttaaaaattagctaggcatgatggattgcacctgtagccctaggtactggggaggctgaggcaagaggatcgcttgagcccaggagttcatggctacagtgagctctgattatgccactacactccagcctggggcctatgcaacagagcaagaccctgtctctaaattaaaaaaaaaaaaaaaaaggtatttacacatgaaacatgagtgtgaatgtttactgaaaataagaagataacttatgaagtctatttgatttaatgatatgtagaacttatggcaatactaatgataattaccatcacgataaattacatgcctgattttcccctcatttgttacatctaaggttaacagttaattctcacctcttcccttgcagcctctttcccaatgcatggtttggtatgtttggtcagtttttaagaactgagaccatgtttgggctaagtgaacatttccaagtgggatgaaccaaaatgtggagagtggagccacagtttgggcacctaaaaagccgcagtcatctcatggttgcaagggtaaagagtgttagagagaaaggtggttccttcagactgcttaacagaaacaccctcaagggctcatatgtcatgaaaactgctcttgctcatcttcacttctagaagtgacagctattgctgtttgggactttctcttcaggcctgctttattttcaccttagttcacctctaggatcaactgagagtgggttgccccaggagaccaggggctgagattagtcttgggtcctggggcacgctagtgtgatgctgattatataaggatctagaaatcctgtgcccacagctccatggtatttgaagaaagcctggaatccattctccaccaaacactttagagagccgaataatcattttattctttaaatgaataataatgaaaatgaaggttttgtttcacttagaacacttttcgttattcaccccgaatgtgtgatttctcattattcctagaggagcccaataattttctatttacaacatccatctcctcctctctcccaacactgatacctcaccccattccttttcctcccactttctttcaggtactcagtgtggagaatgctctactggtttctatggaaatccaagaatttcaggagcaccttgccaaccatgtgcctgcaacaacaacatagatgtaaccgatccagagtcctgcagccgggtaacaggggagtgccttcgatgtttgcacaacactcagggcgcaaactgccagctctgcaaaccaggtcactatggatcagccctcaatcagacctgcagaagtaagtctgcaaaactcccagggggaaatgtgtcagctgagtgacagctcataagtgtgtt

SEQ ID NO: 39071 - DNA, 2300 bp, Homo sapien
gttcaaccgaaggcattaacatgtatacttgcaacaaatgaattctgataggtcaattttacctaatggaatctgttggtttttaaggttctgtgactgaagaaatagagactaaagaaaaattacaggcgtatatagactaaagaaaagaaccagagaatgaggaggagggatctggaaagatagttaccaaaaaatttgaggctttcaaggatttttactttctttttcctttgaatttttatattgtccgattttgggtaaaagagcatatactactctccaggaaaagcaataaagctattttccttttaataaaaaagatatcaacactttaaggagagctatactgaaagactgcttctgattaactgatagactgatcttttagttgcatgggaaaattatttttcttgaaaatatatcctgcctgacagcttctaactctacacctaatcttaagaggtaaatagttaactcattgagatgaaagcagataccccaagacatgccatcagtttacaggaaaacagcctacgataacctattcatgattatttaaagggaaatttttgaaatttgaaccatgtaactttgattctcgtcataaaactggagacacatataacaggaaaacccctcaagatataatcaaatcactcaagaatgcaacaagcttttaaaatttacatatctcaaaaggcaaaaaagacaatatgaaattccaatgtttgaaataagtttaaaaattatataaattttaatgcctagagtttatgctttgcacaataatttaagagtctaaagggaaaatagtattggtctaataaaacagatcacaaacccgtcaattgaacaaactgaaagtcccttgatttcactcacacactttgctgaagtatccacctaaaaaccaaatactgctctttggtctcctaccacctggtactttgtggcagctgttggcttgtaaaaaataaataaaacaagttagtttagcaaatattgactgcaagcttcttctatacttcatcctaaaatggaaaagacatgttcctgccctcttggagtttgctttctagtacatcagaagtgagcagatgaacctgacctatagggaacaaaattaaaaacagtggcatcgatggaaaaatagagcaataaattaaaacacaaataacaggtaagaagcattgaaaaatacccttgaaaaagcttaaaggcctgtaagagtggtatttggtgaaagtttgttgaatctatttcctgatttgtaaatgttgtgtaaaaatgagcatctcattttggctcagttcacaatcatttttcttccctaagggtattttccatgagcttctagaaatcctaaatgttttttcaagcaaccaataaacttacccattgaaactgcacagatttgaaatggagatattaatccactgacaagtgaataaaatgtaagattgctgtaggttcatttctatactataaaccttcctcgtaggagaatgaaatttcaaaccacatggattccaaaaccacttaaacttgccattcccacaatggttagttgtacttgccgaatcacaaggtaaacagaaatctatgagccatttaagatgatcttgagccaggtaggactggtcagagccttgggaacccatctgaaactattccacctggtccgcctgaaagtagattgggatggagtcaggggtctcacattcctgagaaacaagcccatctaattccgcacattttatagctggtaagtatcaagctgtctgaaaatgaccgctaaaacatgaaccagaaaaacataaataaatcagggaacaaaatgtctgtgcattattcctggctattaaaattggttttagagaaaacaagaaaaatatttgctgtaaaactgagctctatttccctgtttatgtgtgtgtgtgggtgtgtgtgtgtgtataagttaaaacttaagtgacttcacaaatcacctttttgacaggcattggaatacctcttgtctttttttttccctacttttaggtgcctcggggagaatgttttctacataaactggctctaactttcaggtgtgtcttcacatgccccgtttgctgcctgaacctctccacaaagactcccagatcctggtaagtcttgcctgctctctcactagcaaattggcatttttatggattaaatgaaggtattagaatttagggggtaagtggagttgtcataaagtaagaaatgggacatattagcacatagattactattacttttacagaatgatagtc

SEQ ID NO: 39072 - DNA, 2300 bp, Homo sapien
atgtgggcattctgttattctaaaagtatacctttttaaaataccttttgtaccttgtttttttctttttagaagccccttgcttatataaaataccttttaaatatgcattaagcccattttgagacattgtttgcaagatgaagaggcttttaggtgaaataaaatatttcactattgggattaccaggcaacatttgtagagaagatatttatgttaagttttacctgtctctagagctcatttttggtttttccatgtcactatcatgtcaatatcatagaatttcatgtgacataatcctaaggataaaaaatgtagaactgattgagaaaaagacatatattttcaataaaatcattttcatatcattttccaggcagatacctgtgtttttcctttattatctcagcccctaagtttttatattgtgatctcttaaagagagataactatggtttcaaaaagttctcagaatttctgtatctcatggtacagaaaaatgcatagtgagggttgtcttgatgtcagaagttggttctggagctgaaggtgtatgaaaacctcatgcagcgtccacacccagttcacccaagagggttttgtaacacattagagcagcctacagaagcccgtagcctagggcatctggatgagtagaactttgctgaaataattcacccttctacatgtttctcctgtaaagcaggtaagcttacaattactaaataacttcttatttctaagagttcttgtggctgtaattatctacaggatatgcataccactcccttatgtattgtgatgaagcaaaatctttaatgtggccctgaaaaaaaatgtatttgcatgaattggaaataaagcattgtccttcatacattctccacatggtgatgggttcctgttctacattatcatgcctcagtgaatctagcaacatactactcaccacctgggtctcaaacatcagcttgctcttacagcgatgtgaaaccatgatctgaggtcatgtgactttcccagataactgctgcctactccattaaaacttgactaaaatcaaggttgatatttgggtgatggtatactggaagcccaaaccccaccactatacaatgtatccacgtaacaaacttgcacatgtaccccctggatctgttctaaaaaatggaggttgagttttatgaactagcttggaatcaaaagactgttagttttactttcaactcagccattgcctgtgattcatagttctatgatttctgttttcttctatgagccatctactaacaactttaatagaattttgtgtctggagcagtacgtggcaagtatttggttactggcctcataagcactgtgtttacatctatttggtcatatgtctttgtcttagtgttaatttatatgtgctatgttggtaaagtgttttcaaatagctgtctttaggccttagtttctcaggaaagaaagactttgcatttgggcttattgagtgcaaacccaattgacacgaagacaaaaacacttgtacatttgtcatacatgtaatgacataaatttgggaggtgctaagggaaataaggttctgatgggtgtcttcaacttgaaacataactcaatgatgtaattttttcaatgaaactaaaagttcataaggacaatcccacaagcaaaatcacttccccaaaattccaaccacattttttactttgatttacaaagatacggctttgtcctttgatttcctgacactacctcagaatgttttccctttggtttattttctatttgaagaaatccaaaaagtgtttattatcttagaggctgtaattaatgaaaacagttccaactgtttattaacagaatcttttatttttaatacatttaagtgtcattcacttcctgagatcaccaggttcctgtctctgttttgcactttctggaagttttgagctctgtattatttattgattcttattctctttcattccaaaaataaattattatgctgaccagacacatacaaaattaggactattgcctaggtgtaaattaattccatttctgatttgctcattctccagtttgatgatgaaaccgtttctacatggctggctctaagccagatgatatttcatagtgcaaagagggatagaacctcactggtggccaaatgtgattatatgctataaccctgtgcccctactctgacacccacccccaagcagttaccctctgttggaagcctgcagctttctttgtttgtttctttaattatacagacagtaggatc

SEQ ID NO: 39073 - DNA, 2300 bp, Homo sapien
ccactgaaactgattctagaaggaaaactcccataggtttaattctctctctgtggggtatatgtgtgtgtatgcgcatgtgtgtgtatgtgtgtgtgatgcatgatcatggttatggcttggatttgtatgtcccaggtgattttagattgtcctgaaaaggcttcatgcctattttaatcattctggaatttaaatcttttcttttatggatggaaagtcaatagaaatttttattccatttacacagtttctgttttatatcaatttctggtgtacttgtgtgtgtgtgaatgtgactgtgtgtgtgcacacatgcacctattaccatattgtgtctgcctattttaaataatagggcagtgaaatattcgatacttttttctttagacacagaggcagaaattcaaagtcagtgaatgtggatgtttgtgtaccacccatcaaacatccatccagtttttccatggttgcatagcagcaaactgccagtcagtagttcgattttggcagtcaccatccttgtagaacaatatctctgctagtacctgagtatcttgtttttccctttttagttgcatttaattagatgaaaaatgtaaatgctgaatgtatttatgacaaggctgtaaatcagcacactgaaaacaagaactatagtcaaatgcttaagagacttaatgccatttggtttttggttcagttttgaagaaaaagcacagaccaggcattaattgaaagaaatatgttgccaaagaggatgtaatgatggacttttaatacctttttgcctgtctcagaataggaagtgcctatagcattttattctttaacttaagatttttgcagatttggtatctggattgtttttaggaatgcattacagcagtataatataatggctagtagcatattttctggagtcagacacaggttgctccaactcttgggcaagttcttaaccttctctgggcatggatttatttctgatgcctacctcagagaattgttgtaaagattaaatgagatgtgccttcagcacagtgcctagcctatggtaagggtccaaaactgttagccatcagtgctattaccattgtcctcatcttcatcatcatgactatggtatgtgtatggaaaggggaaactgcctaaactgatgctttacttgtgtgtggctatgatacagctcaaaacttctctaataaggcacgagggcctattgggaaaaggctaccagcctttgacttgtatttcaaataaggtatttttgcttctcattttatttcttctacatatgtccatattttttttaaccttcctcttcacacttgatttttagcatttcctttttctccctaaactttgtatggagaaaaagaggcaatgagatgctatttttgcaacattagctgaacctgggatatgcgtagtcatgtttatttctgcatccagagatcacacacacctaactcaactgtgtaaaatatattcggaagaaattcagtcaaattaaaagcatgatataagcatgcttatagagtcaaaagaagaaaatgttttatcttgattatggtcaaaagagagaaaataaaggtcttttaaaaaagaatttatactagttaattaagcaaatctgcatgggcatgtctgaatagccattgatgctgcactttttcccataagattgatactttaaaataatacccgaaatgctcattattctgtggttttcttagaaattttgcatattatgactgatggaataaggggtttcacatttattaaacagaatagatgcaaactgaaaggatatgtatacacctaagtgagtactttcttttcaaactggtcatgtaggcaaataatgagttcactgactgagagatattccggtcttttgaatggatccttagcaataacgaatattgattctttgagggtggatttggtttttcagaaatttccactcagaaccaactcttgtgaatgagatgaataacaaatctaagtaatattttgggtgcaaattgagatgttatataaaacaatatggctgttttcctgatctggaaaggtttcttgtgtggaccgttttcttttttaacagatttctaaaaaatactgaaaatggcaacagccttgcaaggacagtttagcctctaaaagcagttcctttgaagagaaaatactcaattagatgtatacattctgttctgtttaaaactcagttttgtatttttctcattatacttaatgtaaaatgtatcctgttaacagtgaatactttaattggtttg

SEQ ID NO: 39074 - DNA, 2300 bp, Homo sapien
ccctctgggaaaccaagccccagtactcaaaagaagaaatagaatggggaacctcatgaggacatagtttcctcccctcaggatggctagccaccaaagaaggaaaaatacttttgcctgcagctaaccaatggaaattacttaaaacccttcatcaaacctttcacttaggcactgataacacccattagatgaccaaatcattatttactagaccaggccttttcaaaactatcaagcagatatagtcagggcctgtaaagtgtgccaatgaaataatcccctacactacacaccatacatttcaatcaccatacatttcaatccctgtatctttaacctccttgttaagtttgtctgttccagaatcaaagctgtaaaactacacatcgttcttcaaatggatccccagaggcagtccatgactaagatctaccatggacccctggactggcctgctagcccatgctctgatgttaatgacaccaaaggcaaccctcctgaggaaatctcaactgcaccacccctactatgccccaattcagcaggaagcagttggagcggtcatcggccaacctccccaacagcatttgggttttcctgttgagagggggtactgagagacaggactagctggatttcctaggccaactaagaatccctaagcctagctgggaaggtgactgcaaccacctttaaacacggggcttgcaacttacctcacacccgaccaatcaggtagtaaagagagctcactaaaatgctaattaggcaaaaataggaggtaaagaaatagccaatcatctatcgcctgagagcacagtgagagggacaatgatcgggatataaacccaggcattcgagctggcaatggctatgctcttcgggtcccctccttttgcatgggagctctgttttcactctattaaatcttgcaactgaaaaaaaacccctgcaaaaaccaaaccaaaatgaaaaactggttaacacgtctaatatttccataactcattttttgctgctatgaagagtaacagcacgtactactctcccaaagtgagcaattaataataaagttcaatgaactgtttatactccatactgacattctgtcccattaaataccaattccctaagtatttattaaatgactattacatgaaatgtaccattttaggagctattgggtatagatagaaattttatagtgggagaaaccacaggaattatttagcttatatttcttacttcatagttgagaaaaaaagtacatagagacaattgcctagtatgggcaataatgtcctaaccttatttccaaacaaaaatacattttagaaattagggcatcattcttgctgcctttcattatatgaagtcaaggataagggggagggagaagataagaaggaaggcttgcttctgactctatcaatagaataggattcaactcaatctgtggaagttttactgaaacaaattagcaggacctgatgaacaggggataaagaatgtgggtccctgataaattcaatattttataaagaaatagtggaatgatgaagtgaattcaaataggaaaattgattgttttactgtgtatattatatatggacataaaagaggcctggaatgagaacagaaagtctgggttccaggttcatctttgaaccttagtgaactgtgtaatgctggcaagttactcaactcagaaaggttcctcagttattcagtaagatgattgtctaggtaattacaaatatcaaatctggcagtaagttcccaaaatcccatgggaagtgttttgtctagaaataaggaaaacctatctaaatattaaagcggttcaaaaatggcaggcatatcattacaaaatagtgtttataagagcaacttctaccttgagattgatctaaatatcctcaaaatcttgctatgaactctttgtgtcctccccccacattcatatagtgaaaccctaatcttcaatgtgatagtattcagaggagcagcctttgggacataactaggtcatgagggtggagtcttcatgatgggattaatggccatataagaaaagacatgacagaggtgagctctccaccatatgaggatacagcaagctggccatctgcaaaccaggaacagggccttcaccaggaaccccaccagctgacatcttggtcttggactccctaccttccaaaactgtgagaaataagtttctattgtttaagccacccagtcaatagcactttgctacagcagcctgagtgaattaaggcagtccaaaagctttg

SEQ ID NO: 39075 - DNA, 2300 bp, Homo sapien
gccggggtgaggggcaatcttggaaaaccagagtacgaagtagaaggacatgggaaggacaggcaagacaaccccaggattctcagcaattactgcagtggggaaggaacggaggggcctcaagtcctttacacagggcaaaatgatggggcagtgagagttgattatggttatctgtggcttcatttgtattgatgagaaatgtggttacacaaaaataaataagacaaattgtcctcaaagaagtgaaattttatggagtcagacatgcaaacagatcattaaaaggtgaccagcactattataatagtccttacagaggaggtaacaaccaagtaaggctctgaaggatgaacaagagtttgccaaatgaaaaagagatggaccaatattctagctaggaggaacctcacatgcagaggcttagagttatggaaaatggagagataagttaggagcagattgtaaagaggcacaccaggagatgtggaatttactttgtaggcaatagagaaccagcccaccagcccagactttcaagtagggggatcatggaatctttttttttgcgggggggaaggtattttagaggaaaatttggacaattagttgagaggtgcaaggtaccacctgaatggcagttgggtaaggactagagtcagaagaaccactgatgggactgtggaaacaacttgtgcaatgacccagcagccagatatcatgctggttcaggaaccgagggaggctctgtgaggccagagcacatttggctggagaaggaggagaggatggcagtagaaggagaaggaaaagaaggctgctcacttgcatgcagatgctgtgagctgacggggcaagttcaaattgaagttagaacagaccactggggtagtcaagaccttgaaggatgaacctgtttctttttcattcctgaatcttgccccagcaccttggaggctgggggtggaggaggtggtgaggtggggtggggtggtgaggagctcagaaaatgttttcctgaattagagaactgaaggaatcaaggctccgctgagctcactaagcgctggagcctgctgtaagtggtcaagtcgggtgatacccagcagacaagtaatttgtgtgcagaccggagtagattacggaggacccaagggtcaggctaaggatcctgaacaccatccacgatagagtggagacgtgcgcttcggagcctgaactatgcagcaagcagtgtgtttactcaaatactatacagttggaaaatcttaattctcgatttacattgccaaaaaaaaaaaaaaaaaatctccataatactcccccatttgtaaataagcaaatccgaactaaccctattccttgggaccagaagacccagtttctaccgcggatagatagcatccgccttatgctaaaagctcttttttctgcggtggtggggggcggcggggagtgtttggaaagaacggttgcaaaaacaaaacaaaacccccaaaaccactcacccaatctcaaccaccccaactgatgaatttcgaagaaagtgctttttaaaaaagaaaaaactagaagaccacagacctcccacagaaagctaaacccatgagagtggcattcaaaaactacccattttctggaacatcttttgtagctaaatcccagccatcctagccccggaacactcccgccctccgtccccgcacccccacccccgccgccacacgcgctcgcaggctgacggaggttggcggtggggcggccgctcaggtgaggggccacccagtccctcgaggcgccggcggctggagcccattcgctgccgtcgcagcagcagggcaagagggggttggccaggaggggaggaggcggaggacgcccgcagggagtgcgggggagggggacgggaggacgctaaggagagccgggaggggcaaaagcacggcgcggggagggggagcggagagggcgggagcggcgggggcgcgcgccggcgcggggccagcctcgcttcgccagggtcgctggcggacgcgcgccgcagtccgagcctcagacgcgcgggcgcgggggacggcgcaggggccgcctggctggagcagccagaggggatagcttcgtcgagaacggaggacaccggcggtccagggtcctgggcagtcgcgccagagctgagcggagggcgcggcgcgagaacgtaagtagctccttgcgcgtctggcggtgacactgggtcctgctcgggggtgacggctggagcggaggaggacgcgcgaggctgctgcgttgtcacttggaca

SEQ ID NO: 39076 - DNA, 2300 bp, Homo sapien
ggcatggctattcttgacatgttatatttctatatgaattttagaatcaccttatctacaaaaaaatttttaaaagagaaaaacatggtgggattgcagtgaatatgtggaacaatttagggtgaattgggtctttgttgagtttccaagccatgacatatggcatattttttcaattattcgggtcatctttattttcctcctgtgttttaaaaattttcagtgttgggtgtcttttacatcttccattggaatgattttatttaactaattcataggtatctgatatattttgataattttattttgttatttttatttcaacatgtttttgtggtaattctaatatgaacatcaattcttggtttttgtaattcggtactggattcacatacgttatagtttttctggatgctggacattgtaagtttaaaaaattgcataagctctagattatatcaaattatatctttttctggggtttatttgttcttctgtttggcatttgagtggagccctgatagccttaattcagttagggtcaaatctggatcaaggctgtattacagtttgggtaagacctctagtttgccctgatttttgggcatattcttccagggtgtgttcacttaaccaccatctcattgggtcctaaaatctcaagaatacaaagccttccactctgattttcagaggtcttcggcttaccttttgccttccacacctcatgattttagaattcagcaaatgtcttgaggtaaagccaaccatgtgtttgaagcccttcaggtcttccatttttttcactccaaaccccttagatgctaaacgatcagctggtttctctgtcctttatttggggccctctgtctgagtcagactcacttttttggtcctttactttttcctggaatcagcaaatgcctcaagggaagaaaagctatagtttaccagctcacttcctagcaattactccttctccagattcttggctccatctgttcttgttgcttcagcagctctctgtctgatgcctttaaacagatggtacttttcttgtatttcatcaagattttcttgttgttgatgtgagcgttgatctgtaacagagtatttcatcttaaccggaaatggaaatttgcattattctccaccattgctcaagttcctctagtggggcctcacagctcaatattaggggaaaaaatattgagaaagaatttagagtatttcaggttgattgatcataaaaaagaaacaaaatgagtgatacctaggaaaattgtttgatttacagaaggttgcacagcagaattatagctgccactcagccattccattaaacctgcggtactgactatgtaagatgcttctgtgtacagaagctagagaatctttggtaagcaacatagaactctaggatttaagctcttgtctgtgatcaacaatatgatgttgagtgcttagaatcttgaagtctcaggtttatttaaactgattatttaattgtagtggcctgcttttaccttctcacctcagttacctttgttaacatttgtttgtattcttttatgaggcaaccttgaatcccatatgcaatgtatacaagatggttcattatttctttttaataacagtttaacttctagtagttactgtgaatcagttttagcctcttaatctcaggatttggactaaatattatacaaaatttataatgttaaccttttgttataataatttgtaaatttctataaattatattttctctagttaagtattacatcttttaatgaaaacttttgaatattggttaatttttgtcctcaatattagaacaaatgtaatctagaaaattgacattaatatatcaaaaactaatctgtcttataagattactgagaaagtaatgaacactgtcaccttggttgtcatgtggtgaactgcatgtattggttaataataatcatacattttcagtcttgatttgacaaaagcaacaaagtatcttttctctcaatataggaaagaattattccatatttattacgactgagacaaattaaggatgaaactcttcaggctgcagttagagaaattttggccctaattggctatgtggatccagtgaaagggagaggaatccgaattctctcaattgatggtggaggaacaaggtaaggctaggaacatgattctttttttttttttttttttttttttttgagatggagtttccctctgttgcccaggctggagtgcagtggcacaatctcagctcactgcaacctctgcctccc

SEQ ID NO: 39077 - DNA, 2300 bp, Homo sapien
caaaagctttttaattcgggaaaacacgattggacttgcactttcaaaagattaccgtggttgcacagaagagactgactgggtcagaggttagttacaggctggaaaaccagtttagatgaaactgaagagcaaggatgaaagcctgaactagagcagtggaaatgcgaatgtggagcagaggaacgattcaagaaattctgcggtaaaactcatcagacttcatgactgattaaaggtatggtggtagacaagggagggagaggaaggataagaatggagaagcaggaattgggcgttatttgaaaatttctgacatgggaggaaaatctggatatttaataacatctgactaaattaggggatgaaagagcataagcggagagggaatggtggtgctctctccttgaccatactttagttaggctcctctgagccctcttcccaactaggcctcatccttgggcccctgtcttaggcctgctgagtccagttttagcaagaatcttgcaaagtcagtttagagagtatctcctagccttgataattgatcatctccgcctgtcttcagcaagaatcttgtaagtcactttaacaagaatatccccgacccttgatatcacttcttagtaattttccatgaactgacccctcagtctgcttgctggttataaatcctagctgtttttgttgtattaaaacttgaggccaatctctctcccccatggtgatagtcatggcacctattgcaatagttctaaatgtcttccttgacattttaacaagtgtcagaataatttttctttagcaacaaggaggaatctgtctcaaaaactaaagctccttccacacgcctgtaaggcttaattggtgcatacatcttttaactctcctgtagctaaataacatgtctggcttatccactgctggggtttaccaggcattatgatgtacataatccagacactgtgtcccaagaacatagcaagctggctttccctccttgatttaaaaaaatcaaaacaacacaactatcagggtaacatccactacatttgacaggtcaaagaatccccttccttaaggactttacaataaccttacagggggctaaagcatacatacccatgggtagtgggtaagccttgagagtacagtataagtcttgataacattttgaggttgataactagttgaaactgatctgttttcccgacctcaacgtaattgcaaggtcacttcaagagggtaaggggctattgcaactacccaaattcgctattgtagtataaaagctttaattaacagcatgtataggaatgcaaagctatgttctaatgaaactttaaaaagcagacacaaatatgaatgtcatataattgtcatctgtcgcaaaactttttttttaacctttgaaaaatgtgaaacccatttttagctcctagtacagcagaacctgcggtgggctggatttgccctgagggctgtagtttgcccctgtggtacgtatgaaatgccacaattttaaaaagatgtgttacgtgtgggaccatttgtggggcggtttatgctaacttccaatacagtaatatatgtcaactcgcttttgagtgacatttagtctgggtggccatgcccaggaatggatatagagaaaggggcgcggccgcgccgggcaccaccctccaagagactggtatcgcagcccccagctccaaggaactcagcgcaggcaggggcttcagggacgcggagagggaggcttatctctgctgaaagggaatagcggcccgcaaacaagcaaaccaggacactgctccgaggtcccgcccaggaaggcaaaacgaagtcccaccgctctcacacccggcaaccaaccaaggcacagcacgccccaccagcaagccacgcctcgcgcatcacgcacgcacgcacgcacgcacacacgtctgtcgcggcttcccgccttgcgctccgtcatgctctattgcgcatatctcggggcgggggaggaacggagattgacaaggaggcagaggcctgagcgaggcggaaaatcctcaccccggcccgcgggtagacccaaacttctagcgcgtcacttccgctgggggcggagcggggcggggctgagtgggtggcgacctagctgctgcgccagtgtttgtgttggaagctcagctgatgcaggccggttggagtggacgtcattgccgggaacgagcgagtcgccgctgcagccctagtgactgcggcctgcatcccggtaagtagccgcgaggggacaggggcgggacgat

SEQ ID NO: 39078 - DNA, 2300 bp, Homo sapien
aattctttcaatatgcactcaccaaatagttactgaacaattaacttttttttttttctttttcaaacggagcctcaccctgttacccaggctggagtgcattggcgcgatctcggctcactgcaacctcctcctcccgggttcaaaccattctcctgcctcagcctcctgagtagctgggattataggtgcccgccaccacgcccagctaatttttgtatttttagcagagatggggtttcaccatgttggccagactggtctccaacgcctgacctcaggtgatccacccgcctctgcctcccacagtgctgggattacaggcatgagccaacgctccgggccacactttattaataattgctgtgccttggtgctaaggatcaaaacagaaaatccttgctttcatgttttcaaactatataaagataattatattaatttcctattgctgctgaaacaaaacacttcaaatttagtggcttaaaacaactcaagtttattatgtcacagttctgtaggtcagaagtccagcaagagttgactggttcctctgttccaggtctcataagggtgaaatcaaggtgtcagcttacctgagcttttgtctggtacctctggggaagagtgtgctttcagttttatttaggttgttgacagaattcaactccttgcggctgtgtggctgaggtctccatttccttgctggctgtcagtcaggagccgctcttggttccctatggcaacctgcattccttgtcaaattgttcctctcattatcttgatctctctgactttcgctttgccacatctgtactgattttaaggatttatgtgattagattgggcccacagagataatccaggattattttcctttcttaaaatctgtacccttaattacatctgcaaaaagtcccctttgccatgtaaagtagcatattcacaggttctaaggatttgggcatgggcattttttagaaggccattcttcagcctaccatggtgattattcttctagaattattttctggcatatccctcccttaggtgatctggagagatatcttgcaccaatatggcttaatttattttggttataatgttaagttttatttgaacaataaagatattagcagctcttttaaaaagctatgaaccagaccagaaaggagtgactatggatgtagaagagctaaaatagataaatcaataataaaccttataaatagaatgagcatagcaagtaactgatacagggcaatgtgatgtctcttttacccagcttccaaagaatatagcgttgaacaattactgtatttagcattatttcaagtatagatgatttcctgaaggcattagtctgctattatacacaagataatctccaattttgcatactactgaatttgtttgaaattaaatataattctcttttgtctcaaaactgcccaacatcaaaagaatcataaatgggttttattttccatttttaacttatcaaactagtaatctaaatgaaactaaaaatcaattcaataatacagaattttagagagtctactatttgttggatgttacgctagatccagacaatacagtttaccttacgctccttgactgcaggaaactggcaggcatataaacaaataaattataatactgtgcagcaagggcaataagagaagtgagcacaggtggaaggaatgattcattctatgagtagtgaggtaagattttcctggctgaaggacaaacaaatctttaggaggacaaggtggaaggggagctaagccaacagcatgaccaaggcactaagtatgaaaaggaacaagagtatctggggaagtacaggtgtggctggaggatagagagtgagaggcaagtggtgaaagtaaaggctggaaggtcagcagggtcagaacctataatttcattcggtatattctgtgaagatgtacagccagcaaaagctttttaattcgggaaaacacgattggacttgcactttcaaaagattaccgtggttgcacagaagagactgactgggtcagaggttagttacaggctggaaaaccagtttagatgaaactgaagagcaaggatgaaagcctgaactagagcagtggaaatgcgaatgtggagcagaggaacgattcaagaaattctgcggtaaaactcatcagacttcatgactgattaaaggtatggtggtagacaagggagggagaggaaggataagaatggagaagcaggaattgggcgttatttgaaaatttctgacatgggaggaaaatctg

SEQ ID NO: 39079 - DNA, 2300 bp, Homo sapien
cgctactggagaataaaactaattcaatttttattttgtggattacacaagaaaattttttaaaaaccctagaaataatacaacttttactaaattcacattttcagtgaaaaaaatctttacaattcacttgcattattttttccttcctaaaaagttactgtaaggtccacaaagtttagttaaaaatttcagtgtggggttataccccatctccaatatcaaaggccaaataaatctgggaaatacggggttaaatcaagttcaacatgatcttttgctacaaacattctcagagatagagccattagtacagtagtatttccctataaactgaaagtggattagattgttttcctcccccaaacatctctttgcatcttgaggctgggcttcaagggagacaatcctggaaatattgccatggattgtgaattacttggggttatcagtttttttttcttttgagacggagtttcgctcttgttgctcaggctgtggtgcaatggtgtgatctcggctcacctcaacctccacctcccaggttcaagcgattcacctgcctcagcctcccgagcagctgagatcacaggcatgcgccgccacgcgcagctaattttgtatttttagtacagacggggtttctccatgttggtcaggctggtctcagactgccgacctcaggtgatctgcccgcctcagcctcccaaagtgctgggattacaggcgtgagccaccgcgcctggtggggttatcaattttttttccattaattaaaatactggaaagcagccgaatcattaatgaataagtccttcaggtctaaagtaaaatgagcacaaaacaactgctgaaaatctgaaccaggttagatctaaatgaattgtttttaaatacaagaaaaaatggaaatgcagtattttaaatatgttgcttttcatgtgttattaatcatgtgagtactattaacatctccatgttacagatgagatatgtgagacaccaaagcttaaatactttccaagaggtcattaagctacagaatagtggaaccaggatctagcattgaagcctggacccctaattattatacgacactgcttgtctgtacttctgaataaaaatcagtgcttcagtagtttgatggaaatatatcgtggctctagtaattcagagtaacagaataaaaccttgttctccgcagagtatctacagccctaagcagaagactagtttataattctggctctgacactaaactttcaaggtcggttacctaatcattccgggcctcagtttcctcaggagaaaagtgggatgaaattatacctatgcgacctacctcgcggggggtgtaaattaactttgcgtgcacctttccacttcgcaggtttcacgtatcttaaatggtggttaatgttgttcaatgaaatgagatcacgtgaagtggggaaaagactgaaaaccacagaagcccgcgcaaactttactgttttaactgttaacacccaaacaggctcctgggcctcgccaccagccagcagtcctcgcgcaagaagggcattgctagctaaactgaactagcgccttccctccgtcttgccgcgggcgacgggccacgtacggagagctgaggactcactggcagagcggacaggagacacccaagcccaaaggccacaggtccaaggcctcacggcgaggctgacgcttctgctccagaaacaacttacggataaaaactcagcttccggtctttattgtttcgtccccggcggttcttacaacaaatcgctgcgcaatagcggggcatgactcgggtgaggcccctggagaccggggccggcgacggatgcagggcggccctcctcactgaggatgcgccacaggtccaggcctctcgagcccctgcgcctgcgctagcattctgccgggaaagccgcctcgtctgtcgactcacttccgcctcctccggtttaagcaccgccttttcgggggttgaagccggaagtggcgcacagccctagcagcaacaacagttttccacgtgcgcgtagggcgccgggatcacgtggggaggcagaagccaatggggaagcgtttcgtgtaggtcttctgaggtggtggcgccagcggctacctcctgcctgtgaggagctggctgagaggggactgggcgccggcggggaaggaggagcgctaggtcggtgtacgaccgagattagggtgcgtgccagctccgggaggccgcggtgaggggccgggcccaagctgccgacccgagccgatcgtcagggtcg

SEQ ID NO: 39080 - DNA, 2300 bp, Homo sapien
ctcaaactggcttaaccttattgagaacaaaaataattcttggctttgtctgtctactaatactctggccatacacagaggagatagaaaattatcaataactgacttttaaccagtttatattgaagattcatcatatgcaagcattgtaagaaaaaaaaagaaaaccaaataatataagatcccaactttcctttcaagacttcatatcctgaaagtaataatgtatttaacttcacagaaaaaaaaaacattaaaaaaaaaaggtggcgcaccaaggtaaatagcccagtatatctaaattagtattattaatctcgctccaaaaattcagctttcatttcagcaggtgagccaaggactgcaaatagagaatcttaatatcacaatactaatactgacaatacaatagaatgttgtctttttcccaaatgtaagatcccaaatgtttaaccaggaagcatggctaaatattgtttaaaactcatgatgaacagaatttaagatttctgctaaagctgccagaaaaatgaactttgatagtttgtactgtggttaaggcagattcttactttcacaaactcagtagttaaaatatttcttttacctttaaaccattaaagaaatgttaacttagaattcttgacaatatgtattcaatgacttgagattcaaaacgaagggatggatcctgttttttgaatacgggaccaccagagtccttagtaacctataatgccataataaggctgacgaaaaacactacggtttgtggaaattgcctggcttcctctccagcggcctttcctgagagtaattagcaggcaggtagattacttatttccagagagttactcgtagtcacgggtaccaagaatcaagaaccacttctcggtttaaggaacacaacagtgtgtcccatggacgctgcgtcaactgcaggttgctccctagtcaaagggcggatctaaaactgacagggaggcgcctcactggttcagcagacgttattccacggtctcaaggtggacatctaatgatttttttttagcagactagttttgtattgtacagacttctcatccccaagacggccccgccagccagcagcccgtgccttattccccagcctcggtgggcggctgggctagaccctccaaccttcacctaaaggcgactggcactttccctgcccgcccaggccccgccgcagaagctgcccgagacccgggctctaatccggcgcccgtgaaagccggcgccacaacccaaaacacgattctgtgatgcggctgtctccgttcttccattctctcggccaaaaacatgcagcccattgtccctgcggcgaccgtggcggacaccgaggccaagtcagctcacaaagacaggcctgggctacggggaccctccgaactcccctccccacgaccccggcctcgtccctcacctgcaccctccgactactgctgctcctccacagagctgaggcgctggcgaccctgacgatcggctcgggtcggcagcttgggcccggcccctcaccgcggcctcccggagctggcacgcaccctaatctcggtcgtacaccgacctagcgctcctccttccccgccggcgcccagtcccctctcagccagctcctcacaggcaggaggtagccgctggcgccaccacctcagaagacctacacgaaacgcttccccattggcttctgcctccccacgtgatcccggcgccctacgcgcacgtggaaaactgttgttgctgctagggctgtgcgccacttccggcttcaacccccgaaaaggcggtgcttaaaccggaggaggcggaagtgagtcgacagacgaggcggctttcccggcagaatgctagcgcaggcgcaggggctcgagaggcctggacctgtggcgcatcctcagtgaggagggccgccctgcatccgtcgccggccccggtctccaggggcctcacccgagtcatgccccgctattgcgcagcgatttgttgtaagaaccgccggggacgaaacaataaagaccggaagctgagtttttatccgtaagttgtttctggagcagaagcgtcagcctcgccgtgaggccttggacctgtggcctttgggcttgggtgtctcctgtccgctctgccagtgagtcctcagctctccgtacgtggcccgtcgcccgcggcaagacggagggaaggcgctagttcagtttagctagcaatgcccttcttgcgcgaggactgctggctggtggcgaggcccaggagcctgtttgggtgttaacagt

SEQ ID NO: 39081 - DNA, 2300 bp, Homo sapien
cacctaagatatcatagtagctttttgaggccagaattaattctgttatcattaaaatgcagattgcaaagatgaaaattgactggggagtagccatttctaatatcctaaaacagaaaagaaaaaaaaatgttatggatggagctaatcttaaaacgtttttcttttaaaagaaatccaacacaaggtaaacctaatgcagtatcaaaatagtaagcatacagtatctattacctgtccacatgtaatttcacttttagttttataactctcaaactggcttaaccttattgagaacaaaaataattcttggctttgtctgtctactaatactctggccatacacagaggagatagaaaattatcaataactgacttttaaccagtttatattgaagattcatcatatgcaagcattgtaagaaaaaaaaagaaaaccaaataatataagatcccaactttcctttcaagacttcatatcctgaaagtaataatgtatttaacttcacagaaaaaaaaaacattaaaaaaaaaaggtggcgcaccaaggtaaatagcccagtatatctaaattagtattattaatctcgctccaaaaattcagctttcatttcagcaggtgagccaaggactgcaaatagagaatcttaatatcacaatactaatactgacaatacaatagaatgttgtctttttcccaaatgtaagatcccaaatgtttaaccaggaagcatggctaaatattgtttaaaactcatgatgaacagaatttaagatttctgctaaagctgccagaaaaatgaactttgatagtttgtactgtggttaaggcagattcttactttcacaaactcagtagttaaaatatttcttttacctttaaaccattaaagaaatgttaacttagaattcttgacaatatgtattcaatgacttgagattcaaaacgaagggatggatcctgttttttgaatacgggaccaccagagtccttagtaacctataatgccataataaggctgacgaaaaacactacggtttgtggaaattgcctggcttcctctccagcggcctttcctgagagtaattagcaggcaggtagattacttatttccagagagttactcgtagtcacgggtaccaagaatcaagaaccacttctcggtttaaggaacacaacagtgtgtcccatggacgctgcgtcaactgcaggttgctccctagtcaaagggcggatctaaaactgacagggaggcgcctcactggttcagcagacgttattccacggtctcaaggtggacatctaatgatttttttttagcagactagttttgtattgtacagacttctcatccccaagacggccccgccagccagcagcccgtgccttattccccagcctcggtgggcggctgggctagaccctccaaccttcacctaaaggcgactggcactttccctgcccgcccaggccccgccgcagaagctgcccgagacccgggctctaatccggcgcccgtgaaagccggcgccacaacccaaaacacgattctgtgatgcggctgtctccgttcttccattctctcggccaaaaacatgcagcccattgtccctgcggcgaccgtggcggacaccgaggccaagtcagctcacaaagacaggcctgggctacggggaccctccgaactcccctccccacgaccccggcctcgtccctcacctgcaccctccgactactgctgctcctccacagagctgaggcgctggcgaccctgacgatcggctcgggtcggcagcttgggcccggcccctcaccgcggcctcccggagctggcacgcaccctaatctcggtcgtacaccgacctagcgctcctccttccccgccggcgcccagtcccctctcagccagctcctcacaggcaggaggtagccgctggcgccaccacctcagaagacctacacgaaacgcttccccattggcttctgcctccccacgtgatcccggcgccctacgcgcacgtggaaaactgttgttgctgctagggctgtgcgccacttccggcttcaacccccgaaaaggcggtgcttaaaccggaggaggcggaagtgagtcgacagacgaggcggctttcccggcagaatgctagcgcaggcgcaggggctcgagaggcctggacctgtggcgcatcctcagtgaggagggccgccctgcatccgtcgccggccccggtctccaggggcctcacccgagtcatgccccgctattgcgcagcgatttgttgtaagaaccgccggggac

SEQ ID NO: 39082 - DNA, 2300 bp, Homo sapien
gttttaattattaaaatatatgtatttctcattagtattttattaacattcataaaggtttatttataattagtagatgcttcatttcttaggagatgaaggattgaatctctgtgcttacttttccttttcagaacattttatccacttataatttcaccacattctgttttgccacagtcattgtgtatacctgtatgccatagctgtaatcaactataataaacttggaagtcattattctataagatcattaatgctgatgagttcattagtatttagaatatccctccttctgtgatcttttctatagtaggaaaaaggtctacctcattgtgtagaaatcctatctcatattggttcattcacatatcttctttcttacacagatataaacaagaatatgtgctgaacatatggaaacataccctaaacaaaaagaagaaaacatcatatttaaatactctcctacttctttaaatcaataaggatggaaagagcctgttagaatctttctgttgttgtaatgcaagtagctctttgcataccttgtgttttctttcgagtgttactgtgaaattgtggctttttagatacttaattttttccaatttagcaattagcattattactttggttattatttgctatgtttttgttattgaaacactactccctaatattccaagtagcagccttgatttctggttaacaacaggttgctttgactccatcttattttgtctttacaacaaacttgaagccaattaccctccagggatcaaaatgtgtgtgctggggtgcacatgaggattggtaatacactagagtagtgtccctgctgctgggccatttataataatgatagagttggaaaataaatcttttaaagacatgaattcatactgatttttccaatgtaacatattaccgaaactaacttttttgtagacatgcttttatgcttatattaaatacgtaataagatggagaaaatgtattatcttcacagccggtagcagaattcctccacaggaaaaatcagtctgtcttgggaaaaatgttttaattttttagagttgaaggtgagattctctctcttccccatttccaccatcaaggcctaaaaaaaaaaaaagctgacccccaaagtttcagtgaagaatttagttgttcaagggctaccaggaagaggaaacttgaggacaacagatgacagtaggggaggaaagtcgggttttagatgttactgttgttcatgatgatgcaccaaataaacaaacaaaaaatatcaaattcttgcatgtatgtgtgataacatttcttcatgaaaactgaagaaagagctgaacttcatgtcagatggaggagttatgagacatatagtatgccaggaagtagaaacacaaagatctggagaaacctatgaataccagttccctgtaaactttttagaaatatgaagacctcttgggacttccacagagtggaaacagtgggcattacaccaactgtacttagacactgagaagtaaaaaaggtgtctgtattaaaaatagaacacaaattaacttaagaaaaaggttgccagatttagcaaatgaaatcacagaatatccagttaaatttgaacatcaaataaacaacaaatttttttataaatatgtcccatgaaatatttgggacaaacttacgccatctttcaaacccaacaatgggagttacagtgtgtgtgtgtgtgtgtattagaaactacaaatatgctcacaataattataaatatatgaaacatatattagttataaatatataagtattgatatattttatgtatataaaacccttagttgtgataaatagaataatctccaccttcttcatttttgcatttatttctgtcttggtcatcctgatttttcattgtctctttaccctttgttttccgtgtgctccatgctaatatgtaataatcattgtgtttgaagcctgttattcaaaattctcagagtatctgtgtgtgtgattgcaaaaatgtcaagttgaaggtctttataaacttcttcttcagatctaattaattctgttctccactacagaaaacatatgttgatcccaaacatgcaatgacatccatataaaccttgcaaaatgatggctgtgatgacacccagtgatggtctttctcaactctctgtacctcatctcactcatcagagactttggagcctcagttgccttgcaatgctgtttcaggtaaggtgggaattctttttttctttttttttttttttttggtagaa

SEQ ID NO: 39083 - DNA, 2300 bp, Homo sapien
tatgtgtaagtttgatcctgtcattatgatgttagctggttattttgctcgttagttgatgcagtttattcctagccttcatcgtctttacaatttggcatgtttttgcagtggctgttactggttattcctttccatgtttagtgcttccttcaggagctcttttagggcaggcctggtggtgacaaaatctctcagcatttgcttttctgtaaagtattttatttatccttcatttatgaagcttagtttggctggatatgaaattctgggttgaaaattcttttctttaagaatgtcgaataatggcccctggtctcttctggcttgtagagtttctgccaagagatcagctgttagtctgatgggcttccctttgtgggtaacccgacctttctctctggctgcccttaacttcttttccttcatttcaactttggtgaatctgacaattatgtgtcttcgagttgctcttcttgaggattatctttgtggcgttctctgtatttcctgaatttgaatgttggcctgccttgctaggttggggaagttctcctggataatattctgccgagtgttttccaacttggttccattctcgccgtcactttcaggtacgccaattagacgtagatttggtcttttcacataattccatatttcttggaggctttgttcatttctttttattcttttttctctgaacttctcctcacacttcatttcattcatttcatcttccatcgctgataccctttcttccagttgatcgcatcatttactgaagcttgtgcattcgtcacgtagttctcgtaccttggtttttagctccatcaggtcccttaaggacatctctccatttattattctagttatccattcgtctaattttttttcaaagtttttaacttctttgcccttggttcaagcttcctcctttagctcagggtagtttgatcttctgaagccttcctctctcaactcatcaaagtcattctccatccagctttgttccattgctggtgaggagctgcattcctttggagaaggagaggcactctgatttttagaatttctggtttttctgctctgtttttttccccatctttgtggttttatctacctttggtgtttgatgattgtgatgtacagatgggtttatggtgtggatatcccctctgtttgttagttttccttctaacagtcaggaccctcagctgcaggtctgttggagtttactggaggtccactccagaccctgtttgcctgggtgtcagcagtggtggctgcagaatagcggatattggtgaaccgcaaatgctgctgcctgatcattactctggaagttttgtctgagagcagtacctggccgtgtgaggtgtcagtccacccctactggggttacctcccagttaggctacttgggggtcagggacccacttgaggaggcagtctgcccgttctcagatctcaagctgcatgctgggagaaccactactctcttcaaagctgtcagacagggacatttaagtctgcagaggttactgctgccttttgtttttctgtgccctgcccccagagatggagcctacagaggcaggcaggcctccttgagctgtggtgggctccacccagtctgagcttcccagctgctttgtttacctactcaagcctgagcaatggcgggcgcctctcccccagcctcgctgccaccttgcagtttgatctcagactgctgtgctagcaagagcaaggctctgtgggcataggaccctctgagccaggtgtgggatataatcttgtggtgtgctgtttgtgaagcctgttgaaaaagcgcagtattagggtgggagtgacctgattttccaggtgccgtctgtcacccttttttttgactaggaaagggaattccctgaccccttgcccttccggggtgaggcgatgcctcgccctgcttcggctcactcacggtgcgctgcaccccctgtgctgcacccactgtccagcactccccagtgagatgaacccggtacctcagttggaaatgcagaaatcacccgtcttctgcgtcactcacactgggagctgtagcctggagctgttcctattcggccatcttggctccacctcccacatctgtgtctttgaagagctctgtaatagctcttctctgtatgtcagatctaactgggaaccacagtcactcaactacaaaatgtaaatacaatgggaataattggattgtgaagtggcagggaccaagtggcagcactcaaccatcataggccaggtgggagtag

SEQ ID NO: 39084 - DNA, 2300 bp, Homo sapien
ttataaaaatgagtataaaatattttaaatttatcatgtacctacattaaaaggacaattgcaggaagagcactctgatctcccactttcaaaagagtgatcatttagttaaaacaacttcctatgaaataatgtaagataacatataaatggctacctttaacaattctaactgaatcaaaactgaaaagattttttcttgatttctgaaacagactgaaatttaagatattaggtatgactgcagtttcatttaaaaaccaagagaggagtttaatcatgtatctgactatcacaacttaccttcattatgggagtgcattataattggtttgattactggacttgtcaattatacagtcaataccaatcaatgaaaattaatcacttaagataccatggcataaataaaaattctctttttacaaataattatcacaattttaagattattcttccatatgtggaaataaatcctgcagatactgaaataatttggaatattaaagaaactaagatttgctagattaaaattaaggggtaagaaggatgattattactattattaaaagtacattaaattatatgtaaatatactctaacacaacatcccaacactcaaccatgatccctaacatacagaactgactcagtgctttctgagtaaatactagagtatccagtaaataataaaaccttacaataatattctgaaataagtattaggttaaatgagatgctacttttatcttgaacttattttgattcatttgaataaattcttatagaaaaaaacatttgggaactgtttctagaaaactacagagtgaaaatattcagtatttaaagacaagcctactgtttaaaatttttcctggtattattattattataataactgcaaactattgttctatgtcatgtcaataagcacttaaggagcaattagatgtgaaggttttgttttttttttcctaagtaaatctaataagtgccatttctctttactccactagagggtagtctctcaaaactggggttggagtcatgactagcctgcttttgacctgttgatatattaatcctcatgttccattctcctcaacaagatgtttctctagtatactaattaaggttgtaaaacatgcatttttaaaactgctttttgatttttcatgtatgttctttcagaaatatgcactgctatgtgtttctgtgttttccaaatttctggtaattaataaaaatgttttacatgtatggcttatatagtatattttcctgggaaatatcctttcagagttaataggcctaagaataaagatagtcttttaaataatttaacttattacaatcgaaatatttccccagagtggtaaaaaatacatcctaaatacacacacacactcacagatacacaaacacacctacacatgtacccattcatatgtagctcctagatttattacatcatataaagagaagtcagtgagtataattagaaatacatatttttaaaaagtaccccctcaaatgccaatgttgtgaattacagagaggcaaatatatgctttattttaaaaatctggtcaatccagacaagaaatgtcattgctaaaaaaaaaaaaaaaaaagtgttattgaacaccaagcacatatgctaaattaagtaggatctatagagaaccaaatgccactcaaaacagttgcaagcttctcttcttaaataatgcagtcattgctgaacttcagagacggagttggaggtttgagtctctaccaggtgtttttaatatttaggaaatccttatcagtagtgtgtcctctctatttgcagactgaaaacatatttctctgaatgactgataacctaaaattgagaaaacttgtcaaaaattcccaacattccctcagaaaggaaaaaaaagaaggaaaatgatacctaggaaaacatgcaagcctgtttcatttatttgtatcctaagcagcagtgtcatagaacagacagtttgtttcagccaaccagactggagcagctgcgagtgctacatcttggctgtctgaagcgattggctcctctctggggagtggagggtgttcagttattaatgaccgctgagcaggcagcaccatgtcagtgtgacaactgatcgggtgaacgatgcaccactaaccaccatggaaacaaggaaaaataaagccagctcacaggatctctcttcactggattgagagcctcagcctgccgactgagaaaaagagttccaggaaaaagaaggaatcccggctgcagcctcctg

SEQ ID NO: 39085 - DNA, 2300 bp, Homo sapien
ttccagatattagcttctttttaagtacacttgatgaatcttagtgataaaatcaggccagacctagcaactctttttgtatgtttattgacttcccaatacaataaaggccataaacacctgtctttgttgtttattcacctacattccatcccagactgtcagttcctagtgaccaggagctccattcaatttggggtcatggtaccaaatagttcttgactgctatttgatgagggtggtcctgtcacctaagtgctcttgaaattaagtccttaagcactggccgaaaagagcttactttgcagtaattatttcagtgacaagtaagaaaaactgggacatatccccttcacaggagagcaattttgctctctttaggaaactcttggaattttagttatcaggctatttaagaccctgagtagattcttaaacctttagaataaattttgaaccaagagtgccagaatgtctgttatttacattagtattaagtgatctgaaagtgcacagagtagtttggcagtatctagagggagaatagagacagaaataatgaagatacaactggaggagtaagaaaaggagaaaaaaagtattttatgtctgttcagtatttctaggtgccactgctgctaaatgcctgggcttcagcctaggttgggttgctcctagcaaagaaaaccagtccctgagacaacgagtattgccagggaagacaggctttaatgcaggtgatgctggcagggagaccagtctcaaacatgtcttagggagactaaagttagggctttctatagcagggaattatggaggggtaaggaagaggagtttgtgaacaggcagcagatgcacctcattgtccagatgtagtgttctggaaagttgcatttccttgacactatctgggaggtctgacagtttatctgctgagaaaggaactcaggtaaaatgcacgcaagtttctcaagtttcacttcgaagggaaaatttggccggtttcggtcttccctttctatttatcaattcctcaatcatgcggaatctggtagttgatctttctggctgcttcacgtgaaggaagggcatcttgggatgatatggaatgaaaatatcgcacctgtaattgcaagtacttacgagtacctggttggcatccagcttgttggagcaccatgatttgggtactttcatcaacattttaaaccacattgaattaggataattaataacatggataagaaggtttctttgtaggttgtaataacccagttaagagtttgtaccattcggccgggcgcagtggctcacgcctgtaatcctagcactttgggaggcctaggtgagcggatcacgaggtcaggagatggagaccatctttgctaacacggtgaaatcccatctctactaaaaatacaagaagattagccgggcatggtggcgggggcctgtagtcccggctactagggaggctgaggcaggagaatggcgtgaacccgggaggcggagattgcagtgtcgctctggcgacagagcgagactccgtctcaggaaaaaaaaaaaaagagtttgtaccatttgagggcaaaagcttcagtatgaaattcccgtttctctcaagtaaaccgcctgtcctgtgttactcactttgttttacctggaggcagcaaaactgaatagttttcctgagtgctcatgagtaggaaaaaatgaaatgaagagttgcccagagatcgctagtgaggtgctttgccactactgccctgtacttaagtaactgtgagggttctctgtttcctggcttctaaaacaagaggaagagctgaagacacagtttcatagacttttcggctctttattgtagtctcccccattagtacgttgctgagcttagggcaagtgctcaataatagcttgctgaattagtgttgtgtttgatcctttcagatccacgccgcattttgagcccgacctgggcgggcggtccagagaccagttttccgccgggggcggagcttcgggcggccagcgcgcgacggggcagcggggcggagcttgccgccggcggagggcggggtctgcgcggggacttcccccgggctgagctgcgcagcgggtgcggagggcgggcgcccggcgtccggcggcgggtggggggctgtgaggctggcaggggtcggcgggcgcgtagccgccgacccttggtggtctcttgggctggggacccttccctgggagtcggccccggccccggcggggcgggcgttgccgggaggcggaggggtgcgcggccgcga

SEQ ID NO: 39086 - DNA, 2300 bp, Homo sapien
catctttaggagttctctgcttgtatgcaagccagtcctgtccattttcctaatggaagccctcgtgtgtgtagaaactcagcacctgcttctgtgagcccagatggtaccagggtaattcctagacgcaggtaagtcatattccaaattatcttacaatttggcctcacccgcaagctgatctggaatggttctctcattctttatggcacaatttgtcaaatacgctatttcttaatgaaataactaacccgcgaggcagctgcagacctctgccaccagtaaaacagcaacagcatgagaaataaataaactcaaacatttgattatattgaggcaaacaggagaaaacaaaacggaatgtattttcccccctttggtttcatagcattctagcacatgataaagtacaatttggagactgagttaatgaccttttttttccccctgaaacagcccgttaagttacccagctgtcaaccgatattcttcctcctcactgtcctcacaagcttctgctgaagtaagcaatattacagggcaatcagaaagctctgatgaagtctttaacatgcaggtacttaattagctttttgtctggttgtgtttattccttttctgtctcaatcatgagtgtttctgttcattctgctgtgctgatgaacagaccaacaagcaagaacttggcttaaggacaaacctttaaacactcttcttgctttatgggtctctagagtctacaaagacgtttctcttaaaactgccccatcgctttaagacgacatcagcaagcgatggaaaagcctaggcacgctgcacaaggttcagctctgagacctgccccaagttccttctgcagtccaggactctcagagtgtgttgccactcactagctgcctcttagcttgcctttttttttttttttttttttttttttttttagcgagtctcactctgtctcccagtctggagtgcagtggtgcgatcttggctcactgcaacctccgcctcccgggctcaggcagttttcgtgcctcagcctcgtgagtagctgggattacaggtgtgtaccaccacgcccgactaatttttgtatttttagtagagacggggtttcactatgttggccaggttggtctcgaactcctgacctcaagtgatctgcccaatttggcctcccaaagtgctgggattacaggcatgagctactgcgcccggcccctcttagcattccaaaatggctttttttttctttaagaagacatgatttggctaggtgcagtggctcatgcctgtaatcccaacactttgggaggccgaggtgagcgaatcaccttgagatctggagttcgagaccatcctggccagcatggtgaaaccccgtctctatcaaaaatacaaaaattagccgggcatggtggcgcatgcctgtaatcccagctactcgggaggctgaggcaggagaatcgcttgaacctgggaggaggaggttgcagtgagccgagagcatgtcactgcactccagcctgggcaacaaagcgagactgtgtctcaaagaaaaaagaaaaaaagacatgatttgagggtctgttttaaaattatctttacttatgtacatatcagaaagtttccaaaggtattttttttatacaagaaaaatgtagtttttagggattttagagccagtataactcctgcaagcaaacattttatttaaacactactaatatggcatttatgatagttcagtaagactaagctgaaattttcctcaccactatctttggaaaggagacataacacttatttccaaattcatgctttgaacatacttgtacagataacaagaaggcatattttatgccttttagacgcactcgcctgtttttgggccctaggctggaagtcattctacttatacctcaatgaaggaatgcactgctaactggtacgaagtcacagtgtatagctgaatctaacacgaaggcattcctttggcaggagtcaaaatctcagacttttcattaattcatgcagacttctttgtcaatctaagttattaagattttctatattgttaaacggactttttgttgctaatttgaaaaaaagttgatgattttgtttcaaatacgtcagtgtcgtgggaagcctttaatcagggtatgataatagctccctgtgtgtttccagccaagtccatctacctcaagcttgagttctactcactcggcttcacctaatgtgacaagttctgctccatcgagtgccagaggtcagtgccagagtgtggggaagac

SEQ ID NO: 39087 - DNA, 2300 bp, Homo sapien
gtctttgcaaagtctagacacaactcttgggaaataatgcagcaaccaaggaatgaagtaaaaatttacgctgaccctacgcttgaaccacgtcatgctgggaatctgtaagttgagtataaaggaggagccttttctaacagcgtcttaggattgtgctagagctaagtctttatggctgtaacaacaaagaaagaggataaactaaagcagtgcttttcagtttttagctaagtacataagaatcacctggaaaacttgctaaaacagactgctgtgccccaatcccagagattgtgtttcagtaggtctaaggtggagtgagagattttgcatttcttacaagcttccaaggatgctgatgctacagtataacaaaatactgcattataggtattgatatgctccagaaattttccatattctctagatctctgagaaaaacagagaagcaatttaacataaaaaccagagaggcagaaatagtttcattttagaagaaagacaaaatacaggataaaagtttatgaagtatacagtgacatgtttagggagattacatgtgacagctttatttagcagcccaagggtcatgggcctaaatgcatagctattatggtttggatacaggtttatgtggaaataaccatagatggcaatgctgagatgtatctagaacagaaactggtcattcttttttaacattcttgtaaccgaacagaatctgtcctgctctcataatttgagcccagaaaagagcttacacaaccacaagtgcattcaaacagattcaatgcagcattctttcaaaaacatcttgctaaattaatgtcgaatgcaatatggacactacaagggccttgatcttctttaggaaaaacaaggacacaaagaatcaatgaaacctgaaaacactgaagactaagaagagcagtctccaaataagaaaactatttttgagctgcaactaaagacagaccatgatatcttctggctggccttacatagttgaaggttgttttcaagatgataactcttttttttttttttttgagtcagagtctcactctgtcacccaggctgatggagtgcaatggagcgatcttggttcactgcaacctccacctcccaggttcaagtgattctcctgcctcagcctcccaagtagctgagattacaggcacccccccaccacgcctggctaatttttgtatttttagtaaagacagggtttcaccatgttggccaggctagtctcaaactcctgacctcaagtgatctgcccgctccaggctcccaaagtgctgggattacaggcatgagccattgctcccagcttcattatttttttttattttttattttttctgaaatcaccagcaagcattgaacactgggcttaattatatataccaaggctccctcaagttgttatgtatatttgaggaatatacataccctattaaaaaaaaatcaccctgtaatgatcctggtcaaaaatcagtctgttaacatgagtggaagtaaaacaataatggttctattttcattcacagaaaataaatccttccaatctccaagttgtacttggataagcccaagagaaaagatattttcaggtcattacgtattcaactcaaataggtcaatcattttaataaatcaaagaggagcattaagatgcagtaatagtaaatgaatactaaaaacctgcatagttaacataccaaatgaaataacttataaatctctagaaagggaccctatgccaatgaattttaaaacaatttgttttccaaatattactgttttctatgcaaccagatctgtaccatcaattttctggaataatatactctatctgctatagcagattaacaaaattggatccaacagtttcttagcaactgcagatgcttttaaaatcctttggctatactctttatgatataggacaatggtctcaagtttttaagagtagtgacgttcaagtcaatgtttcatgaagtttaacctaaatttattatgattcatagcttcaactcagagttctagaaattttgagttgttacagttccaaattctgaaaggttgcctcatcgctggaaatatgtgtaatgttggagcaatgctagattataaaatttatcgttaattaataatgaaacacacaaaggtaaggtgacttttcttagagaccaatttaaagaatttgttgtaacctcattcaatgccaaagtgtcaattactttctatagatgtttattgatttagacatttggtttcacatggtgtcactg

SEQ ID NO: 39088 - DNA, 2300 bp, Homo sapien
gcaggggaaatgcacgagggattatgaaagagaagatgccagggaggggaggcctcctgaagtgagatgcaggaagtaggaagtaggtaggagggaagcagcaaactggggagaacaatagagctttgcctttgtcgccctgagtctcactctgtggaaatatctgatatgccaaatataaccaatcagttttaaaaggtttcagtcataccccaggatgtctgaattacatctgaatagtcaacattttcagggtttttggttatgaaaacatcataaatctctttttcaaagtcagtatttttaaaatcactttatttttctcattctaattcctcctcctcctcttacccgtgtttgttgcagataaacattcctgtttggtactgaattccttactattaatagtaaatcctttgtgaggtttttctcttgaatctggctttggtggagcttgcttctctttctccttgagattcttaatgctttttctcactggtgttctctatattctctttttctttctcatcttacctacttccttggtttggggggtttggagtttttgttccctcatcatctttctgtttctcagaaagtcccttttgggtttctgctaaaacaagtgatttgaagtaaatttcctgcttccctgcctggaaattctgtcctggctcctctctcggccagtctagtctggcaactccactgagccctgaggccagttctaccaggtcccgctgccctgcgcgtgctcggcacacgcgagccttcagttctcactgcattcattggcctccagatgccacctctccctgcatgcgttggagactaataatgcatggagaccatctcccacagcctttgtaacttctgcccaagaaagataaatttattccctccccaggtgaagaggttctctaaggacctgctggaccaaagccctcatgtctgtttaggaaagggttaaagagctgggccctgtgcttatctggactctgggatgaaagatggcctgtggagtccaggagctgctcttctcaggttgagagctccctggatgatctaagaaatcactgggcctgttaccattcttttagtctgcaagatttgggtcacattgccaagaagacctttgttcctgggtggagttggttgctaggcagagtgctatgtgctgggcacccaaacgggaataaagcaggttcccagccctcaagaaactctcatctttccaggaggaggcagaaaaattaatcaacaaatatttgtcacctgcctgatttgtaaggatttgtaagtgctactgtgatgtggaagcatgtagaagggacagttagctcgagatttcaggaaaggcttccaaaatgaagcaacatccgatctgaggactaaaggatgggtaggagtttgtaagtcaagagcagtggagaggaaacagaatacagtgaaataaatgccatcctagagagggctagtcatagtttgtgggagcctgcaacttgagtggctaggagaggggagccacatgtgttaagaattttacttttactagcagaacgctttcatgtgaggacctgttctctattaaggcaattaatcttccttttctattttgaaaggtgatatgcttgatcttttgaaatggagaacccacccagacaagatcactggctgtctctctaaattaaaagaaattgatggctcagagatagtaaaggtatatagtatttcattactattttccttgcagagattcatagaataaagaacatttggaggaaaaagacagatagtatcttatttactcatttgctacttctttatctaacagtttctgcaggatacactggataccttatttggaattttagatgaaaattcccaaaaatatgggtctaaagtgtttgattctttggtaagttcaaattcccttaattgtattttaactgttttgtctctcaatcttgactttcatgaggctggttcagaaacatgtgcttaataatgtaagagttcattttaaaaagaagcaaaaaaaaaaggaaaaccttgatttgcatttagttttataaagctcaattttctttttttaggttcacataataaatttgctgcaagatagcaaatttcatcattttaaacctgtaatggacacttacattgagagtcattttgctggggcacttgcatacaggtaaggccctgtatcttgtaattagtttagaagtggttcctttcaagcttttctcagcagaagaggcgatataggaaaatttaaaagggagtgtaggaagaaa

SEQ ID NO: 39089 - DNA, 2300 bp, Homo sapien
gaagagtgaggagaacgaaaataacaactactaacatctactccttgccagtaaagaggctggcaaagactcctctgacactttgaaggagggaaagctggaaacctttcccaaaggtgggttcaggtcaaactattgtcttggtaattagtcacaatccagaatggaagctaacgtgaaatgtgggaatgattttgttgaatcctacagtcctttcaatggaccccaaagtcctatccccaggcaaagttgggaaaaaaaaaaacaaaaatcccctcggactacgactccctgggaaggctttccagatgttttaaattgcaggaaaatgaatttagaacataagcagatatctacacatcacctaaatcactagacctgtcctcaattttaaaacacacacacacacacacacacacacaaagtacaccagtcggcagaacagggcattataggaaataaagagtgttagtaaaatccataatgctttctgttagaccttctgggaggttataattgcatttggccggctgcagccttgtcggagagcctggcttcttaatagtctcaaccctaaaaggagtaactgtcaaggggcgacccagctgaaatcaaacaacaaaaacgggaactgtaacccgcctgaaatgggaggaggaaaaggaagggagactcctgtattcatcagtcaacattaatgtcctttgttgttcacctttacacagaacagcgagagctatcctgttcctttttctccgaacgccagtgtcagggtatgctttcctaaaagctatctccctgcccccaagaaccaggctttccgatccccctccccatttatcactcagcagccctgtaccgccacaccgcccccactgcgctcacccggggtcgagagggtggccagaagtaaaaacactgctgaaatacccgttcttctccaaagaccaaagaaccgagcggcgcagatgttgaaatttaccaatgcccccgccccgcaacatacacaccccataaatccgggatcgcagagagggaggagggtcagagagggctcagcttgtcagagcggctctctccaggaccctgccacattccacactccgggaatgtcgatccgagccagagggaagggtttgcgcctccctactgttttgggggtgttctctctgcccgagtgttgttgtctccctctccacccagaggaaccgttgcagctccctgtcgctttggggaagaagggtaaggaaggagagaaaccccattcgcctcctcttccaacttgacacacacacacacacacacacacacgcccagtcgccactccaaactccgcaggcagagcccgaagctagcgggccggccgcgcgctcccccaagctgtcccggcgcttcgggaaccagtgcggggcgcgccgagcaggcggtgcggggcgagagcctggtgcgcagccctctgcctggagctggctcggcaaagccccgtaccagctgcgcgatgccaggattaggcattttcaaccgggcggagcgagaggggcgcgggggcaaggacgagaaatgcgcactcgctcgggccagagcagaataaaagttcgccccgcggagactcacccacgccgtatttctcgtgctccgtaggtatccacatggctaaaggggctccggggtcttcaggctttgtaatccccgcgccccttctccggctcacaacaatgcacagtccccgagcagcgctgcagtgccggagcccagcggcttcgcgcgggctgcgggcgctgggcaggatctgcgctggaggctcccgagcccagcgttgacactgcgccgcccgcagctctcccggcggcggctgctcacagtcctccgacgcgctcccgggtacccggcggcgcagtcattgttctgattcactgaactaagcgaacacgccggggcactctccggcgcacccccgcccgccagcgcctagtccagccctcccgtcccagggccccgcagcacgctgggaattgtagttcttggcctccccatcccggaagtgggcgcggcaaatgtggttcggggcggggattcagttttactgattgcgtcctattggtccagagcgcggcgtaggtgtggagaaaacattacgtcgacggggagttcgcctccagtagcgtttctactggtgccaccccgcctccgacccgccctgcggccctcccttttcttttctgccgggtaatggctgcttccaagacccagggggctgtcgcccgaatgcaggaagaccgtgatgggagctgcagcacagt

SEQ ID NO: 39090 - DNA, 2300 bp, Homo sapien
atacacttctgaatggtttgaagtgcttttaaaaacttttaaacttgtaaaatttaaaaataaatatttttaaatattttacatttttgaaaggcatatcctttttttttgttttgtttttgatacagagtcttgctctgcctcccaggctggagtgcagtggtggatcatggctcaccacaacctccgcctcccgggctcaagggattctcctgcctcggcctcccgagtagctgggactacaggcatccgccaccacgcccggctaatttttgtatttttagtagagacggggtttcaccatattggccaggctggtctcgaactcctgaccttgtgatccactcgcctcggcctcccaaagtgctggtattacaggggtgagccaccgtgcccggccattttttaaaataagttagactgtgagataaattcaccagtttagatcttaaactggtagccctctggaactttgaaaatctaggaaaccgtaatagtctgttaccatcagatagcccaatatataaccaacccaaaaataaaccattagggtgttaaattcaatatttaactcaggagactaccaaagatttgtttggtagaggtactaaaataatttcagagtagggagttccactgttgggaagtgggaaaaaactgcacttcaactctgtgccgctgaggtaaatacttaagatgatatcaatttaactgtgaaagcaaaaacaaataaatcgaaaaacaaagtcgcaacagtctgagaactatatttaagccccaaaccatgttcatcagaaaaagacaacttgtgctaaattacacatcaagacaaaaatggggtggggggaatgggggagggatagactaaaggtaaaagagtcctaaacacaatccacctgcagctttcaaaatttggttttttattcctacagtggatcagaggacaacctgaaagtcaggtacagccaaagttgtgatggttttcaaaactcttttcaaatgttctttgaagccacgagtgcaaattatctatcactttccttttctttctctaaggacccagagactgggaagatctctcaggctccacatacaaatctgaagaacacccagagcagttaaccatctacagggaggttgtgagatacacacactttcccttcagaggtcacctcagccacaaactgggcaaatctgtagagtggagagcagtgaccaccagtctgcgactggaaatactccggaagctaaataaaacacacctgcgaggtcaaaccaagcaaaccaaggcagtgtactggtgaggagaaagagctgctaatcccaaaattataaacacacgcgcgcgaaccagatctgaaccaaacccactcagcagctagctcaaagctgggagctccaaaccagaagacaaacgctcagggagcttccccggcggaggggaaggccattccatggcattttctccgccatcccatggcattttctccgccatccccgggcagccccaaccaagtagccgccaccggctccaacccatcccgctgggccaccacccgtggggcccagtcgaacccaggtggccccagagctgaagggctcctagggtcagaccagaggtccgttgcacacccggtcatagagaaaggaagacacatcagccgcgcctccggggcaccgtactcacccccataacctacacccccgactgtgctgcagctcccatcacggtcttcctgcattcgggcgacagccccctgggtcttggaagcagccattacccggcagaaaagaaaagggagggccgcagggcgggtcggaggcggggtggcaccagtagaaacgctactggaggcgaactccccgtcgacgtaatgttttctccacacctacgccgcgctctggaccaataggacgcaatcagtaaaactgaatccccgccccgaaccacatttgccgcgcccacttccgggatggggaggccaagaactacaattcccagcgtgctgcggggccctgggacgggagggctggactaggcgctggcgggcgggggtgcgccggagagtgccccggcgtgttcgcttagttcagtgaatcagaacaatgactgcgccgccgggtacccgggagcgcgtcggaggactgtgagcagccgccgccgggagagctgcgggcggcgcagtgtcaacgctgggctcgggagcctccagcgcagatcctgcccagcgcccgcagcccgcgcgaagccgctgggctccggcactgcagcgctgctcggggactgtgcattgttgtga

SEQ ID NO: 39091 - DNA, 2300 bp, Homo sapien
gcatttcattgtttccataatatccacaaaaaggctttggtttagagttcacttcttaaagcatttagccctaggagtaaaacaagtgtggattaaatcctagcttgaacaatttactaattcatcatcctgggactcagtttccacaattttagcaacacctatttttctgagttgttggaaatactagcaaatatgtatgctacaccccttgaacagtgtccatttttcaatgaagaataagctatgaataaaaatagacctactattcctactaaaaattgtaggggaaaaagattggaaggaaatacatcaaaatgaataatcattgctgttaggtggtgagattattgtgcttttatcttggtaatttaaattttccccagctttttatgtcttgtaaaatgactttgcagtaggtttataatcagaaatgttaataaaataataacttaaataacctgtagtagtttaaaagttctcaattatccttccacaattctgtcctgttcctcaataataacacaaatctaactaaataaaataagttgtgtcagttcatttcattagcaaccaggagaattaatatgagtacacagaccgagggtctaaaacaaaaaatcagtctgcaaacaaatatgagtaacaatttaaacgaggggcctgatcttcagcacaaatattgaagtcagaactttcaggacctggtgaacagaaggcaagctttgaataatgttggccaagaagaacaatctcgagatcaggaaatgggccaatagtgtgccctctgtgaaccagagagcagccctcattgtctgctgggaaagcatcctcttcaaaggcacttctggaggaaccttagccactccacagccactttcagggatcagtgtggagaaagattcatagtcaggttgtgggtgcctccgcaatgggatgactattgtttgcatcacctgaggggtggaaagtgaccactggctgggagaatgcaatctcagagattggtacgtaagagggaaggaaatgcagagatggtagtttctgctctgtgagctgctcagcccctctcacctcctattgcttgcaggggctgtgatcaaggttgcaagaggatcagtagggactgagtctcctcattgagacttgtaacaacttcgcatttgacaagcgaggaaacaggaagtagggggcttagatggaaacatggggcgggggatggtatatttaagacttcaaagggcaagtatttttgccaattcaggttccccagtgactgaagatgttgaaatgcgtttcctgtgttgctccttttctgtgttgaccagctctgtaactcatgacacctgcagtctgctgcagagctctgcatcctgacaatcagaacaaaccatgcatctcacagtcctacagtagaaagctagggtcaattagttaccaaaattgatacttattatggggagaatttataacagaatagatggcaagccatttttacaactctggctatgcccttggattgcacaggcaagattaggaaattaataacatagttgcgctccatctatcttttggaaaacacatctaatttttccccttagcttcatttttatgtttccactttgtgcagatcttttacttgctttttcctccctctcatttaactcttaaaagaagaacgggagcaatgttcccacaagaaagttagtacttttcctgctcagggcatcccatgattcaaaggagaaaatgttcaggtgtttataagaacacctgaccatttggctgcacctcaagaactgggatcaggaggtctgagtccagagaaggaaaataaccagttggatcagtgggcgagagatgggagaataaatagggttgtgacaaagagaaggtcagctgtaaatgggtcaggagaccagagtggacagagtaggccctggaatgcttgctcggaggcctgccatgaaggatttctgcttgcttccccaccctaccccgggggcaggatgactcagcacttcctattgttgtgaaggccaaccccaggaggccctaccaaggctgactgctgttaaaaccagactgcactccttctggctcctggttcattcaaggtctacatagttaaaggttgttccagagggatgtgtgtaattcctcccagtatttgatgttcctttattacttattttcacttgagccaacagcctgaactggtcaggctttgggctgatgccagctgctttatctggtagcactgttacataaaattaacatttattggtgatcactaggtg

SEQ ID NO: 39092 - DNA, 2300 bp, Homo sapien
cgtttccagggctggaacctggatgttaggcctaggtgatgtgactccagagtggcaaaactgttgccttatgtatagtataaattgtttctggatggtgaagagcctagggttataaaagttattgagtctacaattctgtgagacatctcattctgtataggccctgtcactgagttgcagtgtgcctctagatacaaggagtcagtgtgagctgcttcctcccccacaacctgcctccgtatttggtttctgtgctctgtgcagtttactggctgcttcaggattaaacaaagtaaaagcaaccctgaaatgttgcccattaaatagcatctttgagtaggccgtgtggggaggtaataagtgccattagggcattattaggatgagtgtcaaagagttgtgaggaggaagaaacttctggctggaggcttcaggaaggtggcagcatgagctacatcttgaacggtggataaaatttcttaaggtgaagatgggaggaaaggcattacaagaacaggaaagaatatgaatgaggaaatggaggtaggagaagagagccgtgtattggaaatgaaaagcagtcctgtttggctgaagaacaagaactgtatgaggaagcagtgaaagatgaggctggaaagggagtcagggccaggctaaaagggttggcatttaaagttagtcatgggagccatggaatgtttttgagcaactattaaagcaggtggattagtaaaatagggaacacacaaataaatctggcagcattactgtgcatgaaacatggatgaaaagactgggagatcgcttaaaatgcccaggcatgaactgaggtcacatgtgatcacagaataggacaggaatttaagagtgctattttaaaactaattgctttgcgggtggggagggggtggtgcatcaaagggaaaaaagactatgaatttgagttttggaatttaacatatgggaggataataaatagtacagtgaacaaagggaagacaggaagaaggaaatatagtattcgtttcagagatgttgggttgaggcacaagtggaacattctggtggaaatttgctacaggcaattgaaaatagaatagagctcagctgagaggtggagtggcggatgactcacctacattgaggtgagtcagggactttgatctgtcataagcatagtatatgaacctaataacaggctctaaatactagacaaatgtcctaacaaggaagacagagatctaggagtgccttgagaaaaaaggcagcactgcgattattgatctgtataacttgtgtttgttttaccagctgtgaaattctcagaactggcaggtagtattgtcaagggacacattcttgtatagaaacccacaacgctgaatcgtcatatattcctagtctagaatctgagatatacacgaactccacaactaagtagacgaaagcatccctttttttggggggggggggggatggggggcacataaccctgaaccacggtccaattacaggtacagtactgatgatggcttaagtagttcatggaactagttaaaactaaaaccatggaaatgttacccaggagaggtaaggctgcgtgcctggcaggtgccgcagggaagtaggggaaaggttaaggagaacaccagcctccggagaaagagaagcaaaggtgattgcatagctgccagctggaagccgactctcgtcatagggcatactcgccccactgtgcatcgccggtgcctacctcacccagttccaaggcgggggcgcgccgaggcaggggtggggtcaccaggagaaaagcaagtgggcagaaaagcccgttgggaagagacggctgggaggaggccccggccccagccttactacgtttcccagaattcagtgaggccacgaagacaggctccctgggcgcggacggaagactggccgcatgggatttgtaggtaggatccgcgccccgcccgacggaggcgtccagtggggaggtgtgcagggattggttgggaagcgctcaagccccgcccacagagtgacgtcaggtggcggtattgctacttaaggcgtcgtggcctcccctgccccgccttagctcccgcgctagagagaaacatgtatcgttttcgatcacagctcttcacggggatttctgctgccgccaccgcccactcttacccccgccgcttctcgactctgttgttagccgaagactcgcctctcagccgcccgccgcacagacgcacgagtaaaaagtgcagctccatcggctgatcctcgctaagctc

SEQ ID NO: 39093 - DNA, 2300 bp, Homo sapien
atttttctggttttgtaatttgtactcctgcttttttactgggcttttgggaggaagaaggtatagagtgttaatctgcatgttgaatttatatgcaggtgactttattcatgaaacttgtggtaactgctagacaagggtggctgggtgttcaatgtgtaagaatgcttgtgttttcttgaaagtagaaaaatgttgtgttatagactagttgttcattgcttgattcttgattaattttgcccgctttcattattttgaggctcaagcattttgaagtattcattgtctgtgactcctctttgatgggtactaaatttcctgggagtgaatttagataccctgagatgtaatatatgaaagaaaaagcaaatacttgagaatgtccctagattagacacttcatgtgagaatatctctttttgtgacccaaaactctttttttttcttttgagatgaagtttcgtttttgttgcccaggctggagtccaatggtataatctgcctcagcctcctgagttgctgggattacatgcatgtgccaccacacccggctaattttgtatttttagtagagatggggtttctccttgttggtcaggctggtctcgaacttccgacctcagttaatctgcctgtctcggcctcccaaagtgctgggaatacaggcatgagccaccgcactcggccccaaaactcttcttaaaggtggtcttgcaggtatgttatagttaaaatgaagtaggttgtcttgctttgttcttaagtggctttccagaagtctaactggtctaaaggcagtcttatccccctcactggtgtatagttcaattcagacttgaatgcgaggtatgggtttacatctcatctctgccacttataatcagtgtatccctcaacaattaaattccttagtctccatttccttcctccttcaggggaagttaatattccacaaagttagaagttacaggagaggaaaagtagtaaacgccccaaaatgaggcagttacttctattatatcttcaaaggatacatggctcaaggcagatcaggtagttgggagatttcttaaaaacagcataatagctaacatgaacattttcattattcagagaaatttgacatagctttttaacgtatgtttctgagaaaagttactagttatattgtcttcctccaagaattagtctttgggtacagatgaggcttgaaaaaatgacattccctcttagactaggtagtgtgaagggaaaaaaaaaatgacattcctcttcccccaaagcagagtgaggtccgtatgggatataggtgtaaagaaaattttgggccgggcatggtggctcaagtttgtaatcccagcactttgggaggccgaggtgggtggatcacttgaggtcaggagttcaagactagcctgaccaacatggtgaaaccccatctctactaaaaataaagaaattagccagctatggtggcacatacctgtaatcccagctacttgggaggctgaggcaggagaatctggaagcaggaaggtctcagtaggctgggatcatgccactgcgctccagcctgggcaacacagcaagactctgtctcaaagaaaattttgtggaacacctattttctcactgacatgaaaaatgtttcaaagatgaataatgtccatcaagctatggcaatggaagtgaggatgataaaggattgcacagttgttcacaacctcactgttagtatcctgctgagatagttggtctcctcatcactgtagcatcttttatgtacagcagagggcagaagctccttggcatgtatgtgagggaaccacatatatggaaggctgttattcctgagaaaggaggatgtgcagacactcacagaacaaagcctttgtaaaggaaaggcggccgatgagatggagtgcttccttcacctgtggtgggtctgtatccatgaaatcgcccactcacaatcgctttttgtagctactggaagcactaggcgtctgacctgccatcatccttgttatgatgtcataatcatattctgtccgtgtttattgcagttctctggtttgtctggagtgtttgcaagtcagtcatcatagtggcagcttccgcctgctacaggatatttatatatggaagcataccatggcaggagtgctggaaaggtggtgtcagctaacagttgcttcagccagataaggacggtaacttcagtccaataaaaacctcatcagttaccaactaaatcagggcatggtgtttttttgttgttttctttttaaagcata

SEQ ID NO: 39094 - DNA, 2300 bp, Homo sapien
aactgctagacaagggtggctgggtgttcaatgtgtaagaatgcttgtgttttcttgaaagtagaaaaatgttgtgttatagactagttgttcattgcttgattcttgattaattttgcccgctttcattattttgaggctcaagcattttgaagtattcattgtctgtgactcctctttgatgggtactaaatttcctgggagtgaatttagataccctgagatgtaatatatgaaagaaaaagcaaatacttgagaatgtccctagattagacacttcatgtgagaatatctctttttgtgacccaaaactctttttttttcttttgagatgaagtttcgtttttgttgcccaggctggagtccaatggtataatctgcctcagcctcctgagttgctgggattacatgcatgtgccaccacacccggctaattttgtatttttagtagagatggggtttctccttgttggtcaggctggtctcgaacttccgacctcagttaatctgcctgtctcggcctcccaaagtgctgggaatacaggcatgagccaccgcactcggccccaaaactcttcttaaaggtggtcttgcaggtatgttatagttaaaatgaagtaggttgtcttgctttgttcttaagtggctttccagaagtctaactggtctaaaggcagtcttatccccctcactggtgtatagttcaattcagacttgaatgcgaggtatgggtttacatctcatctctgccacttataatcagtgtatccctcaacaattaaattccttagtctccatttccttcctccttcaggggaagttaatattccacaaagttagaagttacaggagaggaaaagtagtaaacgccccaaaatgaggcagttacttctattatatcttcaaaggatacatggctcaaggcagatcaggtagttgggagatttcttaaaaacagcataatagctaacatgaacattttcattattcagagaaatttgacatagctttttaacgtatgtttctgagaaaagttactagttatattgtcttcctccaagaattagtctttgggtacagatgaggcttgaaaaaatgacattccctcttagactaggtagtgtgaagggaaaaaaaaaatgacattcctcttcccccaaagcagagtgaggtccgtatgggatataggtgtaaagaaaattttgggccgggcatggtggctcaagtttgtaatcccagcactttgggaggccgaggtgggtggatcacttgaggtcaggagttcaagactagcctgaccaacatggtgaaaccccatctctactaaaaataaagaaattagccagctatggtggcacatacctgtaatcccagctacttgggaggctgaggcaggagaatctggaagcaggaaggtctcagtaggctgggatcatgccactgcgctccagcctgggcaacacagcaagactctgtctcaaagaaaattttgtggaacacctattttctcactgacatgaaaaatgtttcaaagatgaataatgtccatcaagctatggcaatggaagtgaggatgataaaggattgcacagttgttcacaacctcactgttagtatcctgctgagatagttggtctcctcatcactgtagcatcttttatgtacagcagagggcagaagctccttggcatgtatgtgagggaaccacatatatggaaggctgttattcctgagaaaggaggatgtgcagacactcacagaacaaagcctttgtaaaggaaaggcggccgatgagatggagtgcttccttcacctgtggtgggtctgtatccatgaaatcgcccactcacaatcgctttttgtagctactggaagcactaggcgtctgacctgccatcatccttgttatgatgtcataatcatattctgtccgtgtttattgcagttctctggtttgtctggagtgtttgcaagtcagtcatcatagtggcagcttccgcctgctacaggatatttatatatggaagcataccatggcaggagtgctggaaaggtggtgtcagctaacagttgcttcagccagataaggacggtaacttcagtccaataaaaacctcatcagttaccaactaaatcagggcatggtgtttttttgttgttttctttttaaagcatagttttagtaatatatttactaaaaaccttagacattatgaaaaaagtcaggatttggaatcttacactgcttggctaaattgacacaatatagaccaacagtttcatcctggggcttatgggtc

SEQ ID NO: 39095 - DNA, 2300 bp, Homo sapien
atctgattgaaaactattttgctaccatgggccattctcatcaatattttcccacaaagctttatatttgaagtctattgcaagtaagtatatccttgtttttgttcatctatctgtttatttttaggaactgaagatgcttatgaagtcattagtatcatggactgtaaaaatcaaacactgtgtaattctcagaatacaactagacactgctctcatgggaaggagattgaactatgtgtcttgcgtcttggaaaaaatgcaaagcgactcactaaccatgaagaaacagcaaattaggaagacaggatgatcaatttccttgtcttattaaaaaataaagtctgctttcttttctctctccttttattctctagtgacacatttatttattgacagtttggacaaaagtttatcaaggaacttttcacgcttaggatgaattacaacaagaaccaacatttctttagttccagcaggtgagagaatacatacctgagaaaccaaaagaatagctgtcctgtttgggttgtaggggaaagttttgggaattgtgaagtaaaggagggaaggatctgggatgacaattacagtgtgagatacattgataagggcagatgtgaaaagaggttatcaggttttactgtagattacaaatggagttttccctcagtgttttgcaggagattttggtaaagaattagcttttaaatgtttattttttgttaaaatctttgattgtaacattttagcgcttgcattactaaagtgaatactttctccagctctacccagaccagacctgaaaaggtaggaaagtgattcttggagcctgggactcctttccattgttcttgtcttctactacgcctatgatacctgcagcccagtacctttcctccacagttccctgattccactatgctagcttccctttgaaaccgctgtgttaaatttttaggaaaatacgggatgatggaacaattctaatttggatagaaaagagtgcctacccacccagtagtatctgtattttattattttttcttttctttttctttctttcttttttttttttgagatggagtttcactcttggcgcccatgttggccacaccatcttgggtctcaccatcttggccaggctggtctggaactcctggcctcaggtgattcacccgccttggactcccaaagtgctgggattacaggcgtgagccaccgcgcccagcctgcattttaaataggaagcttattgctagtaggtgaatttcagactacataactaaagaatttaaggcaaatataggaggatcagacaggattctggctggaaactgatgagacattggaagaagttcacaatataagggcggggctccggcactgaaggaggggtctggaagcgctgcgggcaggagcaatgaagggaagaaaggcttcaactgacccctcgacctgaaggcccacagccgggaacaccggcaaggagaacacaagagaatgcacgggaaaacacaagtcaaaaacaatggtttgtcttttattattattaagaagatggaggaggccgggcgcggtggctcacgcctgtaatcccagcagtttgggaggccgaggcgggcggatcacgaggtcaggagatcgagaccacggtgaaaccccgtctctactaaaaatacaaaaaattagcagggcgcggtggcgggcgcctgtagtcccagctactctggaggctgaggcaagagaatggcgtgacccgggaggcggagcttgcagtgagccgagatcacgccactgcactccagcctgggcgacagagcgacactccgtatcaaaaaaaaaaaaaagaagatggaggagcagcagtaaggcttatcaacggaaatattcgtactgatgagcatagaggaagaggttttgtttgcttgtttaagaatccagggtggcagcagcaggccctgcttttggggtagaggtggccagctagaagggcattgtaccttccctgggtcccgccccttcccaggtgagctgggtccctttgtgatgatgatgaaaatgcctaggagggggatatgacaatgactcgctcctaccgcctactccagtcctctccaccccaaggtaggcagcttcccgctcctcgtcttgggacctaaacccaggaagtcaaatgtccttttctagcaggtcgcctggttagaggccgtggacgaagcggtccaggcacagccagctgcagggcgcggcctcggcggcgctgctcgtggccctggtcagtgagcgcactcactcct

SEQ ID NO: 39096 - DNA, 2300 bp, Homo sapien
atgtttctcttgagccttttagtgtacagctattaagaaagtacaaataaactaatcaaaaactcgtgggttttttttgtttatttttggaggcagagtctcgctctatcccccaggctggagtccagtggcgtgatctccgctcactgcaacctccgcctcctgggttcaagcgattctcctgtctcagcctcttgaggcattacagatgcctcccaccacacctggctaatttttgtatttttagtagagacagggttttgtcatgttggccaggctggtcttgaactgctgacctcaagtgatccaccttcctcaccctcccaaagttctgggattgcaggagagagccaccgtgcctggccctagtttctttttaaatatctgattgggttctctttagatagcattaccgtgaaccattgatcagttcttttgaaacagtatactaggaaattttgaagaattattatagatggttaaatcattttttgactactatcattttttaggtgtgacttgtggaagctttaatttcgtgggtccactaacaaatacttgtagtaacgtttgtttaagtagaattgaaaagttcttcatttactttataatgactattagggtgagcatttcagtttttcatttttgactcggaatttgtcaggaattggtttgctatagagatagtgtttagatttggaaagcaagtttagtaatcaaagtaatttaatagagataaaagtacagggagaattatggctcaactttagggactgagtaactttaatactttaattctagtaagtttattagttaaacaatgtaaagaccttgtgtaacattctagagctggcttgtaaaaagatgtaggggatatttggcaggtcgtaatggttgctgttactactaatatatacaagtgcttttcaaattagaggtaacgatgaagtccttcattcactttaagaactaagtagctttctcttgtaccaaaacctgctacaatctaagctaaagcgaacatttcacctttccttgttgttgaaaaaccagatatttaaaccagaatgaattaggtgaattcttcaccatctctggaagaacagttctattcatgcagtcatagcatatgatgagtagaaagcacagccatgtctgtctggataaactgccaagttttaagccagaaacagtattcattaagatattgcaaatcaggttgtaaactggatttcagtttttaaactggattttttcactttctatatgcatctttatataaaataatgagtaaattatataaaattaactctgaaatattgttttcttctttttagatcactataaacaaaatttccacaagagaaaatgttgaaataggagttgcggatacattggatatactggatgaaatacaagcggttaatttttgtaacgtgagggaaaagcccacattgctggttacatgtgtaaatcactgcgttattgctttagtcattgtctctatttagcaatgacaagactggaagaagtaaatagagaagtgaacatgcattcttcagtgcggtatcttggctatttagccagaatcaatttattggttgctatatgcttaggtctatacgtaagatgggaaaaaacagcaaattccttaattttggtaatttttattcttggtctttttgttcttggaatcgccagcatactctattactatttttcaatggaagcagcaagtttaagtctctccaatctttggtttggattcttgcttggcctcctatgttttcttgataattcatcctttaaaaatgatgtaaaagaagaatcaaccaaatatttgcttctaacatccatagtgttaaggatattgtgctctctggtggagagaatttctggttatgtccgtcatcggcccactttactaaccacagttgaatttctggagcttgttggatttgccattgccagcacaactatgttggtggagaagtctctgagtgtcattttgcttgttgtagctctggctatgctgattattgatctgagaatgaaatctttcttagctattccaaacttagttatttttgcagttttgttatttttttcctcattggaaactcccaaaaatccgattgcttttgcgtgtttttttatttgcctgataactgatcctttccttgacatttattttagtggactttcagtaactgaaagatggaaaccctttttgtaccgtggaagaatttgcagaagactttcagtcgtttttgctggaatgattgagcttacatttttta

SEQ ID NO: 39097 - DNA, 2300 bp, Homo sapien
tacacacatctcactgaagtattctaaagtataaggacaagataacaagcatcaaaaatggttttaaagtcataaggcagaagaccatgttagaggaagatgatgaaaaaccactgatttagtgagctggtcttagtgctaagcaactgaatgcagctgtagctaatttaagcagaaagtaagtttactagaggacgctaagtagttcaaaggatagctggagattgaggcttgcacctacatggccagaatctaccttggctgttaccggtggaaggtgtccaggttcttggcatcttgaacaaggaattagacaaaacgcacaaacaaagcaaggaaggaatgaagcaacaaaagcagagatttattgaaaatgaaagtacactccacagggtgtgaagagccggaacatggggctcaagagcggggcggccgggttatagaattttctggggtataaacaccctctagaggtttcccattggccacttggtgtacaccccacgcaaatatagtggcccacaatcagtctgatagcggaaagcaaccaatcagagcctgaagcgaagttacaaaggttacaccctatgcaaacatttaattagttatggaaagcaaccaatccgaggtactttcaattttccgtctgccacgcagaaaagggcggtggtgggggagggggccgggtccctttgttacttagctgtggaaagttggggctttccttttgatttagttctagaaagtcagcatgaatcagccgtaagttccttgcctccagaccctattgtcctgcctcacagctatgtagtacagagtctgtcacaggctacccagaaatgtacacagagactgttaacaggctacagaacagattgggaaagggctctggggttgtgaccctcaccaagcacaggcatcttgcatctctgacatgttaatggtggatgccagcactctcactactgcctcggaagcttaccttgctgttagggatgggttctcgatctctacacttgctatactcctacaggtgacctgggagtgtagctttctgtgccttttttgactcatggcttccagcgggtacacatgattagttaaacaagtgttcagcatttcagcggcagccattagactcttaactcaggtggggaattctccaaatacggaaggggattcaaatggggggcataataaatgtatataaatgtccattaaaggcaagttgagttggaagtgatgacaatatatttgagtagaaacatctagcaggtagttggaaatgtggcactcgtgttccccagagagctagttacagatttgggaagttgagttgtgattgcttttaaaatcaggagtctagagagaatctaactcaaaattttcatccacatatgcagaatctcaatctgagagttgttcattcctatagatgtgctggccacaccaacccccaacatctattatgaaaattaggaaattcacactctattatggaaaataggaaaaatatatagataatacatgcaaaacaagtgggaggagagaactacggatcgtggagagcctattgcatattattattttacaaatatttaagtgccaactatgtgtcaggcactatgctaaggtgatttaatgttgagcaaaacccgacatgtccctgcatttgaggaactgaaaggtctgagggagggcctaaggagcttgggccttagctggttacaaagccatatattatgccatatatattaatgagcagcaacgcctcccgcagtatttacagcccacgcgtggcagtcctgtccaccctgtccccgttcggtccagcccgaggcggtggcctagatgcttgatgggcactgtcagcctgatctttggtggtcttcccgctgtctgttctcagctgctgattccaggtcccaggagtcgactttggcttgaggaaggcaggcgccttaggtggggcagttgacactcgcgcagcgccttgctcacctgagtgtgtggcggcgcgcgggtttgggcggggagggggccgggcctcgggaaggaggcgcgccgcgcagtttgaccccggcggcgttccgtaccgtcgcggatttcggcggcggaaacatggcggtcgcggccgggccggtaacggagaaagtttacgccgacactggcctgtattagcgcgtatggcctcgggccctcgttccccaaggcgtgccgcctccctgttctcagtcgcaggctgaagccttgtctgctctcctcctttttggtttggttttggaactgactccgagggt

SEQ ID NO: 39098 - DNA, 2300 bp, Homo sapien
aaatctcattaatgactttgtaaattgtaatacctacctttggtaagggtgcaatgaaataaacacccataggtactagtggacatggcataaactgctactatctttcagaaaaggcaatttcataatatacatcaaaaccctaacatgtttgaccctttgcttcagaaattgaacttttaggaatttagcctgatggaatgtataattaaagaaatggacaaatacttgtgtgcaaatgtgtttgtcatgacattatctgtaatacaaaaaagctggaaaaaacataaatctacaataactgggaattggttaatgaaatagtaggctattcatacaatagattgccacataggcatcaagaaatatcctatttgaaattagtatatacaaacaaagaaaaaatgttaagttgttatctctcagtccagatgtcttattttctttactcttttctgtattttccaaatttccttcagtgaacatcttcagttaagaggccttaaaagttcatttgctagtattatgctgaaaagttcttttttaaaaaataaaactacagttcagcacaagtgaaatttaatgctctttttactatcattgtatctttcgaatatctgcaccattatttgccttccatatgtattaaaatatggaaagagccaaaagagacatgtaattcaagctcccctttcttcccaaatgaaattcccccaaataagaccaccatattttcaatttattaggcacttccgcttaacttctcttcataattataaggagttcttttgaagtttatatgtccttgtctttgtgtttgatctgtctcttcactgtgctgtagggacacatcttccgcctttaaattccatcaatctcccttcacctcccgcttctcctgtgtcctagacagtgtgtataattctttgctcttcagcgtattcaatataaagaaggtagcatataaaacagttacataatgcaagctttattcgtagttagaaaatcattatcaaaatgttaccattgcaatcatttccatagactgtcacgtaaccaacacctgcaatggggaagtggtacacaatccaacacaactcattaggggctctcagtctattcaatctctgacactccagcagcctcagtaccacttcaggagccaatgcagtctacctctctccagagagcagtgttccacctttctgggacagaagtcaacaatcgcgttccccaagagatggaaaagaagtggaggagggtgaacaggttaccaaacccacttagatacactccgcatagactaactctccaaattaaaggacaggaggtcacctgagctgaccataaaagctcagagtgctgatgcgaataagatcagggaaggctgcttattaacaccgtggtcactacaaaagttcttgagggcatctgctgtgagttttccatcgttccttattgtcctcctgcatctcctgttgcttttcttggccctctccttttcgcattttctatgtcctttgcccagcagtagtactgcaggcataaaccattgtcgacctgagaattaaattagcatttggtagccagacctctccttgagccttagaatgcttgtgtgcttgaggtccctgaagtgtaacgtcatctcaaagcgcaagtaactaaagggaacctacatgtgacaaggtgcagcggaggttcaagcagagcaccctggccgcatcgcaacagattataaagtgtaggggatgaaaatgatggaagacatcagaaagccgagctgtaaaaaagcccaaactaagcaaactgagacgcgcaagcgcgttgctcacagctcgtctcccgaggccgagccacagcgcctgcgcacagaatccggggagggtggggaagagatgagcacccaggcctggagctcccactgcctcagcctccctatccccgcaagctccgcctcctccagctgctcgccttcccaaacaaccgggttcgccgccggcgctttctgcccattggcccttagccttttccgtttccgcccagccctcaaaatccaccaatcagtttgcacttttgggtgagggtccacctccaaggctgtcgctccggttcctctgcctcctctggctgctgcctccgcagctccctcctcctaccccacctcctccatctggggagcgtctgcgggggcctgaggggcggcggcggcggcggcggctgcgatatggagccaggggccggcggccgaaatactgctcgtgcgcagagggccgggtccccgaacactccgccgcccc

SEQ ID NO: 39099 - DNA, 2300 bp, Homo sapien
aaaggaaaaaaatagctttactataccctgagatgtggatatgaaagaatattgcatacacatataccctctcccttatttttaaggaatcaatatctgcttaaagaataagactagttaaaacccttggatcttggccctataacttttggcagagtatattactgcttcatggcctggcagtgcagtgactcttttaatttactttaaaatagcttttccctaatctgtacaacctaacatctgaccaatcatgaatcttcagcaaacttaagcctcttattccatacattttttaaaactgtaaaaattcaggaaataactctttgcaaagtacattgaagcatttattgggaagcaaaaaagcacaagttgaagtgatttgtagtttcataaaaacgaatttgacattttacttagaagttgcaaaccaccacatggttttgagttttgaattcatttgctttgcaaaaagtggaatgttttatttgaatggaaatgccctcaagttacttccagcatggctgtaggattgatttttctaggttaagggaatgccaaagtttagtgccttgtgtatattcttttcgaaaaaaacaaactattatccatgtatttaaatggacgtaggaaattcaagaacaaatcagggaaatttaacatcatttcagtattaccaacatagggctttgtgtaacgactgtgacatcaagataaggctttacctcggctcatccaatagaaatacagtatgtaaattaacccatattatctgtatgctgattggcctgagttcccctgaatgtcacaatctcaccacccagcaatgaggtattttactgctgtctcaagatcagattattactgtagagaagatttttattttttgtttcattaacagattattataaagcaaaaagcatgcagaaaaagaagcagacgttttacattgggaattaatgaaagcgtgtctgctagttttgggtaggagaactgggaagttgttgcttaaaattttatatcacctccacaaacaaaactcttcggaaatggtaaaataagaaaatgcatgattctagaggcattcctaagcacccacgtgtcaggctttgtggtgtctgtggtatcatccgaccgtttggactggtgtaagttttacgtatttgttatatttctagtatttttcatctgtaataacaaaggggaaaaaaggaaactcgtacacataactgctttgacatcacccatcattggtcagcggaacttgtaagaagggaaaaggaatactgttgcttggtggggtggaatgccaggaatagccatttaaacattttataagcctgattctttagtgacatcctttaaggtagactgaatgtaaatcatattgtagttgtcctctgaacttagctttctccctacttttacgcatatttgcgtgcattggagaatagaagatgactaacaaagagagagctgccctaacgtgccttcccttcttccccattgaaaagatttttaactgtgggaaaaagataaataaataaataaataactttttttcttttttcccattcttttcttgtctttttccagctaacctgcaaatttaaaggttagctggagacatcacttaaaaataaatatataaaagaagcctccggtggtttggaccaccctaaaagaaaagggaagaaagtgtctggggaaggttagggttccgggaagctgagggagggggcgggcgtcacgggcactgtgacttcctcgtgcgctgcctttgggaagaggatgggcctgaggtcctgaaagggcctttccagccccccactacaaatgcggggagggaaaagttcagaagcagccacgaagggacaaaagcttaatgctgccagttggattggacagggcagtcaataaacccagccagctctggagtcaggtaggggttcctgctggttccacagaggctgaagcagccccgccgccgccctcgccaccgcagccgccgccgccgcggcccctgcgttactgggggagacggtgccgctgcgacaggggaggacgcggctggagctcaaggaggctccagcgcgcaggcgccgccgagccctgcctggatgctcagtcaaggcactaaggcaaaaaaaaaaaaaaaaaaaacaaaaaacaaaaaaaaaaaaaaaaaaaagaaaaagaaaaaaagaaaaaaatcagcaatttatagaaagaagctatagtctgtcgggatatccaacaccaacaggtaggaggatatactcttggttaagtttggggga

SEQ ID NO: 39100 - DNA, 2300 bp, Homo sapien
aggattctctatttaataaatggtgctgggaaaactgaccagccatatgtagaaagctgaaactggatcccttccttacaccttatacaaaaattaattcaagatggattaaagacttaaacgttagaccgaaaaccataaaaaccctagaagaaaacctaggcaataccattcaggacataggcatgggcaaggacttcatgtctaaaacaccaaaagcaatggcaacaaaagccaaaattgacaaatgggatctagttaaactaaagagcttctgcacagcaaaagacactaccatcagagtgaacaggcaacctacaaaatgggagaaaattttcgcaacctactcatctgacaaagggctaatatccagaatctacaatgagctcaaacaaatttacaagaaaaaaacaaacaaccccatcaaaaagatagttaaagttttaaagaaaactttaaaaaggctctttttcatatacaactttaaattttggtaacagttgagagcaccaaagacacacgttttatgctttaagcagaagacatgtcatttgaaatgaattactaaaaatcttttatttagaatgtttattctagtctattattctctgcaattaccaagtgttatttcctgacacacactttcatgtaaacaatgcacagaaaaaaacactgtttttgctgatcatgatactatgcatcagttggcaaaaatctgaaatagattaattttgaaagcaaggtcattggtttttaaaataaaatggtatgtactttttataagaaccaaattaagcaaattatatcagttttcctaatacactgatcaatatagtacatgtaatattccaacagtttgtaaatcttcagaacccttcaaacccaaggattagagcatatagttttgttgtatttgctttgttcttttactcttaacctgaaaatcaaattttctgggtttggtgatgtaggggataaaaaaaaaagaaattagttaagaccaactaagcctatgatctaaacaatttgaagcaataactttacatttgagaacttgtagatgatatgaaacttttgtcagctattaaacatattttttaaagccctgctgatgaaagatgtagcttccaatgttttctccagtagagttaatgagctagatagaaaatatctcattaatttcttgagtccccttgtgaggcaagaaaatgacattcttatccaacagctggaaaagctgaagaattagtggatgtaactgtgctcaactgcaaaggaaaaaaatagctttactataccctgagatgtggatatgaaagaatattgcatacacatataccctctcccttatttttaaggaatcaatatctgcttaaagaataagactagttaaaacccttggatcttggccctataacttttggcagagtatattactgcttcatggcctggcagtgcagtgactcttttaatttactttaaaatagcttttccctaatctgtacaacctaacatctgaccaatcatgaatcttcagcaaacttaagcctcttattccatacattttttaaaactgtaaaaattcaggaaataactctttgcaaagtacattgaagcatttattgggaagcaaaaaagcacaagttgaagtgatttgtagtttcataaaaacgaatttgacattttacttagaagttgcaaaccaccacatggttttgagttttgaattcatttgctttgcaaaaagtggaatgttttatttgaatggaaatgccctcaagttacttccagcatggctgtaggattgatttttctaggttaagggaatgccaaagtttagtgccttgtgtatattcttttcgaaaaaaacaaactattatccatgtatttaaatggacgtaggaaattcaagaacaaatcagggaaatttaacatcatttcagtattaccaacatagggctttgtgtaacgactgtgacatcaagataaggctttacctcggctcatccaatagaaatacagtatgtaaattaacccatattatctgtatgctgattggcctgagttcccctgaatgtcacaatctcaccacccagcaatgaggtattttactgctgtctcaagatcagattattactgtagagaagatttttattttttgtttcattaacagattattataaagcaaaaagcatgcagaaaaagaagcagacgttttacattgggaattaatgaaagcgtgtctgctagttttgggtaggagaactgggaagttgttgcttaaaattttatatcacctc

SEQ ID NO: 39101 - DNA, 2300 bp, Homo sapien
gtaactaaagtaaagtgctttaagtatcattggtgccattgatctctatttcagtaaaggatggtgtaggtgcagatttgtttgaatcgaaagactaaattatggattctataaccctagacacttagtgtcaaaagaacaactacatagaagcctgtagaaacattcatacagcttgggaaaaatgggagtgtagcattgcttcagaaaattggtggttcacattgctaccagagatgttcacaggcagaacttgtagttggcagatgacggacacagaagcagcttctcatctatcatcgccttttttagaagagagaccaaacatgtacaacatggcagttattatcctggtcagcaatctagccaaaatatctaacctggtttacagctaggaaataacagttcactgagatagagtgaaggcatgttaaaaatcacacagtaggagcaggtcaaagcagtgaaggagattatcatattcatggtactccagaaattaatccttgcaactacatcagctattactggaaccccgcccccgagatcgacatttcccaatataatatatatttcacaaactaataaaaaccatcataatttaaagagaaagtttcttgccacttacagactctttaaacttaaaaccaaaccattatctttaatgttgacgtgcctagaaacaagtctgtaacaatactaactttaaagtagtctctgctgacttcagctaactaaaataaacacataaggaaaaataaacatgtagggaaaaacaaaatgttcacagtaggatatgagagaatattttggaagctataaaaatataactcctattccaaatataattgattacaaaggcacgaaagtagctcaaaacaaaggatgaaatgaacaaaaccttgttaaaataatcaaggttagagaaacaatgctgacgttattgtgcagttattctcagatttccaattttctagtcaccttggtttggtttatttggcacctctcggtctctcataagatcttgttggcatatttatctagtcaaatcattattattattaggcaacattactgagcacctgctgggtgccggttaggagccaagaatataaatctttgctagagagactaggaacgtgtaagaaaaagggtaaccgacaacacaagaatacatgctaattattggcattgaactgaacgtacctgcattatctaacagactgaaccaggggactttcagaccaggcaggtggcttcacacccaaccctcatcattaataatttataatgtaaggatagcaaataaattttcaaatcagtaaatatgaaagagttcagaagatcagatgactagaaaggttcagtaaggagttcacaattagcagacaattgaaagagcgcctttcagaaaggttacgacttacatatacaaataactaattcttgttttatgatttaaaagcagtatttttacatcttttcacaaatatgtagggacatttggggctgaggtttcacaaaaacataggtgggaaggaatcaccgcagtgcactcctgaatagattgtcactttaggacctgaatcctgagagatcttctgcaacagggctaaacccatttttcctaaactttattttgcactacaaatgttttttaaccttttacgatatgtcttattaaccgcgctttttccccattgactaaaaaattaataaatggcatatgtttcattaggaagatggtgacagagatttcctgcttcagaaacgttggaagccactggtttaaaagcacccggaacagagggctgtacttgggttctctctccccgctgtgtcatttcagtcgaagaaaaagacaaaattacatgtgcgccttacagactcaacagggtagaaaacacttgctatcatttcttttattttgaagtgagcttttatataaacacacgaaaccatctatttaatagtaaaacgttgggcagggaaaggaagtcccgcgcgttcgcgactcttcgcctccgctagagcgtgaccgtcacgccctctgctacttatagggggaacgcgccggggcatcataggagtcggcggcggcagggattgtgggaaatgtagtttggagactccgccctcctcgccattcctgtaatggctgcttcctagaaggtaatgtacgaactcgtctccaaaggatacttaggttgcaccagtgtatttgtaaaacaggagcaaatttggaccttgccgggccaaagtacgaattctttttcaaatcttaatatcaagtcctgaaa

SEQ ID NO: 39102 - DNA, 2300 bp, Homo sapien
gaatcaaatagacgcaataaaaaatgataaaggggatatcaccaccgatcccacagaaatacaaactaccatcagagaatactacaaacacctctacacaaataaactagaaaatctagaagaaatggataaattcctcgacacatacactctcccaagactaaaccaggaagaagctgaatctctgaatagaccaataacaggagctgaaattgtggcaataatcaatagcttaccaaccaaaaagagtccaggaccagatggattcacagccgaattctaccagaggtacaaggaggaactggtaccattccttctgaaactattccaatcaatagaaaaagagggaatcctccctaactcattttatgaggccagcatcattctgataccaaagccaggcagagacacaacaaaaaaagagaattttagaccaatatccttgatgaacattgatgcaaaaatcctcaataaaatactggcaaaacgaatccagcagcacatcaaaaagcttatccaccatgatcaagtgggcttcatccctgggatgcaaggctggttcaatatatgcaaatcaataaatgtaatccagcatataaacagagccaaagacaaaaaccacatgattatctcaaaagatgcagaaaaagcctttgacgaaattcaacaatgcttcacgctaaaaactctcaataaattaggtattgatgggacatatttcaaaataataagagctatctatgacaaacccacagccaatatcatactgaatgggcaaaaaagtggaagcattccctttgaaaactggcacaagacagggatgccctctctcaccactcctattcaacatagtgttggaagttctggccagggcaattaggcaggagaaggaaataaagggtattcaattaggaaaagaggaagtcaaattgtccctgtttgcagacgacatgattgtatatctagaaaaccccattgtctcagcccaaaatctccttaagctgataagcaacttcagcaaagtcttaggatacaaaatcaatgtacaaaaatcacaagcattcttatacaccaacaacagacaaacagagagccaaatcattagtgaactcccattcacaattgcttcaaagagaataaaatacttaggaatccaacttacaagggatgtgaaggacctcttcaaggagaactacaaaccactgctcaacaaaataaaagaggatacaaacaaatggaagaacattccatgctcatgggtaggaagaatcaatatcatgaaaatggccatactgcccaaggtaatttacagattcaatgccatccccatcaagctaccaatgactttcttcacagaattggaaaaaactactttaaagttcatatggaaccaaaaaagagcccgtgtcaccaagtcaatcctaagccaaaagaacaaagctggaggcctcacactacctgacttcaaactatactacaaggctacagtaaccaaaacagcatggtactggtaccaaaacagagatatagatcaatggaacagaacagagccctcagaaatgacgccgcatatctacaactatctgatctttgacaaacctgagaaaaacaagcaatggggaaaggattccctatttaataaatggtgctgggaaaactggctagccatatgtagaaagctgaaactggatcccttccttacaccttatacaaaaatcaattcaagatggattaaagactttaacattagacctaaaaccataaaaaccctagaagaaaacctaggcattaccattcaggacataggcatggtcaaggacttcatgtctaaaactccaaaagcaatggcgacaaaagacaaaattgacaaatgggatctaattaaactaaagagcttctgcacagcaaaagaaactaccgtcagagtgaacaggaaacctacaaaatgggagaaaatttttgcaacctactcatctgacaaagggctaatatccagaatctacagtgaactcaaacaaatttacaagaaaaaaacaaacaaccccatcaaaaagtgggcgaaggacatgaacagacatttctcaaaagaagacatttatgggccgggcgcggtggctcacgcctgtaatcccagcactttgggaggccgaggcgggcggatcacgaggtcaggagatcgagaccatcccggctaaaacggtgaaaccccgtctctactaaaactacaaaaaatagccgggcgtagtggcgggcgcctgtagtcctagctacttgggaggctgaggcaggagaatggcgtg

SEQ ID NO: 39103 - DNA, 2300 bp, Homo sapien
gtttaattttaaacattgtactttgacaattaaggcaactgtgggttagaacatctgagtaacattcggaaggtcatccagctagtaagcagcagagccaggaaatggacccaggggtcttcatttccattcctttgctaactaactcctggatagttaaaatatttcagtacattattatatcttaaattttcattatcccattatttacatggctatatgaactattttactaatttccataaagcattttgttgctgatttccttgactacatagcaatgtatttcaggtaccttgaaatatagctacttgtagtcatcaaatctgaaaggcacagacatttccgcagccattacccattcttgagcaatccatgtggtcaccacccattctagctatgtggatgagataaagctcaaataatttcatttctttatccttctagacactagtcacttataattttagaaaataatttctccatccactactttatgcaattcaaattacctaataagttataccatattaatgaggttttcatttgaaagaaattatgctattgggctctttataaaaagaaaaactaatcacctttcacacttcgtatattttttcagtttaattaatagatattttgaaagaaaaccatgctcatgtataatatttcaaacagtacagcagaccataaagtaaaatgaatagagcccccattcctctgccatctttaaattctgtggttagaagtaaatactgctaacattgtcttttgtatcctttcaggagttttctatgtacatatctgtacacattttcttttttatcacttagccatttatcttggttatctttccatattagcacataaagtgctactttatccttctaaaacattctattgtatgggttatttatccaatgctctttcgagagggacatttaacaggtttgtagagactgttaaacgcacaattctgttatgaacatagatctctatttatctttgtatactttcccatactgacagagcaaatttctagctggggcatttctcggtcaaattgtgtgcagttaaatttttataggtttttaccaaaatgaccatcccccaacttgggttttatgacataaaaaaaacgtgacagtttaagcaggctgttcatactttaaaactcatattgaatttcaaggtgtgatggtatcaacttctgctttgtgggcataaaatggccatttgcaaaagaacattttattctacgtagatgtattagtcctggatcaggcttacctttgcccacttatatttgtaaatcaataacatgtcttatctgtattttcccatggcttaattaaaataaatgtactaatgtttaaaataatgaatttgattacttctttgttctaggcttttgcttgggttatttcttctacctggacaatctgccttgctccaaccttgcatgtctaaattccacctacccttcatgctttatttaaaatgataccttccccatctgaatcatgtttccttcctcagaactttcagcacctctatttaacccttttgtaataaagctatacatttataaatccctgaaaatgatagctgtcattattagtaggctctggatctcttcagttctataaatgttcttatctttccctgtttgcacttacctgctccatggattaatttagtccaaactacatattcagtattgtgatactacttttattttatttaaaaaaaatccacattttcatttttaacatcaactaattaaaataatatttttatcctaaagttccaggatttccaatacagcagaacatgatttaaaaatatctgtttggaacttagctcataaacaaatacagctttaaaaactgccagttaaatctgaaacatactggtgggagtagcatggatgctatcatatgcaaggcctttagggggaggctagcagggttgcaggctagcatagttgacacgccattggacctatttatagagctgagttctttttgcaatgtcaactgtaacattatacctattttaagcctcagtatctcaaatgtcagcctctactagtcgtacagttctctcttatttgatatcagagagcccaatggagccttctgaagtacctagtcagattagcaaagataattttttagaagttcctaatttatctgactctctttgtgaagatgaagaagttactttccaacctggtttctcccctcaaccaagtagacgaggttctgattcttctgaagacatatacctggataccc

SEQ ID NO: 39104 - DNA, 2300 bp, Homo sapien
ggtagggccatttggggctggcgttttctaatgataatgactgttcctccttctgtctctgctcccacttttaaaagattcggattatttgtccactgttcagcctgcatttcaaaatagacgatttaaaaaagagtgagaacacagtctgtaggcacagcacttgaggactgccggagttgaaaagctcagggaaagaaccgcaattcaaagtccaactctacctcgttcctcttcctcctggcaggggccatcttcccagggccagccccatggctttttgacttaattggtttcactaaaaaaaccctgacggtgtgtttaccgacgtgggtgccagggctgcttcctccctgggagagccgcgggttctgaaggaaagggttggtgccaagtgtgtgtgtgagctcgcgactgccctttagagaaagggcgcgctgctctttcaggaaaggaaagattcaaaggcacaagttagtgcggttcgcccgtctccccaaccaccaccacccctccctcttctgccaccggaggggttcaagttggccgttctttccccagggaggagggccgggaagcagccgggggccaggctctgttcaccacggcctattggccgcagctatttggaggaaagtttcagcgcctctcggaacgccacgctttgcgactgacttgcgagcaaagcagcgggctcagtctgcggcgcgcggaaaaggcggccggcgaagagtcgcccggcccgcgggcaggggagggaccggagggagacggcggggagggagcgctggcccccctctgggctggggctccggaggaagcccctcgccaagattccggtcgtgcgtcccctccggggcccgctctctcctccctcggcctttcccctgtcaccgccctgggtcccaagcaggccgcccagccgggtcacacccggtggatagaagccgggacccagggctggcggctgggcccgtgcatcccccacgcgggcgcctcggctttgaagtgcgcgcggagcaggctctgaccgtttcttctttcctttctttccggttacttttgctcccctcagtcactgataggacccttcccgaaaacctcagactctctaagtcccagcttggcggccccttccttccaagccgcgccccggtgacctgggctgcgcgaccacgaggaagcccgagaactccttggcccaagtgagacaggaaccagggcaacaatgaagagaaagacactcggcctctctccaccccaggccgcagaggcgcacaccgtgaaaagaaaggccaatcagcgctttaacgcacgctcgggtctccctttccgactaccatgtacttttaactccctgccaccgagggctttggatcccttcgaggctttctgcacttcaagtggaatcccctgtttcatttgccagcagctccgtctgctgagaggacgtactttggggactgccaagaagcagcagacacaactcggctttgccaatacagcatacggttttgttctcgcctccctccccacccccttccctgactcgccgtctggggcgagctggagaaggcggagcaggaggtggggagaagggtgggggtgggggaaggtctggcgtagcacaaacaagttctccagcgggttgtttacatagcaggtggacctgacgtcagccaggaggctccgctgcaaatccgaacaatattcttccccgcgtttccccctccttaaagaagttagggaacggggggagataggtggacgggggagaaaggcatcctaaccagctggttccaaacctatcaacaacaacaacgacaataacaacgcaaagtaaaacaaaacaaacaagtggtccggcggtacttcagaatcctctgcggcgtcctgtcccccaccccgcccctccgaggagaggcagccccgcgagcagtgtgtgtacagttcgcattgccaacaacacgcgcgcgcggccgggtgcgcgcgcctgccagcgcacattcacacacacagacacacagacacacacacacacacacacacacacacagatccgggtggggggagcggctgcgcgagacagcgcgagcctccgagaaagcgcgagacacgccggcgcgtgcagctccgcggccgccgcttcgccctagctctagccccgcgccacccgcagcccgcccgcgaacgcccgccccggttatttatgcggcggccgcgtccgctggctgcggcttcctcggccccccccctccccgggcgcgccccccactcgcggcagcagctgcccggactcg

SEQ ID NO: 39105 - DNA, 2300 bp, Homo sapien
agcctggaggaggaaaggagatgcaaatattttacttaaaaaaatgaatttacatatttataacaatatttttgaatgtcagaggtatcaatttttttaacttttgttggtaaaaatgagtgtaagcttttaaattttatgttaattgctactacactgctttctaggttgataaggcactattgctgaagagcattatgttatcattttagtgaatgtaaacagatttgtgtgaaaatgttatttgactgatgtgataatggaaactatcctttatttcctctggagtacataaagtcatttgtgtcattgtatacattattcacagtttctttgaaatgtggaagccctgtaaactgtgaagagttgggagaaaaaatttttaaatgaacaaagcagacttaaaaaatatattcctgatacttgaatattcgcagttgtttaattcccttaaaatataagttactattgctcatataatttcatttgctttgttcacaatctgataaaaaaatgttaaaaataaatgtttacaggtacttgcctattgcatgagtttcctgtgtttaaattttggtttaaaaaaaaaccaatataaacatacttttaatgagtgaattatttaactataaaatgaaaaaaattgctaacagaatattaaacggttttgtatcacagagctaaagaataagtgctttcagttcctttcaggggaggtggagaaatagtgcagcctcaggggttgaaggtgaaatgtgaaatttgctgtaattacttacccaaaatgtctgtattaaaggctattagaagcagttattttaagtacttctttatacatctttccctcttctgtttagtatttaaatgtgcaacaaaagtagtggcagatgttactcatctgaagaaactaaaacaagataagtcagtggcaggagtggtggccggttaaagatctcttcgaagtgctttgttcagtaactgttgttttgtctcacattaagttgtaggtggggtgctgttaaagcttgtccactcacgatggtgttcagctgagacctgtgagttcaagttgtcttgcccagagttaaaggccataaaactaagacagtgtcgttcctgtcttgggtgtaactcctaaaaaactagtcagttcttgcaataggaggaaaattattgcaaataaacctttgatttaccagcttcagtaagttgttcattctgtctctgtagctgtagtttttaccttaacagtttgaggctaccatttctcttcctttcatgcttatggggtccacacaaaccctgctaggctacctacagtataaaatcttaaaactccatgtggtgttgtgagctggtagcagatggactttcttttgcatctgctgtgtacagacttggctttgtactcttttcctgggggagagaaagtctttcttctctgctagttgattcctgtttttgtgaaacagctaagaaaacatctgtggcaggcagaaaaattgacaaaggattgacaaacaccattagctgaaaattttccatttcattgcaactatgcattgtttactttactgtaaatatcttaatacatcatcctctgaatatgctggcagagaagctggagaactgtgatttcaattaaggttagtaattgatggtatctagtgttcaaaggctgaagcttgattaacatctgcttggacaaattgtcattgtgaagtggttttgatgtgcattgaagattatttctttctggcttatctgatgttgtggctgtgaaatgcttgtcttgggtttgcttatttttgtaaactacttcctttggctgtaaattgcagagcactggagctttaccaaaagtgcagtgtataatggtaagcttgtcctaataagggaagcaagaagtgtatttatcacagacatgaaagctaaccgaggacttgagagactcaaactggtgcttttgtctctctctctctgtctttctctctctcacacacacactcacacactcacacacatgcacacacacacatacacacacacaaaaatgaagcacttactttagaaagattatggtaagcatgctggctcagtcttgaacctttgtcacccctcacgttgcacaccaaagacataccctagtgattaaatgctgattttgtgtacgattgtccacggacgccaaaacaatcacagagctgcttgatttgttttaattaccagcacaaaatgccatcagtctgggacgtgatcgggcagaggtgtactcacagtagtgtaaatactgctgtaaa

SEQ ID NO: 39106 - DNA, 2300 bp, Homo sapien
tgacaaactggtattttgatatgacccttttgatacagtcattatgccatgctcagctttacccatcaagatgcttccgtgtataatagtaataatagttgatacttttgaacaccttttcccttgagagtcttccaaattttataggaaaactaccttacttagtgctcaaaaagaaactctatgaagaatttcattctcatattatgaggcaaccaaggtatagagtgggtgactaactgtccaaagtcacacagctgaatgaggtacagtatttgacaaccttggtgatgctaccctacagcttctcatttgctcctaatgttattttaattttatgtcttctccattaaagattttaaaatttaatttaaggaatatctatggaatcacccaccacgtgtgcaatattaaggactgtgtgaaattaaatgaacaaatacttatcattgattatgactttctagaagaaagctgtaacttctttatattattggactttaacatctttgtgagagaattttaaaaatagggcaaggaatgatacagggataaaacagaattttccagagcaggtaaacaactcctttgagtgcagatgatgctgcagtgaactctgagacgtcctaaatgtttgttctctagtggtgatgaagtcatcttcagaactgatctgcttccatcagacaaattccaaacagtccaggctcctagataagttttcaagagaggtaatgcacttgatttcataccatttctgaaatctccaagtgaaaaaaaaatgttagttatgtgtaatggggcaaaatgtcatttgtctttttggggagaatggtctgaatgactgtcatcagcaactttgaaggctgtttttttttttttttttttttttttaaatggagtcttgctcttgtcgcccaggctggagtgcaatggcacaatttcttctcactgcaacctttgcctcctgtgttcaagcgattctcctgcttcagcctcccagtagctagaattactggcgcccgccacaatgctcagctaatatttgtatttttagtagagattgggtttcaccatgttggccaggctggtctcgaactcttgacctcaggtgatccacctgcctcggcctcccaaagtgctgggattacaggcgtgagccaccgctcccggccgaaggctggcttttttaccatcattgaaatcaagttagaatgcactgtctcttcataggtaacaagtaaatctttgtaatcaattggaataaattccaatgagctttttgaaaaaatgaaatttctgggatattattaatgatgcacatagaaagacagtgaatccaatgcacattttcttcagttttgataacgttactgtgattcctcgcttgtccaaaagaatcgaagaatgagttcgttctagctttctacaaatgaattctgcatttcattcacaatgaaataaaagagcaaaagttatctgagtataccactaaagtactatatatctgtaaattactttacacttgctatcctcggctcatcagattaagctacaatcagaatgtctcatttataaacggaaagttgatcagctttttacttccgaccacaagtttatctcccctcagataccactgatccagtgaggcatttagcttgccataggccaggctggggccagtaccacggcatccgcaagggtgccaaccttgtttgcctggatgcctccagcagattcgcgcaaactgcaactggttttacatcaggaatactgtttgaccaaagagtaatttaggagccagagatgaagtgagtaaacgttcaaccgaggggtcaaggtttcaaacgcacacgttctctatcccaccaggaaagttcgatactgtaacagtgttttcgtttttccttgtccaccctaaaggttttcgtcaggatattcccaaagcctccgtcggtctgggggcaggagtagggagaagggatgaggtgactttttgggcggggtggggggaacgtctgggcagccagggacctgcccattcactcccctttcccagccccgggagggcgcagcgcccgggtggggagcccgagccagcccaggccggctctggcctcctgacccagacagcgcagggcgcgagggatcgcgcggccgagcccgggtcgcgccgctcccagcatcggggccgctagccaagagttcgaggccttcccgatccggatgtgatgaaaaagagcaacagagggagaagtgtttcaggattgtaggagtggaagaggggaaagagaggcaga

SEQ ID NO: 39107 - DNA, 2300 bp, Homo sapien
gtccaggctcctagataagttttcaagagaggtaatgcacttgatttcataccatttctgaaatctccaagtgaaaaaaaaatgttagttatgtgtaatggggcaaaatgtcatttgtctttttggggagaatggtctgaatgactgtcatcagcaactttgaaggctgtttttttttttttttttttttttttaaatggagtcttgctcttgtcgcccaggctggagtgcaatggcacaatttcttctcactgcaacctttgcctcctgtgttcaagcgattctcctgcttcagcctcccagtagctagaattactggcgcccgccacaatgctcagctaatatttgtatttttagtagagattgggtttcaccatgttggccaggctggtctcgaactcttgacctcaggtgatccacctgcctcggcctcccaaagtgctgggattacaggcgtgagccaccgctcccggccgaaggctggcttttttaccatcattgaaatcaagttagaatgcactgtctcttcataggtaacaagtaaatctttgtaatcaattggaataaattccaatgagctttttgaaaaaatgaaatttctgggatattattaatgatgcacatagaaagacagtgaatccaatgcacattttcttcagttttgataacgttactgtgattcctcgcttgtccaaaagaatcgaagaatgagttcgttctagctttctacaaatgaattctgcatttcattcacaatgaaataaaagagcaaaagttatctgagtataccactaaagtactatatatctgtaaattactttacacttgctatcctcggctcatcagattaagctacaatcagaatgtctcatttataaacggaaagttgatcagctttttacttccgaccacaagtttatctcccctcagataccactgatccagtgaggcatttagcttgccataggccaggctggggccagtaccacggcatccgcaagggtgccaaccttgtttgcctggatgcctccagcagattcgcgcaaactgcaactggttttacatcaggaatactgtttgaccaaagagtaatttaggagccagagatgaagtgagtaaacgttcaaccgaggggtcaaggtttcaaacgcacacgttctctatcccaccaggaaagttcgatactgtaacagtgttttcgtttttccttgtccaccctaaaggttttcgtcaggatattcccaaagcctccgtcggtctgggggcaggagtagggagaagggatgaggtgactttttgggcggggtggggggaacgtctgggcagccagggacctgcccattcactcccctttcccagccccgggagggcgcagcgcccgggtggggagcccgagccagcccaggccggctctggcctcctgacccagacagcgcagggcgcgagggatcgcgcggccgagcccgggtcgcgccgctcccagcatcggggccgctagccaagagttcgaggccttcccgatccggatgtgatgaaaaagagcaacagagggagaagtgtttcaggattgtaggagtggaagaggggaaagagaggcagagagggggaaggccccctcgcaggggagccggctggagtgagctggctggaaagagggggcggagtgcgcggagtcagagccgccaccgctgccgcagttgccgccactgcggcgtctgggctgagccggagggaggcgggaggacgcgcaggggcggccgccgccgtcgtcaggccaccggggcgaaaatgcggccgctgccggaggctcgctaactttccggggcggaagaggaggaggaggaggaggaaggggcttggagcgactacggggggatgcggaggtaggtagtggtctccgggcggggaagaggaggggtttgatccccatccccggggttctcccaaacccgatctctctttccagcccctccccgctgggtccacctcggacccctgggaccccgccgctgtcaacttgcgctgtaacagttttcttcgcaagtttcaaatcaaaacttccccggggtggagtttgagggagggaagtggagggggagggaacgtcccgcaggggtggtgtgctcttctctaaaaacatttttttttttaattttgtatatttttccgccagaagcagtcagttccctgcacccagcacctcacagcccttcctccgtgcgccctgccgggcggcgagctaggcggcagcggcgcggcgcgggctcggcggagcggcccatgtccggcgcgggcgaagc

SEQ ID NO: 39108 - DNA, 2300 bp, Homo sapien
ttttaggtcttatgttcaagtctttaatccaccctgagttaatttttgtatgaggtataaggaagggatccagaatttggtatcaggccaatgaaattaatgtctggtagacttttaaatgtcatacctctgattccaataaaatattattcttgattaagatattaaaatcctagatatgggttgaaacatatatgaaacaaaaagagtctcattgaaggttttgtatgaagaaatacaatttaaataaaacttaagtaaaattattttatagtttaagaaacatcccttacacaatagtatcaattataatgttatctacccataacattgcattttaaaatttcaattctttcattttcctgcttcaaaattactttttaaatgacatatttcaatgattaattatgcactcaaaacagaaaaaaagtacaaatttaaaaagcaaccaaaattaacaagccaccaaaatatctgaagtaatcattgttaataaaactggatcatcagggctgggcgcggtggctcacacctgtaataccaacactttgggaggccaaggtgggcggatcgtgaggtcaggagattgaaaccatcctggctaatatggtgaaaccccatctctactaaaaatacaaaaaattagccaggcgtagtggcgtgtgcctgtagtcccagctacccgggaggctgaggcaggagaattgcttgaactcaggaggcggaggttgcagtgagccaagatggagccattacactccagcctgggcaacagagcaagactccatctcaaataacaaccaaccaaccaaaaaaaaacactgactcatcactcaaaataatgcatatttgtatgcagaagaatagacagataaatgatttcatagcaatagtgtgctttttaaattaaaaatattatttataatttcgattgcctttaacagaatttaaaaactgaagtggaacttacagaatttctgagctctagatacaaatttattaccacctgtgatataacttccaaatcatttgtctgagattaagaaaaatatgatgaaaaacatcaagagcataaagtaaaattttaaaacatgttgcaatttttttctcgtatggagtggggtctgctgaaagatgagaaataagcacacaaagatgttcccatatttcctcttctgatccaacttcccaacgaactaaaagctacctatcttgaactatgcagttttggtgtttatacataggaaaatattttggaggcatggtggtatgtggaaattcctgtttcataaattaaagtcatttgtcagattggctaaacagctatttacagagcatcagttccttccaaatttttaagccatgttgttatatgtacattatccaagttaatgatatgaattttctctgatttctacattttcaactctttgtttttattttagtggattcaaaacctgctgtccttttaccattgtttttcagttctgcactttagtaaaagtcatcccttgggacaaagtaggtttttttttgttacattaagtaggttttttgtttgtttgttttgcctgctctatttttttttttctccagaaggttcatgcctgtttcatttcctccatgaatgagaatgtcttctggtttcctctattcttgaatgataatttggctgtgtatacattttcattcatgctttctttactgcttcactgtctttgtgtgttgacagatgcctttcatcttttactccagcatctccaatcaagcatctttggttggatttttgacatcaagtgatttctttccttttttacagaaagggctcatgacttgtatattccctgactatttttttggttgttgctgtttttgtttataaaatgtctttctgttgcccttatgtttgtttgaccacctcagttgggcataataatctttagttacagtctttcctacttgctatggtttgcatgtccccttcaaaacttatgttgaaatttaattgccattgtgatggtattaagaggtgggaccattaagaggtgattaggtcaccagggctctgccctcttgaatggatcaatgttggtgtcaaggaagtgtcctgttattaaagggagtttgaccctctcttgctggcttgctctcatgctttcttgtccttctgccttctgccatgggatgacacagcaagaagccccttgccagatgtgggcctctcgaccttggacttcttagcttccagaactgtaagaaatatttcttttctttataaattacccagcttgtggtattct

SEQ ID NO: 39109 - DNA, 2300 bp, Homo sapien
gaaatgaaaaagttgtagatagcaagtacacaaaactaacttggaataagtcacagaagtttaattttggtatagaatattttcccctttaaagttaaatataagtaataccacatcctgttctgagaataaatgctgtagattctgctggaaattacttacaactggaagtaatctggacactatcagaagtctgaagaatcctataatctctttcactattcacatcaccatgtgatgaagtttgtaggactggtggagaagaaaaatgttataaagaaggttacactctttacttatggtatatttattatttggccttctctaacctggtatccttttgaccactcctcaaatacgattatgaaaaataattatcaaaaaaagctcactcttaagaaatccaatgaatattttttacttctaatttgacttactctcccttggtctttaaagttatttattgctttctccttcttaaagatgtcttttcccttggtcactgtgatatcattgttttcagatttttttttcaaaatggctctttatattaccaagaatcagttttctgacttcgtatttccttactctacattatcttcctttgaaaggaaagctcactatgagtcttggtttacatgaattgaaactggactattgatatttattcagattaatatacaatgtcatcttctcttgacttaactgcacaatctctgctctcagttattttttcattcaatctgtttttcataaggtggccagatacataatttttaatgtagaaatctaatcatcacatccttaccccaaaatctttaacaccttcattattacagagatattgaaaaaaaaatgaaagaaaaatgtctcttcagcccagcatacaaagccctctatcatctgtcctcaggtaaactttctaggcttctcttcatgatttccatgattctacaccatatatattatacttgaacaacacaagactacttactattagtctccagacatgctattctctcttgcattttcataattttggtgtttctctctccatgcataaaatctttttttttaaatgaaattatctgcctggtaggctacttattgctcattcttcaaggattaatgcatatgttatttcctcagtgaagtccttctaggctccctcaggcagggttagtattcccttcttaatgtagccaagacgctttattcctctctctattatcgactttccacattgtattagaatgctttgctaactgcttctcttccccagtggactgtgagctcctggaggacaaggcaatgaaagtaaagcagagtgcctggaacatagcgagtactggataatttgatgttggctgcacaaatggcctgctctgacaactgatgccttgattgcactggtgaatgcctaagagtttctggaattgaagctcatatcctatgttagctgaagagggtgtgtctgtaagagtaaaagggcaataatttggtttaaatataaaccaaataaaatataataaaaagtcaaccccttttatctttctggcttttctgtttccataattctatctatgatgtaggtgtcaccttttcctttgaacccgacatccaatcagtcactaccaattagactatcactgaaaataatgtattatcactttctcactttctgaactatggtttacattcatccttgttttccgtcctttttattcccacctgacttgagactagacatttcccattcatattgttatcacagtctcctaattacaaaagttttaaatttcaccccttgagccataacccatcttatatattctattcctaaggtaaaatatacctaagtggcatttcaaacgaatcactcccatattaagtacaataacaaaaacttccaatgatattaaataaactacactagcctagtattcaaattcttcagtactctggctgtagagctcctttctggcttcactttcactatgacctcaccggatctttgtttgcagtcacactggtagcatcgtgaagcaggagccatgtcacctgtagtcaacattctatcatcaccacatagcacatttcctaggacatgctagatattcaaagcttgttgaataaatgactgaaaggatgcagaattttcaaaattccctcttcaagtacttcttctacaggaatgggtagagtgggaagtgaggagacagggtgggtatgtgggtgggaatagggcaagtgacttaagctggtgtgggtgggctccagtatccacttctacttcaatc

SEQ ID NO: 39110 - DNA, 2300 bp, Homo sapien
tcattctctcctccccaatagggcttttgtcctcacaattctaaaagggctctgaaaaccaatcaatagcaagccaatcaatagcaatcaatagcaaactaatccagtagcaaattctccattgtcacctgacttggctcctcagtggcatttaacatggttcaccacttccttcttcttgaagagctatctggggttctgtggattctctgatttttcactcattttactggttctttttcttctcacagatgtctaaattctggagtgtcctaaggctcagtctttggtcctcttttctcatatatcaatacatgtcctataggtaacatcaacacatctctagcctagatcaatcccctatatgccagacttatatattctactgcttacttgatatcttttgtggttctaacaggtatcttaaacatagcatggctgaaaagaagtccttcctccaaaatctgcttttagttgatgtgaaagaaacaaacaaaaatggtcattctttgcttttctctctcttactcccatactcacatctatcaatatgtttttgtaatctacatccaagatttccagaatctcacaggttcctatcatgtcctcttgtaaaacaagttccatcatctctccctacagccacaggctctgacctagctttcctgctacattttgttcccttacagctgttcttcacagagcagccagaataatcttcctaaagaaataatcagatcctgtttctccttgcttaacattttattaactttctgaaatattcggaatataatccagacactttattatagtcagcacttccctttgacttcagggtctggattcaatggcatcctttctcctcaaacatgacaggaatattatcatcttacaaccattgcacttcctttgcttagtttggaatgcttttgtctcagatctttgcatggttacctctttatgattcagatctttagtcaatgtcagcttgtcaaaggggcctttcacaattaccctaactccatgactcctcaaatcaatgtcttattttatttaccctctgacttatgagtagtgtaacacaaatgatcttctttattactgcatttacctatttattctatgcttccccctgtagaatgcaaaccccttgaagacagggattttgtatgtctcatttactgctgtgtctctggagcctaaaacagtagcctgttttgttgttgttagtacccagcatagtgactaacacatcacaggtgctcagcaaatgcatgttaaataaatgactaaaattcacacatagtattgaaataattgttttcattataattcctattcaggaatactttattcttgttgcagtagcatggtactactgcaacaagaataaagacaacaataataatagctaccatgcattggttacttactaggtgacaagaattatgcaaaatacttttagtgaaaaactacatttaatttcacaacaaacctatgagatagagactgttattgcctattaaaattttacaaatgaggaaagaagcttagagagttcagtaacttgcccaagttcatatagttaatgaatggcaaagtagggccttgaatccagccctgcatgaaaccagtgcaactatcttacccattctgctgtgccagcggtctcagggaagtagccattgcatagaactatagaatcctatgatttgaaggggtctgagacagatcttatcatctggcacactccagctgaatgattgcttagcctctgagtttagatctgtgtattatttacacccattggtcttagtttcacccctttctttcagagacgtggttgtgcatagtaactcatttcttttaacatatataggtattttttcaatcaagtgtctgtaaatgctggtggcatttggtagtctaagtaaactgttatagttcaagatcattccagagacgaggaatgagtaaatattaacaaccccctgtgcttggttggaacttgaaaggactgcataacatcagtgagcaagcttttgtcaatcacaatctagacaagattagtcttaaagtccaaagaagaaccaaagttcactttagtgtagaagtttccacacagttctcttggttattgtttgcaagtttaaggaaaagaaaatgatgaaggagaaagagaaaaccattgctattgtgaaggttatagacacttcaaagttaaaactggtgagcaagtatattttggaattctttcagtgtttggagatgaaaccaccttaaatactgaatttaaactt

SEQ ID NO: 39111 - DNA, 2300 bp, Homo sapien
ggtttataaactatttttgaaatgaaaactatattttattagaaacgacatgcatgatttttaaaaatttttaactattattttaagttcagtgatacatgtgcaggtttgttacataggtaaacttgtgtcatgggggtttgctgtacagattattttgtcacccagatattaagcctagtgcccattaattatttttcctgatcctctcactcctccagccttccaccctctgataggccccagtgtgtgttgttcccctctatgtgtccttgtgttctcatcatttagctcccacttataagagagaagatgcaatatttggttttctgttcctgcattaatttcctaaggataatggcctccagctccatccatgttcctgcaaaggacatgatctcattcttttttatgactgtatagtattctgtgatgtatatgtaccacattttctttatccagtctaccattgatgggcatttaggttgattccatgtctttcctccgtgaatagtgctgcagtgaacatacgtgtgcatgtgtctttataatagattgatttatattcctttgggcatatacctagtaatgggattgccaggttgaatggtatttctggttttagatagaggaattgccacactttatataaaatatagaagcaatagataaaaatgtaaaaaaagtaactacccgattatgccaccattaagaaataactgatattaacaaatagatgcttattctttcaggtgtgaatatgtatctatgtgcatgtttccaacttttgaagcccacatagtaatacagctttaaaatttaccttctgaagctcgcaaatgtatttcatacaaatacattaaatatgttaaacatgttgtatcatacaaatgtattaaactctaattcaatctaaagtattttctaatgagttaaaatcccaaatattttcttttctcacaatgtttctaatatcaatgttgtttatttctaatactaacctaaataaattgattttacacttaattatttactatttccattcaccttaggagatttagatgtatgataaaacaaccagaaaaggtaaggtgactcaaaaatgtgctattgatagtgacagaacaatttttttacttaatagctttgaagttcttacagaagatatagtgctgaaatattttcatataatctccacttcttgacaaacacaaatgtcaatttaattgcacaatttttagatcacaaaggcaagagaaatctgaatgtaaccttcacattaaacttcagtagcttgcataaatgccttgctttgcatatattttttaaaatataggtaagacaagaaagtcatgtaactgttacaagaatgaattcagattttcacagtgtgaattacagggtgggaacaaagttgtacctttccattttaagttcctgagatacctaacacatgaaatgagacctcttttatcacattggtaaaggcatgagtatcctatattcatgtcccttaaaaatacaaatgaaattgggatgtaaataataattataagacaaagaaatctcataagctgaactgtgtatttttaatctacatgggaagataaaatattcttggacaagataaaaattatcctggggtcactttaggagtaaaatcatatgtaagaaaaatgtaattatagaaaatatggaaaatgcaatggccttaaaaactcaaaatctattaatgctctaaagaaatgtgcaattcctaaaattgaaaaaaaaatgatgcaggtcaatttgttgaagaaatgttcattgtgaaacataacatgttgcaataaatgtaggatctcagtccattatgataacaaccatgtactgcttgtgtatattctggtaagaattgttaattatggagccacaatgggaccaacaagagcttttactgtggccacagtattgtggagtagttttctaggagtgctctttctcaaattagtggcatatttcagataaagaaaggaagtcgtcttaacttgaaactgctgtgtcatttcttcttccttaactgaaattccaaccagggttcaggaaatgccctaatgagccacttctcttttctctttcctcaactaactggattccaaccagcccaaagtattcattactcacggctagatcgtttactttggttgtcccttctggcatggtgcatatgttatgggaagagggattataatttggtgctgtttgtagagatgacaacactgataaaatccactcattgctggtaggtaactaaaccggca

SEQ ID NO: 39112 - DNA, 2300 bp, Homo sapien
taaatcagcattcaagatgtatatttggatactcatttcaatgtctcagtctcaaactcaatatattaaaagttgtatcctttatgtccaccaccagccccaaagaatgcacaactgaacaaaaccctgaccatcatcctatattttctctctttctgagctatccatagaggtgatcaagatagaaatgtgtgccatcttctattcattccactgtcatcaactacatgtactcatcaaaccatgccagttctacctccttaataactgtagcttaacacctgaataactgaacaaaaacttacaatttaactctcttaacacttatctacctcaattttatttttataatttatacataatctataattatttttatataattggcacagtgataattccagataaaactcactgaatttctatttccatccttgccaatgatacacacacacaatgtaatgctgagagggttgggaaggaagaatgggagaaaggcagaagttgacagttaaaaaaaaaaagtttccagatggttttcttagtgtcatctctgcaacctcatcaaataagggtccaaaatttatgttacaacatttgtttgatgccttatttaaattgctttactggacattttccatctgttaagctctctgaaagaaacaaaattgccttgtcatagctagacctcatgatcctatacacttacaacgggcagactttgcaggggcccacacctttcaaggtggtttgggaaaatgacacagaaaagttttacatcagctgaaaagaaaaatgcataactcattttggtaatttcagttttaattcttaataggataaaggaaacatgcacattataaatcaatgctctgtgttaacaaataatcaagtaagcagagttgcaagtattggctaaaatgaattttggatatttttagctaccaaatttctcgaggcaaggcagacatacatctggacctgaatatctgcattattagggaatttttgtttgtttgttttatattgttttgttatttttaaaagtaggtgccaaattaggtcacctgctgtctgggcaatgttattttttgccataaccacaaattgaagaaaattgactgctctttttccttagtcaacatgctgtgcttccagccccaaacatctttgagaagttgtttagattcatgagcaatgcctctgtccccaacaggctaagacattaggcaggtccctgcacctctggagtcctcagttccctgcaaagtgaggaagctagactaagtaatcgttaggctcccttccagaccgaccaatctgatggtattagatgcaattgctcctgaattagggcatgaaatgaattcagctttggtgcaccaatgtgatgactctgcttcatcaaagcctgagcacgcgataggcctagcaccatctcacacagagacaaagggcaaccctctgcttccaaaggaatgacacaacctgtttctgaagtgattcacatcatctttacttttgaacaacccaatgctcagaaaacaatctaagaatcttcgctgactttagggatgtaagatacggtttcttgacagtatttgggattgtggaaaaaagcaattgaggaaagggcatctccacaacgcaatattgaatttagtgcccaaggtccatcacaggaatccctaacgatccctacaatctctctctctctcttttttttctctctttaccctgaaaataaactgagaagttagtattgggataactattccccttgacccaaataaaaagtcctgggcaaacacaggtacaaattgccaaatggaaaaagttcttctccatcttcagctagagggaggctggggatcccagctctttagaagccggcccgtggacgcccagagaatcccttcggagaccaggtcagggtcactgagcttgcccagcagggcgccgcctcggacgccgccccgcctctcaccttgccagcgccgcgctcgggccgcgaaggtgcgtgcggcgctcggtgattggcggcggcccggagctgcccggctgccattggctgcccggccccctttgttcccgggtccgggccgcaggcccgctgcggcggactgggcggcggaagttcgacggcgccgggcgagtggctgttgagcggcgccgcgggagttccgcaggtttcccgtgttcgcagcggagccggaggccagctgaacccggccgtgggatcccggataggaggaggaggggacccataggacgcgttaacatggacctggaaaacaaag

SEQ ID NO: 39113 - DNA, 2300 bp, Homo sapien
gggttttaactggtaattaatcccaatttgtacaactgatgtggacgagctttccttttacaaaccaagaattttataatagtatcatctatctcaatcactgtttaataaagacagtcctccttaattctttttacatgaaatgttaatgtggaacaatgatgcttttcatctgtctggaagaaattcctcatgaaatcaacaatgtaaaagttttagaaggaaaaaatgtcatacatcttaaaacagaagtcatattagttgtatttaaatggttgtatctttgttccaacttttaatcttccttttctcaaggtacattcaaactataaattttcttgaataactgagtcaaaaagaaaggagacttgaaaactaggtaccaaaatagggtgaggactctgctggtaaatcagatagtcttgtaatatttccttctttggacgtgttagaaaacaattgctaaaaggaacataaatttctttttgagagtatggctaagattgtgaaatacattcctgagatttccaaattttgtactgggaaactttttgttagactatcaagcctattaagggactcacaaattggagtcatacgggacatctctgcggttttttaatagcttccaatttaccagttgaggattctaagaatcatcagtgaagacaacgtagtgaaacagggatttgttatatcatgggattctctctaaaacctttaatttatggaattctttctggggtggtagaggcggagaagaggaggattagagaaagttaagattcttggttgaaaatataacttttaaaagtaaagtgggggataaacgaggaaaattacaccatatgtcaagggcattatttatcataatccacattttcaaactctaaggaaattgtttataaacaacgtctggatttttcctttgcaagcatatacaatttttaagtttgaacttcttccctcagaattactccttgtctcaaaaagtttcaaaaatgtctttgatttttctccccctattaaacagactttatttttaaagcattttttagcttcacagcaaaattgagcagaaaattcgaagttcccatgtacctcccccatgccttcctgtctccagcagcctcccggactaccaacaacccgtatcagtgcagtacatttgttacaagtgatgaaacacattgacacatcattatccccaacatacatagtttacattagggtttactcttggtgttctacattctatggattttgattaatgtataattacatgtatcagccattttatagtatcatacagaatagtgtcattaccctaaaaatcctgtgcttcacctgttcatcctcggcagcccaaaatatgtttacttttgcaaagttgtcttcaaataaatacttaaaagcaaggacaagaccccccaagttttagacaagtactaaattaagtagctcttacctacttgaaaactaaatgagagtagtattcatcaacagaaagctaagcgggcaaaatgctttccccgcttttcccccatgacaagcaagattaaccaaaaatattacagttatttaaaagaaaaaaagaaagaaaccaaatgggaagagaatagaatgcaatcacgctaccattaacaatttatgtttttctgttcttggatacctttttgagtgcctgagaattttagtcgcaaggaatgaaaaaaactgttttctcatttcgagtttttattggtcaatagcttcctaaccgaaaactctgcagtcctaacacaatattttgtatccattttcaaaaatccagttctgggcataaaatagaattaatgctcaagtcaaaaactttgtgtttagaagataaaatattaggaaccatgagtatgagaaaaacaaaaactgttttctgtatttttcccttcctctctctgcaaaacttctctatttgataagggacagctagcttaaatttaccacaaagtaaaacatgagcaaatcccctggaacgaggagaactttcgcacagggcaattcactcgaatgtgacatcagcattccttctgagtcatagtctggtccccacccttttctcccaggcgacaccaggctccgcataacccgggagtggctcaggtagggccgtcggttccagtgcctgcgaggcagcagccaagctgaaaatgtctccctgcgctgagacgctggtgacaaccgccctttgggactacctgccaaacaaggagaatgcgctctttgacagataattccctaagagggaggcactgcctcggtcg

SEQ ID NO: 39114 - DNA, 2300 bp, Homo sapien
gcacaaagtatggtgcctacacatagacaataaacaaatgtgtggtaatcctcttcaagaaattcaatctagagggaagaaaatcctgcatagatcttcatgctatttaacagacacctgaatatattgtcaagaattttatgatggcatgctctcagtaaattattgccacttggtactttgttggacacaaatatccatttaaagttcgataactgggggatatattaaattactggatttaatatatccttttgctaatttaaaaatttaatatatttaatgtatccttttgctaatttaaaaattattctgatttatatttttataatgaaattaaaatttataaatatttctggaacttgagtacctaccatgtgccaatcgctatgcaaaggattcaaagctgggtatattaggttccctgagaaagcacttgattgaacactgcaacgtattgtggtcccgtatagggaattggtatgtttccctgattggaatcttcctcagagtttctgaggtaaattacagaaatggttactattctttgcagcacctcccattaaaaagtggagtctgttttccttccctttgaatctggactgctttctgacttacttggatcagtagaatgtggtagaagtggtgtgtgaatcctaagcttggacctcaagagaccttgcttgcttctattgctctgttgctgggatttaagtcttcacagcttcccacagtgaaagctgtggaaggagtcttacagaagactgtccccactctgaattactctcatattcctctgtacatctgaaagaatcaagaatcaatgtactgaaactgctctaatttcattggtggcttaagattgagcccactttctgctctagacgaatctgattttgatttttgtgcttgttgttccattaaagtgaaggaaaattaaattaacatgcaactgcaattttatcttagttgtaaataggtggtatatgcatattttgaaaattgtctgatttccttgaatcactagacaaattttaaatgatgtctgtgcaccttctttagtggtatagtctaaatatagagcaaaaagtatggtaatccaaaccacttctctgatacatcaaaagttaaaacatgggtcaaaaattagttaaggctctttgatttatgcagcacaacatatcaataaacagaattcttttttttccagaataagggatggtgtgaaaagggtatgcaataaataaataagcaagcatgaggacctggcagtagggttcttacatctctcccttcctttcctggtttccaagacccctctccttgctataagactttgtttttgttctaaatgcctgtgaatgctaatttggggcaaaagagaaaaacgagaagactgtctttttgcacccccttttctgttttctttgctgtctctgttgggcattactctctaggtttccttggatcctcctgctcctctgggcagcctccttcagtgaagccctcagccaatgccatgagccttttctttcattctccagtctgtgaaaacacatctgtactgccgtctttttctgcatgtgctccagttagatagttaaagaattagtggcaataaatcacttaattgtacagtcaatctactcatcccctcacccatgtattatgatgggttacccctgaagaaataataccatagcctttaggcatcgcaagaatgatcgcagtattcaagtttggggataaagagccttaattaagacctctcaaagcagctctctgtgggatccaccctttagaagcagctgtggagatagtgacacaagaccaaattaggaatggttgccatgatccagattcttttatggaactcctacagatgcgttttggaatcaggtttttaaagtcccttttatagcaaataaataggaggttttgagggctgtttatgagcgcattccattacagtgtctttcagcggagccagagctcagccaatcctaattaagaagcaatttcagctgcagtcattgcttattataataattgtgacatttttatagccctacattgtctttctcaaagtaacggattcaggaggagtccttttctgagtagagtccacagaagaggtattctattggtaagcatttcaaatgacttccttcatacagtagtataaaaataatttgatagcagtccgtttgaaaaatgtttataaggaaccagcttaaactgatcagatggaatatattttcatcagtcgcttacctgaaataagtacaaaccttttttat

SEQ ID NO: 39115 - DNA, 2300 bp, Homo sapien
gatttggccaggcgcggtggctcacgcctgtaatcccagccctttgggaggctgaggtgggtggatcacaaggtcagcagattgagaccagcctggctaacatggtgaaaccccgtctctactaaaaatataaaaaaaaaaaaaattagctgggcgtggtggcaggcacctgtggtcccagctacctcagaggctgaggcaggagaatggcatgaacccaggaggcggtgcttgcagtgagccgagatggcaccactgccctccagcctgggcgacagagcaagactccgtctcaaaaaaaaaaaaaaaaaaaaattcttgatttaaggtagcaaggctttaaaaataaatctacaactatttcttacaaacacttcaaactctgagaaagatgaaagctaaacaaaggacaatactggtatgagtcatatatttattgaaaaggaaacataaagaactaccgtgcaggcacacactgctggactgtaaatgaggctcatttgaggctggggatacgtgaatgtgcttgttgtgctgggcccagggagcctctgggcacagctcttcatggaagtggcctgtagggtgagtaggggtgaaccccttcctgcaagccatggacggcagaatacagtggaaataaaacttactcggtctggatggcagaattagagatagcatagtggcatgggttgacagcctctccttctcccaatacctatccgaaacaaaaccccaaagttaaaaattcaccaatagcttaacaagaaaagataaaacttctttccataaaatgtggaaagtgatgacttgatagagaggaaaaagaatcttctggttaaatatcatccatgtaccccaaactggccaatggtttctcattttcctcaaagtccaagtccttaaaatgccttccagggctctctatgacctgggtcccaatactgtgacttcatcccctattattctcctgattcactcctcaccggttgtgttggcctcctcactgtgcctctaacatgccgatcacttttccagtgcaggccctttccatctgtatttcctctgccagagcagttcttccctgacaatgtacagggctcattcctccattttcttcaggtctatgctcaaaagtcaccttaccagaggtcctttcagaacaccctgtcccaaacagcagaccctatagtctctgatatgcttactgtgatggttaatattgagtgtcagcttaattagactgaaggaagcaaagtattgttcctgggtgtgtctgtgagggtgttaccagagactaacatttgagtcagtggattgggagaggcagacccacctttaatctgagtgggcaccatctaatcagctgccagcatggttagaataaagcaggcagaagaacttggaaggagcagacttgctgagtcttctagccttcatcctcctcctgtgctggatgcttcctgccctcaaacatcagactccaagttttccagctcttggcctcttgaaccgacaccagtggtttgccacagtctctcgggccttcagccacagactgaaggctgaactgtccacttccttacttttgaggttttgggactcggactggcttccttgttcctcagcctgcagacggcctattgtggggccttgtgattgtgtgagtcaataatctttaataaactccccctcatatatacatctatcctattagttctgtccctctagagaaccctggctaaacacttatttcatttttgtctataacacttatacaacctggcttatataaatctgttttgttattcattcattgttgtcacgtcaacaatagtaatattcatagttcaggcacattgtgtattttgttcactgctgtaaaactaaaatgatacttggcacagagttgacactcagaaatatgtgttgaataagtaaattctggtgtggcatagagttctggctgtggtcccatcctgcagaagcaaaattcttttagtattgtgaggtcacagagtcatggcattctcactcgcatcttccatggggagacaggtggaatggtgaggtacccttggaaggttaagagaaaaatttagtaaacacttttgagtatatagactcttgctgcatgatcccactgtgtaagaatttgcttatttccagggcttcataccaagatgggtatagcagaagcctacctgtatgataaaggagtgaatacactcccagctgggtgcaggggggcctgccagagtatctttaacagtgtttcagaaaggaagtatgtggcttca

SEQ ID NO: 39116 - DNA, 2300 bp, Homo sapien
caaaataagaacctcaccagatctgacccaagggagagaagattgttcaataaaaaattacaaatggatgaataaatgaatcctctcctttcaagttctgtgctccatacaacaaatctagatgggtctcatttagatgggatttagagacacctttcttaaatacctatcattttacgaatgaagctgttgtctaaagagtcctcttggccacttcctgaaaacaaatcaattatttgtgataactctcaaatgtcctaataatcccatggaaaatgtaaatgtaatgaggaccaagaattataaggtaagaagtgctaatgtcagatttttacccactacataagcccactcttgtactagggcagtgactttcttctttgggtgagaccttgaaatctgggattataattttgaattataattataaaatggtatttggctgtaaattatctcctttttttttctgttcctcacagttgatattatggattcccataaggattcatgtcttctattcactttaatgaacagttgttgggcaacaattctagaagagttccaattctcatcaggagaatggacaaggtggagaagcagagaaaatgcaatgagtagaatgtctaagtcatcactttggaattgactgaacataaataaaaatgagaaagatacgtaaaaaagaagggaatgggtaagcagggtgatgtctgggagaggaggggctccatagccatgagagtcaactctgtaacaccctatagggttacaacactgcccttcatatactgaggtagcagcagggaaactttttaattattagaaatattgaactttgcctcccacccccaaacatttttctcattcagttcctgttcttttttatttctgtaatttttactgtttcaaaaatgatcttttttctttcggaagaagcaattcttcaaatccagttcacataaggggatttgatatgttcaacaagctccaaatacactgtatccagcaatacctactacatgcctactttgagctctgagcaacctgcacctcaagcctagttctcattgttttgcttttggcaaattttcactaagtgcccttcctccccaaacacacgtatatgtctaccagaccctaaagccctttatgaacatgcaaactcctcccttctgaaaacctttgcgtgagtggtcagcaggctaattcatccattgcaatgtggctttgtgttagggttctgtttccgtgctgcctgcaagataatcacagatgtgactgcatcttagaagttcctgaatctttcaagacagtctggttcacaagaaaattaaaaggtggaggtcgggcgcggtggctcacgcctgcaatcccagcactttgggaggccgaggcgggcggatcacctgaggttgggagttcgaaaccagcctgaccaacatggggaaaccccgtctctgctaaaaatacaaaattagccaggcgtggtggtgcatgcctgtaatcccagctactcgggaggctgaggcaggagaatcgcttgaacccgggaggcagaggttgcgatgagccgagatcgtgccattgcactccagcctgggcaacaagagcgaaactctgccacacacacacaaacacacacacacacacacacacggtgtagtttaggaagtaaaaaaaaaaaaaaaaaaaaaatcagatctcccctcacacctcagatctgaaggcacaaactctagggccagggcgttcgcctacccaactccacatgcacttgcaggtcacctagcactcaggtacctagcactcaggtacattgtggctccttacctctcacgacagcagcaacaacgttgattggaagtttatcactgtgtgttacgggccatgggccatgtgtgttagaattttatgtgaaattaacatttaattctcacggacacccctgaaacagatgccacagcccccattttgccaacgaggcagctgaggttcccagaggctcaataccagcaccatgagccgcagcacgcaaggcaaacacagccggaggtgagcacatacctgcttcgcaccccatgcgcctaaccacaaggttccctccctccaggaaggccgttgtcttccctgggacgacttgccagctctgaggcatgacagtacgggcccccagaagggtgaccaggaggccctcctcgtcccagctgccggcgtcgccgcccactgcagggcccgggctgtgactcgtggggacggttccctgcgccccggcgggggaggtgggcggggaggggcggcgg

SEQ ID NO: 39117 - DNA, 2300 bp, Homo sapien
atttgttaatataatttgttcaaagaatttagaaatgcaatctgacagaaatgaaattaagaaaacgcaactttttggccagttgtagtggctcacgcctgtaatcccaacacattaggagactagggcaagaggattgcttgaggccaggagtttgagaccagacagggtaacagagtgagacccccgtctctacaaacactttttaaaaatattagcagggtgtggtggtgcacacctatagtttcagcattctatcaggaaactgaagtggatcacttgggcccaagaggtccaggctgcagtgacctatgaatgcaccactgcattccagcttgggtgacagaggacaccctgtcagaaagaaaagaaaaaaagaaaaggaaggaaggaaggaaagaaggaaggaaggaaggaaggaaggaaggaaggaaggaaggaaggaaggaaggaaggaaggaaggaaagaaagaaagaaagaaagaaagaaagaaagaaagaaagaaagaaagaaaagaaaggaaggaaggaaggaaggaaggaaggaaggaagaccctaattatttgtttactcataaataagcttattttaaagcattccaaattttttaacttttattttaggttcaagagtacatgtgcaggtttgttaaattttgtgtcacagggattcgttgtacagattatttcatcacccagctacaaagcctactccccaatagttatttttctgctcctctccctccccgacgctccacccctcaagtgggccccagtgcctgttttttccctatttgtttccatgagttctcatcatttagctcccactaatgtggtatttgggaaaatccaacttttgaaagatctttagtctgctaatcatgaatggccaacataattacaggcatgccaacatttgtaacattgtgacactttccctgccattcttagttaaaactgatcttttgttccaaaaatttttgctaccaacaatagcctgtcctttatagttcttttatacttttgtgtcttctctctaactaaataatcaactctttcagcattccatccatttccctttctcctccctcttactcccaacccacattcccctctccattttaattttaacctgtgccccttcaagtgtactccagctttttttttaaaataatttcaagtgatactttgacttttgactgcatatggaagcataagtaacatgtcctttcatttttggataatgagtttcctgattaattacagctcaagagtaaaatgactgattactatttaattcattttgtgcttctttacaataaagtaaagacagaagccccagattcaggaacagacaaaatactttaatcgctatcacattttttttaagtctagtcaattagaaaagtcaaatctttcctcacagccaagcacattaaaaaaaaatcttctctggtaataaacttgaagctttaaataattctacaattataaacattttgtgtattttgcaaatatggcataacctgttggcataaaattccattgttccagaaaatatcggtaataaaattatagaaaagttaaagatcttcatttcttatttcgaagcgtttgggagacatttcagaaacggatgggaaatgttaaattctgcatgcctgcttaagtttccatccacaccgactagatgtaaacgagtgtcaccaaaagtacaccacaggcacccacacagattccttccataagggatccacaaagtttagatgtgaaatgtacctaaaggttcctagccgtctttcatccctccctctgtgaaacagggagacacatgtgttttaaggcagagatggaacttgggcgatgggcggggggtgggggaggtgggaagggacggcttaggacagggcaggattgtggattgtttctgccgccttggttgcccatactgggcatctctgcaggcgcgtcggctccctccacccctgctgagatgatgcactgcgaaaacattcgctctccccgggacgcctctcggtggttcagagcagggaaaatgttgcctcaggtttaaaataatctgcccaagcaccccagcgcgggagaaacgttctcactcgctctctgctcgctgcgggcgctccccgccctctgctgccagaaccttggggatgtgcctagacccggcgcagcacacgtccgggccaaccgcgagcagaacaaacctttggcgggcggccaggaggctccctcccagccaccgcccccctccagcgcctttttttccccccatacaatac

SEQ ID NO: 39118 - DNA, 2300 bp, Homo sapien
ccttccataagggatccacaaagtttagatgtgaaatgtacctaaaggttcctagccgtctttcatccctccctctgtgaaacagggagacacatgtgttttaaggcagagatggaacttgggcgatgggcggggggtgggggaggtgggaagggacggcttaggacagggcaggattgtggattgtttctgccgccttggttgcccatactgggcatctctgcaggcgcgtcggctccctccacccctgctgagatgatgcactgcgaaaacattcgctctccccgggacgcctctcggtggttcagagcagggaaaatgttgcctcaggtttaaaataatctgcccaagcaccccagcgcgggagaaacgttctcactcgctctctgctcgctgcgggcgctccccgccctctgctgccagaaccttggggatgtgcctagacccggcgcagcacacgtccgggccaaccgcgagcagaacaaacctttggcgggcggccaggaggctccctcccagccaccgcccccctccagcgcctttttttccccccatacaatacaagatcttccttcctcagttcccttaaagcacagcccagggaaacctcctcacagttttcatccagccacgggccagcatgtctgggggcaaatacgtagactcggaggtaggcatccgtgggggggcgccggctcgggcgtgcggggagtgtccgcttctgctatctgcctctccaaatatcccgactgctgccctggccccagccctctctccacttcggagcactcctctggcgttggcaccgctgaggaatgggcctgggcggggaggtgaagagaagccaggaatgttttatgttttcctaatggagagggggcctagggagcccctgagctaggaggacacggaaaaggggattggggtcctgagattgggtctgttgggcccaggacgcgttttctggatgggtctaggatgctcccttgtcgcgggacccccgcggtccggccctgcctgctgggggttcgaagaggtggagtgcagggtggaggtgttatttacccgagtcctggggacagtccccgggactctccgccaggcgcccagaccggcaggtcccgcaggcggcgcgcggtgtgtttgcactttccaaagttcttgaaccatctcaagaactccttctgcatcttggcgtctggcaggggtgttccgagagaggtagacctcccctccccaaactgccaccatcacttccaacgccctccacgcgctggagctctgcccgggtgtggaaacctcgtcttccaacacgtagctgcccttcagccacccgcccgcagcctgggagtgccctgagggtgggtcgggggagctgcgcaggtgagactgagttctaggacatttagggggtctggtgcctggctccgccaaaaatggggactttcgggattgtgatcatcacggcggattgagcagggagagccgtggagggacaagagagggccgaggcagggtggggggcgcgggcaggtgcgagggggatgcggccaagaagcagcgataaagggaacattccacgggtcgggcggctgctgttggatcttagataaagctggaagggattaccggggcaggggtaatagggaccggggacgggaacgcgaaacaggtgaagcgctcagggcgagagcgactcggcttagggagtccgggagaagcctgcggctgccccctcgccgccgaggtcctgcgggtcctgcgggtcctgcgtgctgagccggggcgtgcgcgggcgggggccttcggaccgcgcggcggggcctgccctgacccctggcggcgggcgggggaggcaggcgcgccctgcagagtacagaggggtgtggtgtcctctgcgagatcctcttaaaaagctggctacgcgcaggcggtttctgtgcacggagccgtagctgtcggagcggttagttcgatttcgagctcgaggtttcccccgccgccaggctgacttctcatcgcttgtttttctttttgcatttttcctcccaccgccgttgccgccctccccgtcctggccgtccgccctccgccctctgcagggacatctctacaccgttcccatccgggaacagggcaacatctacaagcccaacaacaaggccatggcagacgagctgagcgagaagcaagtgtacgacgcgcacaccaaggagatcgacctggtcaaccgcgaccctaaacacctcaacgatgacgtggtcaaggtaagccaaggcgaccaacagggaagggctggg

SEQ ID NO: 39119 - DNA, 2300 bp, Homo sapien
gaaatgatgattttcaatacagtttcaaaactggattgaaattttgttagttattagaaactagaaagtttcagtgctgaaaatacacaacgggttgtttgtatttatcatctattttattttccagtttgcattggcttttctgggtctttctacaactttaattgtaaattttttcttttatatttttatcatggcactcaaactcagaaaacctgttaaggcaactacataatgtgatctaaaaatccagttaacatattgctatggaaaccaggaaatagaaacagcactctaatcattcctttagacaactatggctctgtgtgtgtgtgtgtgtgtgtgtgtgtgtgtgtgtaaaactttttaaattcattaatttattcatcttttattgaaagctgttactgaacccaaaatctgtaattgatctgtccataaataggcccagtgccttattaccagtaaattagtgttttttaatgagctatagtcattgataaattatgccatgccgtatcaggaaatctccagtcaggccgcgttgtttatttagcctgctgaggcctcttggtatggtgtgaaggacacctgactgggctgaaagctaagttctaactttgcccctcttactaaccagctatgtgactctcctgggaacttttagggactcagtttctttacctgcaaaatggttcaatgcaagactttagtaacgtaatgggaactttccttttccataaaactggggaatcaagaggtaatctcttttgaggactgaaatcactcttatgtaacctctggttacattatcatttccaagtgcctggcacttgggaaatgataactattcttactacatttttctatgtttcattctgtagtaaataagaactgaacctgcatagtaactgttattttaacccatgactttcaataacgaagatatctatgtctcattatctattgccatgattgaacaagttggtatgagagccggaacgaactcaagttctaaccggcaatgcccgttccttagatcctattacctttgagtgttcatttactcttgtaggtgccaatttttatagcgaaatacaaagttatcccaacacaattactcctaatagagttcaccgaggccccaaaagctcttttttaaaaatcatcataagatttcaacattcaagaattaaacttttgttctgttgtgcttattcatcgctatttgcccagttatttaatcagcctgcttccggctatggaaaaaaaaaaaaagaaaaaaagaaatggaagtctcctcagggttaaactcctctgttgttcttccttgcagaaatttgagttattatagtagaggataatcgttgcataatgaaatcattgggacaattcgtccatccacttctacctccgcctctaacaatgaactccttgtttctgcggtgcccaaatctctctaaacccgggtgggcgcggggcggttagcggagacgtgggagaggccgagagcaaagctcgcgcccttcccggggtcagcgagcggggtgccaggagggtgcgcgccctgcatctgagcccggggtgacactcgcctcccaagcgccaggagggggagactcggtcccgcttatctccggctgtgctaacttcagactgcctgagctgggggaggagagcgcgcagccagggcgagaaaacttctccacctagaaagtttcaccttgtcgtgggcggggcagaggcgggaggaaacgcgacccccgcggggccaggcgcggcgcggacggcaggaagggcgggggccgatttccctctgggtggtgccagtccccacctcagcggtcctcggaacccgcggactaggggacggacagcacgcgaggcagacagacacgtgctggggcgggcaggcgagcgcctcagtctggtcgcctggcggtgcctccggccccaacgcgcccgggccgccgcgggccgcgcgcgccgatgcccggctgagtcactggcagggcagcgcgcgtgtgggaaggggcggagggagtgcggccggcgggcgggcggggcgctgggctcagcccggccgcaggtgacccggaggccctcgccgcccgcggcgccccgagcgctttgtgagcagatgcggagccgagtggagggcgcgagccagatgcggggcgacagctgacttgctgagaggaggcggggaggcgcggagcgcgcgtgtggtccttgcgccgctgacttctccactggttcctgggcaccgaaaggtaaaattgcagcccctttcagatcca

SEQ ID NO: 39120 - DNA, 2300 bp, Homo sapien
ttgggaggccaaggagggtggatcacctgaggtcaggagttagagaccagcctggccaacatggagaaaccccgtctctactaaaaatacaaaaattagcctggcatggtggcaggcgcctataatcccagctactcaggaggctgaggcaggagaatcgcttgaacccgggaggaagaggttgcagtacaccaagattgcaccacttcactccagcctgggcaaaagagcgaaactccatctcaaaaaataaaaaaggaaagaaagaacacatgtgtactgttactcctggccccaccccctccacccaaaactctccctctgccctcatattacctgcacctataaaacaaagtctccctgttcctcaagacccaccttactgtcactctcttcctgcagcctttctcagtaccctactattatctctttgacttttggcaacctttgtacctctttgatattactgctctatattacagctattatcttattgtcctgtgtggcagttatctgctcaattctcttaaccctgttcattcagccctgggacctatctagtaacttgaacagtaacctactcgtatgtgatcaagggtcaattgatacttgttaaattgattttaaatgttaatgcatattctgggacttgaaagttaacacgatgatgttgtcagaagtgattgttgattgttaagattttcagactttgaaaacttctactttgcaaagctgaattagacagcaaagttctgtagctccctcctggcaaggggtttgagttttctgttgggatcaaggcagtcagcagccatcaagggttcttgcacttgggcaaagaagtcattaatggtaatttgtatcagcaattacagcatctacctcatttctttctttcagtcgcagcgttcaaaggcaggctttattctccttcttgctgggtactgcaagctacacttgcctctcagttttatgtcttcctactccagctgtctggtgtggattttccttctgctccaagcttccttcatttcttcctccttatgcttcctactcttagagtggcctggaagtgttgctgggccagaactgcccccctgggtcctgtccacaggggcggcctctgcccatgctgactctcctcgtgtcattcttgcatgggcacatgtccagggggagataatatgtatgacctggtctatcctgagcacagtgttttaaatcaagaaattgcatgtttattgaagttcagtagaccaaacaagacctaagggtcaggaactcttaaatgtttatcccagtgtggactcagatgtattggggaattttagcaagtcacttaacctctccgtgtccctgtgatcttcctatatagtactgatacggctattttatatgaatctagtactttcacatcttcatgtgacagttttattgaaattaattttcaatagagaaacttgttgccttgcagttttttttatttctgatttttaatatgtatttttacttatgttgatttagaccttcccatttaatagtaacctttcaatgtggttacatttcttaaagagtatttatgttcagtttgaaaccacacaaatttaaattttgggaggctttcttcttcttttacaagtaatgtaaaattgtagtgaagctattggaaaagaaaaggatagaaacatgttagtgctttgacacagcgggagagaattttggaagagatattctaccaactacagatggaatcttcatcatcatgtagacttcagatattcttttagaaaactttacatttacttataatctaaaccttacttgtttaaacaagtcatgaaatgtatagcttaataattgcctttaagaaaattgttgcccaaaacagaaaccgtattgagtatgtaaagccaagtttagttaccaagacctactgatttcctttcatatatgtatggtcacatctctcacctcatctgtcctgtttcttgttttactagtggtcctttggcgtgctcctctgggagctgatgacaagaggagccccaccttatcctgacgtaaacacctttgatataactgtttacttgttgcaagggagaagactcctacaacccgaatactgcccagaccccttgtaagtagtctttctgtacctcttacgttctttacttttacagaaatgcctgccttcaaagggtctcttacagcatgtctttctttttggaacagatatgaagtaatgctaaaatgctggcaccctaaagccgaaatgcgcccatccttttctgaactggtgt

SEQ ID NO: 39121 - DNA, 2300 bp, Homo sapien
tgcttctccttcctcttctctccccaaatgaaccatcagtttttcaatatcatagcttctgtttgccgtccattcacaaaaaacaatgatttgcacattatgaacacccaataaattacttaataataaggtcttgcctctgaacatttatttgatactctcacatttcatttatgtgcagctgtcagattcatcttgctgcacatatttctgatcatgtcatgtcactgttcaaaagttctcaacagttcctcacggaatctgaacgcctatcttaaaccctaaggccttaccactcaaaatgtggtctccagatcaggagcactggcatcagctgggagcctgttattctacaggctgtattctggagaatacagattctccagtctcatgccacatctattgaattaacaacttcgttttcacaagattcccaattgattcatatctacgcagctttgattacatgtttaatctctcataaacttcaagcttcaaaagcagggttgctagatttagcaaataaaagtaaaggatgtccagtaaaatttgaaaacaatgagtaattttttggtttaagtatgtctccactgcttcatgggacatactttttaaaagattgcttatctgcaattcacatttgattaagtgtcctatatttaatatggcaaacctattcaggagggtaggatccatgtctaacatagctttgtattcccctggaatagtacagtgccttccccaactgtttttgtttttttttgttttgctttttgagacagagtcttgctctgtcacccaggctggagtacagtggcgcgacctcggctgactgcaacctccgtctcccgggttgcagggacagggacaacctccgcctctcgggttgcaatgacttctgcaactctcctgcctcagcctcccgagtagctggtattacaggtatgcgccaccacgccccggataatttttgtatttttagtagagacggggtttcttcatgttggccaatctggtcacgaactcctgacctcagatgatctgcccacggaggcctcccaaattgctgggattacaggcctgagctaccgcgcccggccccaactgttcaatatatgtttgtttaatgagtagaaaatgagcttcttgagtatggaagtttctctttttatttcaacagttttggaatacaggtggatttttggtaacatggataagtcctttagcggtaacttctgagattttagtgcacccatcacctgagcagtgtaccctgtacccaatacgtagtaatttatcccctccccagtccccaaagtccattttatcattcttatgcctttgaacccacatagcttagctcccacttataagtgagaacataaaatatttggtttcccattcctgagttacttcacttagaataatggcctccagctccttccaagttgctgcaaaaggcattatttcgttcctttttatggctgagtagtattccatggtgtatatacccacatttgctctatccactcattggttgatggacacttaggttggttccatctctttgcaattgcgaattgtgctgctatgaacatgtatgtctagcttgcttttttccccctcaacactgtatccccagagactaacacagtgccccgcaccccgttaaagaaccaaaaaatatttgttggatgaataaaggagtatatcaagagcaatctttcaattatggagagggtcgtgatgtgtattttaatgaaagccaactatcttctctaatatttgaaaaaacaatgtttaaaaggcttctatttgtacaccttttcacattttagctggcagagttcaggacttgatggaaacataacgaagggctcagaatgtactcatcgcagactgagcccatatggtcacagtggggagagcacgctgcactcaagatgctagcaagcctgcagcaggcggcccagcgagacacggtcccccgcccggccaccaggcgcccgcgcacgcgcacagccgcgctcagtccgcgagggccgggtcgagggaggcggggctcccggggtgcgcgtgcgcggcggcctgagcggcgggcccctcccttagcgggggcgcgcggcgctgaggaccgcacggaaacggggaagtcaggtggccgctgccgccgccgccgccgcggtttgtcgccagaaggaagatggcggatctggaggagcagttgtctgatgaagagaaggtaagagtcgcgggggcgacggcgcgggctgtcaggagccggctcagcccgggcgggt

SEQ ID NO: 39122 - DNA, 2300 bp, Homo sapien
catgccaggatgcacaccaggagaggcaatgatatagggctgacttcccaggagcgcctagtagaaaattagaagattgtgacttagcggagtcatattcatgtccattcattgaagttcattgacagcaaaaagccaggcctccggatgttcatttaaattaagtagtcaatatcctaattcagtgactcgcagagaatctggtgggttatttaatcatcacataaaataggtggttcatgtactcatgttgaggcaggagactaggttctggaggcagggaaactaaggacttccttgaactacattgaaaggaaaaccctaactttccacgcctaagtaacaaaaggaccagaggctacctttgaccttttctgcctagtagatgggaaattggctgtctgtaaccaatcagactgactgcgggtccaatcttcatttgcaactttgtaacttcactccagcctctgaatggttgttgtccacaactaatcagactgtgggcgagtcttcgtttgcatagaagcataacttcattaagtacatcccagcctctgattggttgttttttgcaaccaatcagatgtttgcacaggagtgttacctttgtatcttcatttcagcctctggttggctgctttctgcaaccagtcagactgattgcgggctaccacttcatttacgtgagatgagcatgagttgccaaagggaaacttcttgggggtatttggacccaagaagattctgtattcggcctttgagccgctgctccgcccgctcccacaatgtagagtgtactttcgttttcaataaatccctgctttcgttcttttgtcgcttctctgggtgttttgtccaattctttgttcaaaacgccaagaacctggacaacctgcagtcacgatcctttactggtgacaatattgttttattttactgagattccatgtatcagtgttagacacaaaaatcatttggtcatgtgctgccataaataactataaagaaagtctatgtgtgccaatttcacttattctggcctggatctcactgtagtagatcaaatgtgaggaagaaacagtagccgagagaggctggaattagtaaaaatttaagagtagttccatccattatgtatgccgtaataggccctatatgtgaaaagttaaaggagcttatttaattatgaaggaaactattatacaagtaagcaaaacaatttataataaaatattctttatgctcagaattttaaaaatagatgtagactggaaaacctgcaatttcctcattaccatctaatacatagaaagtcaaatcacttacggacagaaacagacttgaaaatttcagctgagaaaacattttagaataaaagaaacattttattcagcacagtcaaaacaaaacaaaaacaacaaaacaatgtttaaaatggactttctgttagaggtggccgtttcacagtcaaaattatcccagagaattgtttatattaaaaacaggctgagaatagtttgacctctgatcaccaaaaaacctggaggataaacattcatctgtcaagatttctctggaaaatccctgcgctgcttcaaagagacagaacaaaggtaaatagcatctgccacccaaatcttgctgaatagagtgatttatcttcaggcctactagccggcgacaggagcgcacctcctcccttctcctagctgtcccgggtttattcattccctgagcctgaatcctgataagggagcagagtagggtttaagacctcggaccccagaatacaccactgcaattgaattttggttccaccttaaggtaaactacgcagctgctgtgagcctcagtttccctacctatagaaagaggatcgtagtggggaattgttgcaggggttaaatgagattgtacggatcgtggagcagcgcctggcgtgtggtaaacgctcaacttatgcgggttgtaactgcctgaggcgtttccttcggcgcgccacttggccttctctttctaaatattagcataataaatataaatggacccagaacgcgagggggcaggggccacgtgatcgctccacgaaagccacttgtagggacctttagagagttagcaataaggctggagaaggaaaagccggcgcgcccgcggcccgcgcgatttcccgccgagcccgcgtccccggcggcgggcgggctccgggggcgcccgggccgcggcggcggcggcggcgcgagctgcgcctccgggccggtgaatcatcccggcagacaccaagagccgcggcagcagag

SEQ ID NO: 39123 - DNA, 2300 bp, Homo sapien
caaccaatcagatgtttgcacaggagtgttacctttgtatcttcatttcagcctctggttggctgctttctgcaaccagtcagactgattgcgggctaccacttcatttacgtgagatgagcatgagttgccaaagggaaacttcttgggggtatttggacccaagaagattctgtattcggcctttgagccgctgctccgcccgctcccacaatgtagagtgtactttcgttttcaataaatccctgctttcgttcttttgtcgcttctctgggtgttttgtccaattctttgttcaaaacgccaagaacctggacaacctgcagtcacgatcctttactggtgacaatattgttttattttactgagattccatgtatcagtgttagacacaaaaatcatttggtcatgtgctgccataaataactataaagaaagtctatgtgtgccaatttcacttattctggcctggatctcactgtagtagatcaaatgtgaggaagaaacagtagccgagagaggctggaattagtaaaaatttaagagtagttccatccattatgtatgccgtaataggccctatatgtgaaaagttaaaggagcttatttaattatgaaggaaactattatacaagtaagcaaaacaatttataataaaatattctttatgctcagaattttaaaaatagatgtagactggaaaacctgcaatttcctcattaccatctaatacatagaaagtcaaatcacttacggacagaaacagacttgaaaatttcagctgagaaaacattttagaataaaagaaacattttattcagcacagtcaaaacaaaacaaaaacaacaaaacaatgtttaaaatggactttctgttagaggtggccgtttcacagtcaaaattatcccagagaattgtttatattaaaaacaggctgagaatagtttgacctctgatcaccaaaaaacctggaggataaacattcatctgtcaagatttctctggaaaatccctgcgctgcttcaaagagacagaacaaaggtaaatagcatctgccacccaaatcttgctgaatagagtgatttatcttcaggcctactagccggcgacaggagcgcacctcctcccttctcctagctgtcccgggtttattcattccctgagcctgaatcctgataagggagcagagtagggtttaagacctcggaccccagaatacaccactgcaattgaattttggttccaccttaaggtaaactacgcagctgctgtgagcctcagtttccctacctatagaaagaggatcgtagtggggaattgttgcaggggttaaatgagattgtacggatcgtggagcagcgcctggcgtgtggtaaacgctcaacttatgcgggttgtaactgcctgaggcgtttccttcggcgcgccacttggccttctctttctaaatattagcataataaatataaatggacccagaacgcgagggggcaggggccacgtgatcgctccacgaaagccacttgtagggacctttagagagttagcaataaggctggagaaggaaaagccggcgcgcccgcggcccgcgcgatttcccgccgagcccgcgtccccggcggcgggcgggctccgggggcgcccgggccgcggcggcggcggcggcgcgagctgcgcctccgggccggtgaatcatcccggcagacaccaagagccgcggcagcagagaggagcgctgaaacatggctgaagcggccacgggctttctggagcagctcaagtcctgcatagtttggtcttggacgtatctgtggaccgtgtggttcttcatcgtgctattcctggtctacatcctgcgggtgcctttgaaaatcaacgacaacttgagcacaggtaaggcctgggagccgggcccgcggcgcccacccctcccccgccccggaaagttagtgcaactcgcgcggggccgcggccaggcgcgcgctcggggacgcgccggggcccgcgcaccggaggcccgcggctacccgccagcaacgcggcggcttaggcggcggggccgggcagctgggcgcgcgggggcggccggtggccttcacggccccgcggaggaagagctgcgccgcgcacagcccgcaaggcgggccgggccgggccggcagccgccctgctgcgtcgctggtggtcgggagacggagaagaacgggtgtcgcgggcgaaggagttcccaggacaccccctcgggtgtctgcgccggaactccgagggttccccggagttagaccgagtccttcctcacg

SEQ ID NO: 39124 - DNA, 2300 bp, Homo sapien
agcaccacagggctgaagaacagcaaagttagtcccgttagaactcttttagacctccctgcaaggacaagttagaccaggctagctcctgcctcccctctcaggggtgctggctaatgacttctttctccctgggccttccttgccaataacttcagtacagaaactttttcccaaaggggaggggaattggcaaggaaaggagggaattaagttgacaacaaccttttggcagttttcctactataacttctcactgttacttaaaagggaagaaaataggcctctaatgtctgcaactgttttttgaaaaacctaaactgttctagggtggtttgtggctataatttcatgtctcaaaattaatgccaaagtcctcctcccaccccagatcctgctaccctctcataaaaacagcagagaggtgagtgctctctgtgtgcttccccttttatctttctttatgactgaaatgagcatgaaaccaaactgaaaagtccagcatcatcaggtcttctatcatgtgtctagcaaggtacagcccggatggcacgttcatcttcatattttcgctatctcttagaactgcccctacacaaattaacaaaggcatctctgagaaatgctagatttaaattgctagaagacctaacaatgcccttccttaagaagtacacattttcccagtagatattttgcttcttgcctgatctgcacagagcactggatgtgacacttacacatatatacatgggtaattatttaacctgatgaaaatgtgatatacaaatgtatatcatgaaataaaattttaagtgtgtaataaggagaaacattaatattttaaaaactagtgtgtttgaaaatcccaagtgcaaaagtgttgaaaggtgggacctgtgagtggtaattaggtcatgaaggctctgccttcaagaatgaattaattttgttattgagggagtaggtttgttataaaagtgaaagtgggccccctcttgttttctcatgttctcttacccttccaccttccaccaagggatgacagcaagaaggacctccccacatgccagtcccttgatctcaagacttccctgactcctgaactacaagaaataaaatgtgttctttaaaaattacccaatctgtggtattctgttacagcagcacaaaacagactaacactgttaccaacaaatacgtaattccattaaaacatatattcaaacaacttcttaaaggtatagaactttgagaccagaaggtatcctggagacatacttgtctaaagcgaagaagacaatattgcgacaagcagccatccaaaaagatgaaaagcgagaaagccatggtctttccgatgacagactcaaaagggctgagcagcacctattcaaatggtgagacaattctagagtgctgaatcctatccgcctcccagggacacgatcccgagggatactacaaaacaaatgtaaatatgaacatgagttcaagttagtaatcaaaatacttaagttagtatctgaaaggtacaagtttcctaacaaaatgagtacattatctcaagcgttttaaaaagcgttttaatgcagctaaacacctgaggaaaatgcatttccagacttgcactcccagagtatggagattaacaagggaagatatatatgtgtacatatgtatatatcttcaggactgtaagaatttcccagtactgtgaaattaaaatttaaaacaaaaacaaaaacactctaccttgaaatttccagatttaaaggactgtaacccttagctcgaaatttactttgtgtttcggaactctctggagtgttaaggctcgtgtgttttctttgcgggtgtttttttaacgactcagtgggctggctccaagtttgtgaagatcctgttaattacctcctgcatttaccaccgaccaaggatgggaggcacgcggcacttgctgagcatatgtagctttacagggaagggagacgagcaaagatcactgaaaactgcaaccgaaaccctcagaaattccagctctcccctcttccctccggtcccttcgacaatccatttggtgacctgacacgtcatccatacactcccaagagtgccttcgggaacccctctccccactacccaaccagagagacagccccacgcccggcaagacgcaactccgggccacggagggcgccgcccggacagcccggccgggtcagggggcttcgccgccgagcaccctccggcagccgccctcgggcctccgcggccgggcgggagggcgcctccccgac

SEQ ID NO: 39125 - DNA, 2300 bp, Homo sapien
aatcttctctgactaaacttggcttttctgtttgctaagcctggcttttaacccctctgctggatttctgaggtatggcaaatcacttaactataagtaggttgtaggttttatatctatctactcatctgtccatcggtcttatactttctaatttagatatttcattatgttttcattccattaataaaatgcatttccttaaaatatctgtctcttaagaattataaaatacacagcataaaaataaaaagtcttaaaataatgctactcagataattagataagtgctttaaaaatccatgctaactactaaattgtgaaaagcataaaatgttattccaggtgatatttgataatggcagtcagcgtttccacacacttgtaagttttgtgtaaatgtaggtagttattatcaggcattttgagcttactattttaaaacaatcataacattaatgttctaaccatttgcacatcttaattatcaggaagaaattatatcaaattgttacaacttgtggaaggcttcccaatctgtaccctaggttaagataaagagaattaaggcctaataaatgagataggctcacttagcaacagtgacaggtgaagttgatgagaattaacagcttttgactgtagcagattggtggtataatgagctctgcttatggtaaggaagcactgattagacgactgagtgaaatggtactttcttatttattttataaaattattggagatggctgggcgaggtggctcacgcctgtaatcccaacactttgagaggctgaggcgggcggataacctaaggttaggagttcgagatcagcctagccaatgtggcgaaaccccatttctactaaaaatacaaaaattagctgggtgtgatgttgcatgcctgtagtcccagctactctattcaggaggctgaggcaggagaattgcttgaacccaggaggcagaggctgcagtgaggcgagatcacgccactgcactccagcctgagcgacagagtgagactccgccaaaaataaataaaaataagtaaataagtaaataaaattattggagagatctgttaagtgataatagtaatcctagaatttgtagaatttgtattacgcacttttgatattgtattgaaaattcaaaatcacattttatagcattgtcaactttataatttcttttggagaaacctgttcagtggaaaggaaagtagcaaaagcaaaaccaaacaccccactactccagcaaaagcattctaaacagttagtacctcatcttcttcaaagtggtggtaatttggtagtggtggagggtgggggttggaaattgtccaaccattcaggttgcttacaaaaaaagataaaaaaagtaaaaatttatttatgtttcgtcttttggcaaggtaaataattgtatcaagatgaagtagccattgttaaagtttatttaaagtataagctaggatatgctcaagattggcaatggaggaaaaagatggctcagggtatgtggcaatgtgacattaaagattacatcagatatagtgtgtctcagtaatgaccatatgtcctttccagctgatgtctattttaggacttggataaatgagttggaggtcttagatatgctataaaggactgttcttgcatcacctttattaggtttgttttcacattagtcaaatgtatttcaaatggacaaatggataaaatatgcatatgtactatcaaatgaatgaatgtaatgacaaaattgagacaaaaatttggacgctgattcctttcaggttatgtggcttctttcatatcattgagtactaggaagaagtatggatatcttgtgtccttttcacttacaggaataaaataatttattttttctcttatttagagttttaacctaaaaccaaaatttagttttaacctaataattaatacaggagggaaatgggagtaaataacagttattttctgagagacatttctaaggacgactttaaaagaccaggcaaaggagagcagagcccagccgttgccgcttgagagagataagcagaagtgtgggtgtgcttcatgtcacatggcaggaggcttccccagaacggttcgtcagtccagggagccgtttcattttctggctgatagagttgtacttggaaaatactcagtttcctgcttactgcttcattatggattatacaggtaaaattaaatgttaaatattttccagttatgtagaattactttaaaaataatattttgaatttatattttaaaaactacatt

SEQ ID NO: 39126 - DNA, 2300 bp, Homo sapien
cagttattacatgtagaccatggcctctgtttgaaaatatctctaacccaggggccattttctcattctcttttccctcttgcctttctgacggccacatccatccactatttgagtgactatttatgtgacaacatctcatatgcaatttaaaatagatcttatgtaagataatattctggctttaaggttccacccttttgaactgtattatcctttcccacttcctacagttacatttcaacatcattattgatattcccccttggttgtcgatgtgactgtttttgaaggtatacatttttattaattcctgcaattttctgtgattttttttctttctctgatgacctttctcttttaacgattttttttcttcatgttttgagttggtttctattttcccttcatttcagttaaatccttaaatataattttgctgattatttattcattgttcaagaaagaggcattatcgtagtgtgcttaagagcattgctttggatccagactcctgagtttgaagcccagtatatcattcaccacctgtgtgacctcgacaaagtatttaaccatctgtcaaatgtggataaaagtggtatataccttgtagggttattatgaagattaaatgggtttatacatgtaaaggacccaggatagtgcctggcacatagtaaacactcagtaaatattagctattgttattctttcccgcaacagatgatttgttctttatcttatttagcatcatcaaatgttcttcttaatggctcagcatttttagtaagctaaagatcaagttaccctgaataaactgtggtacattcatacagtggaatcttatgcagtctttaaaaggatgaggtagatcctacatatactgaccagaaaaagtactaatgatatttttagatgttaaagtaatatgtggttccactttcatagcagaatttaatatttaaaaactgtattgagatcaagacatgtctttgtgaacacaagaaattaattagaaaaggcatataccttggatgaatgggtggagaggagacttgaactattgaactttctactatatatgattttaaaagttacgtatatatgtatatatatttactttttgtgcatttcagtattttaaaaacataacaaaactctttttttggcttgtgttggatagctaatgaaagttcatatgcttctagtactttttctttaaaaacagatttataagaatatggtaacacaggaagacattttttgttccagtgagtcaagagataaaatattttcaattatttctttgtgtgggtagatcaaaaagaaatgggttggtcacaaatgcttactcatacagaggtatacacaggtgtgtgcacacagccttaaaatgactgagttgctctggaaaatgacagaaattcatgtaaggcacgatgaagaaataggagaaatacatgtatgtaaatatattcctagagcagcgtttttcacatttgaacaatagttgcaaaatagctagtaatggaattgcctgcatttgagtactcactgtgtgccaagcagtgttctaagtacttaagattactattttactgttacatttgtatgtatttatgtgcctagaatatatgtgtaatagtatacatattttcacatacttgtgattgagtgtacaatccttgatctgtcaatctaccataagctttgagaagataacaatgaactcttctgtaattacttctaaagacagataatgtttctcatttctgatattcttaattcccttgaaaagttctttctatatgctgcgcaaaaccaagaagactgatatgcatgatgtctttgtggttaattgctataaagccaatatttaaatttctttgagtcctcttttactgcctggtatcatgggatgaagagctgcgcaggaggggagtgtatacgtggctctcggtcttgtgcattttgtgacaaaggaattcccctttcaatcacgctgctctcctggagcccctggagcctctggctcaagcagcgcagtcggtctgtgcagtgtccctgacgtcatccagcgtatgcataagccctgctattgtcttactgctacagcagggctggggattgcagtatccgctgttgctgctgctcccagtcctgcccctgctgctacctagtccagcctcaccgcatcccagaagaggcacgtcggccttcatttgcctagtggattttcaaaagcagctcttcggtttttggtgctgttaagagaccttgcatttcaatcacaccgggag

SEQ ID NO: 39127 - DNA, 2300 bp, Homo sapien
agctgttaacacttaagccatccgtggatggcagagctaaaagggcactgtaacatgcctcctggggcttcaggagtcgcagggatcctgcctggatgctgccacaaggcctgcacagagttcgctcctaccagtgcccaaaagtgctcactccagctcctgtacccactcacctgggtgctccctcccacaaggggtggaaggcagtgggtctgagtggagtttgatcctgccagtgcccaagtggccagctgactccagcgctcatgcactccagttcctaccttgtttgctcgcatactccctcccataaggagttgagagcagcaggctgagtaaacaaggcacctgttgcgagacccattaaggggtcaaggaaatatcctgcctcactagcaagaaatactaagaagttttgggtgtatgtgtatacatacacatatattggattggctaatttgtaaattggtatcctgatcagctaaatcccaaattgataatctggaaatgaaaaatctactttcagtttcaccacagatttatcaagatagtttctgtaccacctttgttttataatctattttttaaattgttactgaaacaccggaggtttggtctaggtcctgctgctcgccacactgaaagccaatcactaaggtggcaagtattgccaaggaagaaggctttaatcaggtgctgtagctgaggagatgggagttcagtctcaaatccatctccctgactgattaaaccaggagtttatatagcaggtaagcaatgtaacaatgtgtaagaaaccaggaagttgggaggggcaaagaagcaaacatggtgaatgaggggatctcttggcatatggtgcagggatctggtttcagttctttggtactttgtgtgagaggcctaaaggtagtttcctgaggaaggaactcaagagaaatcaaatataagtttcaacttttttaatgccagaagggtcaatttctatgtttatcaaaaagaacagtctatggggcaattgggctggtttcaaaatgagatatcttgaaattctcttatttttgagaaagatcaggataaattattgacttatgggaatcccctgcaatttacgaagcaactgttctagaaaactctaaaggcagggagatgacaggatgtatgttcttctccagctctcttttttcacactggttcaggcctcacacagacaggcctggaagcaggaaaaagtacaatgtggaggagagcaaacaaacacatctttccatctctcacttcttcctgacatccagaggagtggatggcagggaaacaatgggctgtgctgagaggctgaacttctcagtcttccaattagtccaaatatcttaatttgggagcaaagaaacgtgtagccactacattatctcgctctacctcccattctaatccttctctacctacctccactcctttatttctgtaggtacaacttctaccatgaaacaaaataaaaattgtcactatgttaattgagttcaatggcatataatatatattcaaaataagaaaaaataaacctttgaactatgagtgcttatgaacttaagtaacattaaggatactggccattagtataaattttcatgaataggatatattttaatagatttgcaatatgttttagagtaattattttcatctttattcctcacaaaaatccttaggaaggaataaaaattatcctcaccatattagcataccactggtatcacctttatcaacaaaagaaagtttttaaatattcagttacttggatttaagctagaaagaatgaacagcacccaaaactactaaattcacccactaacccaaattgtgatagcatcacatagttcagctgcaatactaattaatttgaaattattctatgagattatacatctgtaccaaaaagaatacaaatacaaaaagggcactattcaccatagcaccactgcttactggccaacaaacctgtcaactaactacaactcaatgtcttaggagaagccaatcacatctaattttgcaggggttctaaatagaacaccattgtttatgttgtggagtgctggtttccttaactttacctgacagaactacaaagatttaggaggtttaatctctcaaaatcttattaaaacaaatcctattactctgcctcattatttgaagtcacagtgtatctaatgacttttcttttacatgtactaatcaggcctggccacccacagatatttgtaaattgcattatcttctgtctaactagctcacag

SEQ ID NO: 39128 - DNA, 2300 bp, Homo sapien
aaggccacagtaccttccaggcccgaagactgggctatcagggtggattaagaaattgtcaatttcatgcaaagcaacatttctgatttagttactgaaaatgtgcttttctatagaaagcacattacgagataagttagtctagcagggacttcgcctcagactgttttctcagacctccaaagtaaggtagggaacacaccggaatagtttaatccatcatttgtatttttccatgtgataatagagaatatcatcttctctcatttcattgttctttcaaccttactaacttctctcttccttcctgtcagcatctattaagtaaggctgcaactttacttctgcccttcctcatttaccaaaggacaagggaatgaaaaatggaagctctaatggcttagtttacactcctgctaatttcaaacagatttccagattgcacagcttttaaaatgaaagaacttttcctcagaatgaccctgtgacagacaaacgctaaagtgactccaacgatccctgctctgctggtattcataacttcttttttttttttttggctggtattcataacttcttttttttttttttttttttttttttgagacggagtctcactctgtcgcccaggatggagtgcagtggcgtgatcttggctcactgcaagctccgcctcccgggttcacgccattctcctgcctcagcctcccgagtagctgggactacaggcacccagttattcataactttatgtgacccctttcccttgaatgtgggtgggacatggagtacgggacttgcttctaacaaacaactatgtaagattctatgttggtggcagacagagagatcctccttactggcttaatgaagtggccacgtggaccacaggcagcctctacaacagccagtcagaaactcaagccctcagtgctacagcaatgattactgccaacagcctgagtgagactggaagcagattctcccctgactgaacttgcaattgagatagcagcctggtcaacaccttgattatagccttgtgaggcccagagcagaagacccatctaagccatgcctggactcctgacacagaaactgagagataagaagtgtgtgttaaactgctatatttacggaaatttgttaggcagcaatataaaactgataccatcaccaacataataattcatgaaaataaaaatcaacattgacatctgataatgctggctaattgcagtatgccgagaaagggtgctaagatacaccaactctatgtgccccgagcgtttctttcccgattgttcataaataaaatacaagttctccctctgctaccatgacatgctatttcacatgctggcatgtaactgtctttgcaaatgtgctaatactaaagtagatgctgagaggagctgtttttttaatatggaaataaaatatcttcatttcacccagtaagtggttttttttctagtcctattttaaatacacaatatttgcatgttttttaaaaatcagttttacatcaaggcagagcatcagttcgatcaaggattaaaagcacagcacgagcacttcttttcctcatttgttgcttctgctgcccctctccttgcccttggccctggtctccttggggtctgataaggtcttgaggttttatgtatcacaatccccttgataaatcctgtgtcatttattcttgaggaaaagacatggaagtataattttagacccattcctatggcaagaaaccctcataaatcattctgtctactcttccttccactcccgatgtcgcctaggcaactttacaggtacactgtttctgctgtactgggcatctggctctgctgaggagtggagctgagcacattctttcctcagttgtggtctgggaaactatactggcgcaaactgtattggtgggaacaatgcagtgttcagtcttcatggcaccttctcccttgctggagggaggccatctgtcaaccttccctgatatcatgaaggaccatccaacgcccagtcacacacaaaccttaataaccctcaaggacaagtggagcaagatctcagacgatctgttcccttttagttacaggaaacttgataatgaagatctccaccctggtcaagaacagaggaaagacctaagtaagtcttattatatttttaattatttaaaatatgctttcatttatgattgaagactattttacaagtttgtctgtttctcataaactatttaataccaggaagaaaaaataaatgtctatttgtacacaaagcaaacc

SEQ ID NO: 39129 - DNA, 2300 bp, Homo sapien
caatgggagagaaagtacgacatagaaaacatgaaagacagcacacacgctcaaaaaaagcagtaattattctgttactctctataaacacgaatgggataaacatagcaatcaaaagtataaaaccctcagatttgaataaagacaatattcatcaaaaattttacagatccaaatgatccatcaaaaacttataggaagcttgattataaaatttagacaacaataaaccagttaaatatgaatcacaataagttagagtaggtattcttaacatatgttaaaaaattcaaggaagataaatataagagacattatatactcataataacatatcagtaagtcataataatcaccaacataaacgcacccaacaacaaaacctcaaaatatataaaggaacaaataactgagcatgcaaaaaacagattaataaacagttggaggtgaatattctatcacattcttcttagaaactgatagagcaaagagacaaaataagctgatatatgagatttgaataatatggtttataagctcaaactagtaaatacatacaaatctttatacccaacagggattatattcccttcaaacacagatataacatttattaaacctgaccatatgctaggcctcaggggaagtgaccataaattctccccaaatcaatatcatatgatgtatgctttctaagcataatgtaaagaaaaaaatcaatcaatgacgaggggtaaaacatactatacagggtaaaatgaaatttaaaagaaatttaaaaatgcttaggatcaaatggtaaaaaggcaacaaacacagaggatagagggggagaaggatgaggaggagaagaaacaataatacaaatatggaaagaaaaaacagaataaaaacaaaaaagttgaggaaataaactaaacctaattgtttttaaaagactggcaaaatagacaacctctgccaagactaatcaggcaaaataagagtaaaaactagccaaataaaatacaaaatgaaaaggaagaaaaaaactacatagtatttttaaattatgaaataacatcatgaaaagctatatgtaataaatttttaaaatatataaatatgtatattaaatatagacgtgcttgaagcagagcctagtactgagatacatgggcatagtcaggtattgctcgtaagaatttaatcataggcagccattctgaagagtgaaattgcaggactcactggaatctagcacgtatataatcccacagcctaatgaatgtttctcacatgtctacaaggatgttcattgcagcactgctgggataacaggaagttggaagaaacctggagttccttcactagaggaaaggttaagtaaaatagagtaagaacacaacatggaatatgatgcagcagttagaaactgcaaactagatgcaagaggtacatagagcaaaaatggacagattgaaaaacagtgttgagtaaaacagggaagaagcagagatctatagacatataaattaaacacacaagacactacattctgtattctgcaaagactgttatagtcacagtttctctgaaatcaattagattttatcttcctgaagttcctcaccaactatattttaagagggatctaatcaaatcccccaaaatgtcccaacaaagtatacatttgtcatagtccacaaaaagatcaagaagtcactacttaagataacaatgaataggtgctctctcaaatgtaacatgttcaaaactgaactcgtaattttctctcaaaaaacctctctcaccccagacttccacatcttagctgacacaaactccttccctttcaaggcaaatatttagaatcagccctgacttctcttttttcttgtactgcatatctgattaattagcaaattctgctagtcctgccttcaaaatatatctagaatctgatcacttcacaccaccttctctgctaccactctggcctgagctgccattgtggcttgccaagattaatacaagagcctgctgaccgactcctccgcttctctgctgctacacagcagcctgtaaaaattaagactggtcatgtcactcctctgttcaaaaccttgcaaagctctccatttcacccagagtaaaagctgaaatccttactgtgatcaataagccctgtatgatctttaagctccctcccttctctcccctgggcttattctgttctatccacccaagattcctttgctgttgcttgaacactccagacatactgctgcctcagggcctttgaaaatacatcacatgac

SEQ ID NO: 39130 - DNA, 2300 bp, Homo sapien
aatattaggcacaggtgtaccttgaatctgaaacaaacaaaagtaacaaaaagtgaaagccatgctcttttttgttgtttttgttttgagacagggtatagctctgtcgcctagactggagtacagtgacatgatcacagctcactgcagtctcaacttcccatgctcaagtgatcctcccacctcagcctcccaagtagctgggactacaggtgtgaaccactatgcctggccaattttttctattttttgtagagatgaggtctcactttgtcacctaggttgtttcttgaattcctgggctcaagtgatcctcttgccttggcctcccaaagtgctgggattacaggtgtgagccaccatgcccagccttttatttgtttattttaattcagaggaaagataaatatgaaaccacaaatggaatttcaattaatataacttactttatgctgagactatttggcataggagatacagagagtttttttaaaactggaaaatggttcgtgaaggatgaaagactaaaagttgaaattgcaattagtcccaatagataaaagtgtaaggaaatataaatgattaaagtgtacaaaaagatcagaatgacagatagctaaataagtacgtacaagtcaggtataaacttagaagcaggttttcagggtggctaaacaccagaggaagctaaagtctcccacattacaggatttaatgtatgactctattgtccaaaaaaacagtgaagaatgatgatagggaaagtaaaagcaggtatcacactaacattatgggatagtgacaaggacatggtattgcaggttcagttctgccactcatttgttaggtggctcttaagaaaatcgtttaactttgctgggcccatatttctcacctataaaagaaaaagattttgggaggttgaccttggcagtcctgtactgttgttcagtttttcgtctgtatcttgtggtagtactgttttgagcagaaaatattgtattaatacgttgctgaggtataattattcattcctattttatatttccctttagtattttttactttttaaaagaatgtatcaagtcaatcccaagcaaatcctggaaataattatgtggtttttgaccacaggaaaaaagatggtgattggggatctaacaatagatttattaagaaaaaattgtgtcaaataaacacagatgagatagtggatatgaaaatactgtttgtctatacaatagtatttaaatgtttatcttattagtgtaaatggcccttttcctttgtctttctgaaataggagaataccataaatgtgtttacatctttatttaaacaaagcatttggtaatattttaaatgctgtcctttcaggtaccatggaggaatatggatataatacctaattaataagtggttgcagacatatcattgcagactgttgcaaattgagggtgatctctagaatcctattcccagattctctcattggtattgccatggtcagtatttctaaaaatcagatcttggaaacacatagcacagtttaaaatcatgtgctcagatttgttctagatttgtgatattggcatatttcttaaccattctgtgcttcattttccccatctataaaacagggctaacagtcctacctcataggactgctctgaggattaaataggataatgtatataactgattaacaccagtgcctggaagttagcctttagtaagtgttggcagtcattttgatgatgataatggtcatttagggaagaagatatggagggagcaaagctgtgcatggtagcttgaatcagaaaaatgactaataagctggaatgacgtactgaaactattaagatttaatggctcagatttaattttaagatttgaaatttaatggaatcagatgtgaaatcctgcctgtatgtttttatttttattttttaatgttcatggcttacataaaagggagaaaagacctgactttagctgaagtctatttgaatagaattggaggtggggggtattgttgaccacacaatcataggaacaaacagagtcccagctgctcaacaccagggccgttctagctggtattcagagacgtagagtggcacagctcctcagactgcacgttttccctgagctctctactggtcagtttgggggatttagaggattgttttcatttctaattctcatattttgaaatcacatgtggccaggtaataaaaatagatgagaagttctgaagaatatgtcagttgaggaactggaggtatttatcctac

SEQ ID NO: 39131 - DNA, 2300 bp, Homo sapien
ttccttcaacagtattacccacatctgtcatctgattgtgtctacatctgtcaccatcttttttccatctgcacttcccattaactcctcctacccctcaaagcctcacctttccatgaaatggctctaaaatcctaactattaaattcattaggcactttaaaatccttatcttccgtatctttgctgtattttctgcaacttgtttttttttttttttcttttgagacagggtctcactctgtcacccaggctggagtgtaatcagggctcactgcagcctcgacctcctgggcccaagtgatcctcccacctcagccttccaagtagctgggactacaggcacatgccaccatgcccacctaattaaaaatttttttttgtggagctcaggtcttactatgttactcaggctagccttgaactcctgggctcaaataatcctcctgacctggcctcccaaattgctgggattacagaaaacttggattttctaacaacgatgtctttgggcatttccacttcccactgcctataagctcttaaaccttcattcaaggattatcgcaatctggagtcccaacttcggtaggtcgactttggacttttgtttcctcatctactaaatcaaagaatcagattctcatcattttttcttctggctcaaaattacatttccaagccttccctggtccttctcagctggaacccatcttcctcctctgaatatgggtcaaaggttatttatacctatcacgtatcgcatcaattcatccaagaaatcatttgcacatcccctttatgttgagagttgtgtcagaggaagaagagggaaagagatagacctggcccctgccaccaagagcagatatccacgagacagacctggctcctgccaccaagagcagatatccacaagatagacctggcccctgccaagagcagtgctaccagtgtgtgtacatggagttcaagctcttatgagatacttcaagagccggagctagctacatatcccattagggctttgtacaaagtaggtacaaagaagggtttgccaaaagcataaaaagcccttgtgcacctaaatgttacctgcccacctgactatgctcttggggccagcaggaagatcccctgagaaggagatgtggccaggtgctttccccgaatactgcttattttaacactagtggggaaagacttcagattctcaataaggggaaaaacaagctacataaaggacaggccctttgtttttaggcactggagtgagattttaaatagtggtatttttcactttagatagaggattcaagtttatttatttttcttttcttttctttttttttttttttgcttaagtaaagccagatgctaagcaagatatgaatcatatggaaagcttttaaaggtggtgaggacaaatgatcactttggttcagatcactaaaatactcaaagaatgctcacactgaagcatcaggaatgcaaacatgataaaaaatttaaaagtacccttacgagaaaacattttaaaaatggcaatgacagtaaactggtcaggttctaccacagactgttgggtctgcggcttcttatcaggagttttctcacaagaagttttcaaacagcaaaaccaaaaggattcctggaactacagtgttgaacactattcagtaagtagagtctctgaaccagaacaacctgccatggcacacacattttgcttcattcatgcttccagtgattcctcttgcgagctttttctgtgcatttggcctagaaggacagtttggggttgacaatgatggtcctgttgaacccaagagattccattttccaagcctctgcctataaggggttctcagggcctgctgagatgtgttccatcagcacagaaaccatgatgtggcattcagtagatccaggttcccaggaaactcaaggtaaatccaaaggtttatttgggacatcaacaattttagggttggaagacacaggaggatacaaatgattgctgtaatacacaaaagttttatttttgactttcttcttttctgaaggcaaaataaaatagaactgaacatcagtgaattttgtacaacaaaaacagcttttaatatggaatagtccatgaacattttaaaatctcggaatggcttccctttttcaaagtcatgctttcttgcggtccacaaggagttggcacagaggagatggtggcagcggcgggtgaggtgagtggaggacagggcttctctcagatccgtgttagctggtgccacagactggatggg

SEQ ID NO: 39132 - DNA, 2300 bp, Homo sapien
tttcagccttttgcctttcaccaaaaccaatttcttctctgtgagacatgtggcactcctcctcctcctgccccaggatgaagtcctctggcgtggatttaattagcttttggggatggtccatttcttttccaggaggtctgtttcaggtttaggtcattccattggcctcaccatcaactgaagggcaggtctcctggccactcactaattccctgggcggagagcaagggcctgtaagctgatggtcacattccatgtacttctaacaccccttagctgtgaggacacgatgtgctgagatgggtggaacttgagttggagttttttaggtggtttcaaatcataatctccatgagagaatcatacaactgtctacctttcccaacatacacatccacactcctactttattcacggtagaagtgaaattttggcaatgtttctggttcctcggagccaaccaccttttctttcctaagtgtctggatttacttcaagaaaatgcgggacaaagaagggtggaggtaagctttcgtttattcccctgcttcacgggggaaggaggtttgtgagcataagcatgtaagtacatgagaggcgtgttgctctttggtgcctatcataccctccccatggccggcgtgcacacacggcgagcagaaacgctcccccgccccgctgcctgccgccccacgcgccctccctgcacctcccgcccgaccgacgcagaccaagcagaacttccctgggtcgcggcccagcgatacggagcggccctggcgaggagccctgctcttcccgagtcgtgggtggcgcggtgcttgtttccctcccctccctttccggacccaaacggggatgtatctgggtcagcctgggaggggccggacctgccagggaccagcgtgggggaagggggtggcgatgacagcatctttcaggtttttggcgtctctgagcttcgcctcgtccagcctctcaccgcgctcgctgccggcgagggctgacgctctggccagtccaggcccgagggtgggctggagagagggagagcccgtccttccgatctgggcggcaccccctcccccacgccctgcgaacaattcgcctcccacacatacacacaggcgcatactctattccccagagcacgctcctcgggcgggcagtgagtccctccgccccaggaaaagagcaatggaacagttcacggccgccacgagttcctggtcttccttcctttccggtgataaacggcgcggctacaagccagctactgctcaaaatgctccacccgcgggcccaagcccctctctcttggctgggcgggggcccaggtccaggaccgagggtcccttaacctccacaaggcgcacaggctgagcgcccaggcggcaggaggtgcaagggcgcacacccccggcgaacgcctggctgcctcggttcctctctatgtgatcttttgcgctccgcagctccggagaggagctgggtgtgcgtaaaaactgcatctttcctgggtgctttggcagatactgctgggttaggtcccgagggtcatggaccctccaagttcccctccctatgggctctgtatttaagcccagcaccaaggaatcaaagccaacaggtcatttcgcagaggcctggcccctccctaaccttgccctgcatagacgcggcagctccaaatttacaagtgctagctcttcatcccagcttcagggagagaagcgaagcaatgagttgagaatcatctctggattcttgtatcccatgcatagtaatctccttatcccctggcccccttcctcgtttcctcacattgcacgctcagggacttgtttgccagcggatggcctcggcaatccggaacgcacgctccgagagcccacggatgctctttggcctggagcttccctaaaggttcctgtattcgcgtgtgctcgtaaccatgcagcgatgttcccccttccccgcctcacctcatccccagacatctcttgccatcatttcatgcacccgtgtctaaaaccccgcgtttctccccacccccgccaggcgcagcaccccctccctcggctgcgcccggaggggagcagagcggacggggcgcgcgggaggcgcgcagagctttcgggctgcaggcgctcgctgcgcctggggaattgggctgtgggcgaggcggtccgggctggcctttatcgctcgctgggcccatcgtttgaaactttatcagcgagtctcgccactcgtcgcagacgcgagcggggggcgggggcgcggcgaggcgccgg

SEQ ID NO: 39133 - DNA, 2300 bp, Homo sapien
tggataactcccacatttatatttccaagaccaggcttcctcaaggtccacacatgaatatccaactaaccacttaacagctacacttggctgcttggttttgaatatgttaatttggggatgcctattaaatcttcacgtttatccactggtcttcccccatctcagtaaatgcaatgactacttagccagttgctcaaaccaaaaaccttctctacaatagacctagagtgtctttaaatacatacacacatcagaacatgtctttcattagcttaaaaacatttcactgttcaattgctttcagtaaaatccagattcctacttaaggcccacaaggacctctcatcacacacgcctatccttacgaagctgtagcctcaggccttctttctggtccaagcaggacaagaactaaggtaagtgaggtgacccaggagcaaaatttaaaaaggcactcactgaatttgcaggaccctgacagtacttccttaaactttgcttcttaggggactcacttgccccagcctcacttgccccatcctggtcctgagttgcttttttcttgccttaggaccttggcactattcctgtccactgccaggaaagctctattctcccactcttatatggcttgttatttacgactctgcacagttctgactatcctatctaaaatctacctcttacattgagaaagaccttattctaagcctattacttcatttagtcctcataacaattctatttggtgggtactatcatcacctccattctacagataagttagctggtacccagatagatgctaagtaaattgcctaagggcacacagctacagctagtgattcccccaggaaacacaaaagtggtttgattccagaaacagagcacacttgtttcttttgaagcacttacaatctgcaatagtgtttttgtttccttgcatattgtctatctctacttattaaagtgagctccataaggctccatggtttatctttgacgttgtctccccaaacctagtagcacttggctgtgctaagtaatccctagcatttattgaatgaatgcatttagaaagacagatgtggcacgcaaatagctaaactacttaaaaatacttacctctgagcctctaaagtaaataatttcaaaatcttttatcagagaatctgcaagaaaaaaaccgcaaaagctttcaaataatagtgcatggctattatcttgagatacatataatatgccctgtttcttggtggatctacttttctgtggtggcaaagaaaatcactgtgttaccaacatctagaagttctaccatctagaaccatgtagaaaggtgagttcgagcttgggccacttccacctggagttgtttgtattatttgctctctggacgtttaagtcatttctttctttctggctctttggatccactgtacccggaaaccccctcctttcatattttcctctaggacatctacacttcatagcggggaagtgttttgatggtctgaagcttctaaatctaaggtgagatctaagatcacatgaaatgtaaaggaagaattctttggggcagtattttctcctggctccttcgtcggctcctacttgcgtaagggcttcttgaatgtctgagtggtgctcctgagagaggtgttactacgaagagtccgtctcccaggggatacagatttaacagacgtttggcagggggcagatgaaaaggatggcggggaaagtctagtcttacttgccgttaaatcctagtgtgctcctgccacaagtaaggcattccttgcagagcaagaatttcatcatttcatcaagcaaatactttaaagaggtcgaaaggtaagtccctgagaggaactggaagtgccagcagaagcctggcgcacgaacttcgtcaccagtgtcagacacgccaggttttcacctcaagaagcctcaaggttagggagggacggggcagggaggagagcagcgcgccgctgtgcgcctgcgctggagggctccagactggagcgcttccacggcgctccttcccgcgcatctctacgtacgccccaccccggtgcgcatgcgcccggagagctgaagggcgcgcggtgccgacagggagcttccttggctggcatggcggcgagcgcgctgcgaggcctgccagtggctggcggaggcgagagtagcgagagcgaggatgatggctgggagattgggtatctcgaccggacgtctcaggtagcggaggaggccttgtcttgaccacacctggtttcagcctcccctgg

SEQ ID NO: 39134 - DNA, 2300 bp, Homo sapien
ttgattagaagcagtattacacagtgataggagtaatggtttagaactagactcaggtttgaatcttagctctatcattataggcatttacttaacttttcttgtttgcttaactgaaaactgaagataataacacctatttacatggttgttataagggttatatgaataatgtctggcaaatagtaagaactcaagtaactgtttcactctttccagaaggagattggctgaaaaatatttggagtctcctccagccatattccttggtcagcttctatgatcctctttggagcttaattcttaatccctttattttcacttgcttgttgataacaaagaagaactaattattaatttatttcaaaatgcatgtattatatttgatgggccacactaacagttataaaccaaacaacagattgggaatggggaagtggatgtggtgagttcaatcacatgtctgggaaaagtcaatagtgaagacagagtctcacaattttttgtcataatggagagatgaaaacacaggtagaggatttcaaacaacagagtggatggtgagttaaaaatgctgaaattctttcctggtgtctaacttaatgcaatgtggtttatctctttgctcttttctctactattcaaatttaggataataaagattaaatgtttctaaatcttactttacaatatcaagaaaaaaaggtatgcttttgcccacggaagggcaaagcagagctatgaaaacctgctgaacacattctttattttcaacacaggttcttgtctttccatcatgaaatgcacattttatttgtactgtatttgggtgaccacaagtcaacaacaagataattcacaagacccttgccttagatgtgtcggcaataaagtaatcaggccaaaatttttactttcctttgaatttttcaattcaaacacaatgtatgcttgcttttacacagtagggttcagggattagagggttggctctttaaaaaccgtcagagacacaggcaatcctacacaaaattctcagaaggaaggcgcctacgcctgggaatgcccagatgcccctcagagagttgaagatggcgtttctctgagtcaggtcaaagttaacacattaccttcgcttcaaagactgcttggcttcctttcggtggattagtcaagatgttttgctgactgagactaggaaatctataggagggcgggttagtttacattgttccttgtcattatcgctaaaacactccaaagccttccttaaaaatgcgcactgggctaaaaaggatagacaaggaacacatcctgggccggtaattacgcaaagcattatctcctcttacctccttgcagatttttttttctctttcagtacgtgtcctaagatttctgtgccacccttggagttcactcacctaaacctgaaactaataaagcttggttcttttctccgacacgcaaaggaagcgctaaggtaaatgcatcagacccacactgccgcggaacttttcggctctctaaggctgtattttgatatacgaaaggcacattttccttcccttttcaaaatgcaccttgcaaacgtaacaggaacccgactaggatcatcgggaaaaggaggaggaggaggaaggcaggctccggggaagctggtggcagcgggtcctgggtctggcggaccctgacgcgaaggagggtctaggaagctctccggggagccggttctcccgccggtggcttcttctgtcctccagcgttgccaactggacctaaagagaggccgcgactgtcgcccacctgcgggatgggcctggtgctgggcggtaaggacacggacctggaaggagcgcgcgcgagggagggaggctgggagtcagaatcgggaaagggaggtgcggggcggcgagggagcgaaggaggagaggaggaaggagcgggaggggtgctggcgggggtgcgtagtgggtggagaaagccgctagagcaaatttggggccggaccaggcagcactcggcttttaacctgggcagtgaaggcgggggaaagagcaaaaggaaggggtggtgtgcggagtaggggtgggtggggggaattggaagcaaatgacatcacagcaggtcagagaaaaagggttgagcggcaggcacccagagtagtaggtctttggcattaggagcttgagcccagacggccctagcagggaccccagcgcccgagagaccatgcagaggtcgcctctggaaaaggccagcgttgtctccaaactttttttcaggtgagaaggtggcca

SEQ ID NO: 39135 - DNA, 2300 bp, Homo sapien
atagaattttagcattctttaccaaacagctgtgttgaaagggatctgacacacactagatgctagtgttagcagccctccacaagtacaactagattgagaggtggctgtgattgtttctagccttctagattttaaattttcatagcatccagaagagccatttctgtctgagaagagattcatttacagtgttcaaggagttcttttgaaaatgaaaatgcattgtgtctatagtaacaagaaggaattgagaatatactatcatgaatatttgtaaaaagtagactatttggtaatgttactctcaagtatcctaaactggtttcttttcaaggttaatttgactaaaactgtggcatcttagaatcttcaagaaactaaagtgattttattttgtaattgattagtatatgggaagtgccatatagaatacattttaactaaactattaatagtttctgcttagtagatgccaggtactgttttaagtatgttttgtgcccttattcatttcctatatataatattaatttttcatttacttttccagctttcattttgggttgacagaaagtcagtccttcccatcctgagtgaaacgaatgggaaaatatgagtcggaagtgctggattttactcctcccttaccattgtttctgagaccacaaattacttcagcctctctgagatctggaaaatggaaagagcgatttacttatctctctgaggtcctgtctacattttttttttttctagacacagtcttgctctgttgcccaggcagcaatgcagtggcacagtcacagctcactgggctcaggtgatcctctcacctcagcctcccaagtagctgagaatacaggtgcctgccaccctatctgtctaattttttgtattttttgtacaggcagggtttcaccatgttgcccaggctggcctcgaactcctgggctcaagtgatctgcccaccctggcctcccaaagtgctgggattaccagcatgagccactgcgcctggccctgtctacataatcttatgaacattttacatatgcataatttaaaggtcatttaagggcttttaaccttttgtattatgaaatagatatactaaaatatatactacttatgtttacagattaattaataatttaaaataaaataaccatgtaaccactgactaggccaagaaataaaatattctcagctctcagaatgtgactgtgtggtccgtcccccttatcgcaaacccttccctttggaagtaaccactactctttcatgataatcatttcttagcttttctttatagttttactccctgtgtatgaatccctaaattatagatttagtgttgcctgttttgaactttacatgatgaaatcacattgtatataatcttttatgatttgcttcttaatatattgtttgtgagtcttccatgttgtaaaagttgtcatttgttcgctttctatttgttgtatgaacatactcttatttattcatttattctattgttgatggacattgggttgattccatttgagacttgttatagaacaaggaatgttggatcattttgagtgtgttcaaacttatcaaataataccgaacagttttccagagttgttcactccccaagcaatttaagaacattcccattataccacatctttgctaatgctttataacttcagacttttttagttttgccaatttgtataaatttttgtcaaaagcttgaatcactgaatttccttttttattatagcttgtctgatcccagtgaaacaatctcccagtaagaagaaaatcatcatcattttagaaaatttagaaaaatcttcactgtcggagttattgagggactttttggcacctcttgaaaatcgcagcactgaaagcccctgcactttccaaaaaggtaacgctaataaagggaccatgctgagaagcaagcttctgtaatattctaatctttctgtttcccagagtaccagttatacttcatgttctttacgttattttaatttgaatctgtcccataacataactcactgaggatgggccattgctttttggtttgtttcaggaaatggactgtccgaatgttattactttcatgagaactgctttctgatgggaaccatcgccaaggcctgtctccagggctccgacttgctggtgcagcagcatttccgctgggtgcagctgcggtgggatggcgagcccatgcaaggactgctgcagaggttcttacgaaggaaagttgtgaataaggtaacaaacagcaagtg

SEQ ID NO: 39136 - DNA, 2300 bp, Homo sapien
gtatccctgcagacttgtggccccattgccttactgcttagaggcagaacctcagcagcactttctagggtagtctttcctgtgtctctggggaagttcttgctccaggtttggtccttgcctgcacctccaccgtaagccttttattgaaggtgtactaataattgaacagtattccaactcagagaatattacgggaggctaccagacatgatatctttcagagcctaaaacccagtcccaagcccaacatcaaggagccccttaaaggaccactgccctcttagctcatggtctgaatcctggtggtcatgcctggctttcctccacttcccagaagtgctcaccaaccttccttagtctccttagaggccaaacctcatgtcttttttctttttaaccttgagacagggtttcgctctgttgcccaggatggggtgcagtggcatgatcttggctcactgcaacctccacctcccgggttcaagcgattctcctgcctcaacctcccaagtaactggtattacaggcacccaccaccacacctggctaatttttgtatttttagtggagatggggtttcaccgtatttgccagtctagtcttgaacgcctgacctcaagtgatccgcccaccttggcctcccaaagtgctgggattaaaggcgtgagccaccacgtgcggcccaaagctcaagtcttaaaggcctagggtaaggaaaaagtttagttcatctcttatgctaagagcttttcttcaagccttccttttatatcccacaatctgcctccttgtaatgatggactggggcatttttactatcttcacagaagtccatcccagctaccataaaggatgggccttttcctgtgatctcaaagggacaacctcatcagagtacaagagagagacaacacagagatacacacacacattcttacattgtcctgttctagattatagagagaacaaactcaaaacttctctaagtctgggtggctcaatcttcacttgagcaatatcaactgtatcagttaggttggaccctcacctgtccaagtcctttccggcaagaccttgctgcaagaccagctttccattaagaaagcttctcccaagcatgtgtgctgggcagggtgcaggggtgtcagccctgggatgacagaagtgggaggctaactttcctctccatatttttctcaagacatcgctgcctttgccctgtgtagatgataattgcctttccatccaagtgcatgctgaaactccatgttctcaggcgaggtatccttatacacgaggataaagtttaaaaaatatatataagcatacaggcaggagattttctttttgacaaagcgaaagtaatccatctctacctagatttctttaaaacactgaattccagaatggaataatatataaagttgatctgagttttatactcatcaaaacatcttttacctaagaagtcaacacaaagacattatctgatatacaacagctgtaaaaagatgacactcatgtacccatcttttaaacatacacacacacacgcagccactatgcaaagaaaaaactggaaggaaacaaaaatatttacggtgactgtgggtgctgacactcagtaattttttattcttctttatatataccaaaatttccataatgaaatgcattactgttttaaccacgaacaagctaaataagcattgacaaaattccacataaagagcatctgcaaaggataatatagaaaaagttacagaatttctggaagggacaaaatgaacttggaactgtgtgtctcagctaccctgcagaccctcgctatggaaaatagagggaaaaaatgtgtttttttataaagtatcagctcttgctaagtaccctttgcccatgtttcacattcaaatgagagtacaggtgtccaatgataaagctaatctctaaaatattgtttttaatcttttgaaagtatgaggacaatcaaaaaagaattccacacctgtgtaccacttttttctctcatcaatttagcatcttcaccctagctctctacttggtttgttaataggttgagcaatatcataatgtcattttccacggcccagaaggaagcttgcaagactacatagtacatcagcttgcactctgcctgaaggtattgattacttgtatatcagctgcttttctttgaaaattggcaagtgcgtagaactaatcaccctattttcttatcacagcacagacaaatggctgcaggattctcctgtgaaatagtgagagctgaagtagat

SEQ ID NO: 39137 - DNA, 2300 bp, Homo sapien
agagaatgtggtgtcctgtgatttttatcactgttttatttattttttttccatttcacaaaaacaaacaaaaaatgatgggtgggggtttgcggtggggggggggggtgggcaaggactgatttccttgtaacatgatcctgctttaattgtatttaggtgaatacaagctaattttttcccagtgatttttttttaaaaattgggctgcatgtataaaagggatttgcttcccagagatggtgtcatttcatatttctaactcttaaccctgagtaaaacttattattattattttttccagaagtttgccagttaattgcttgagaagtattcaacatcagaatcaagaaaattgattgccttgcaatgtgtggaagtgcattttgaaaagaacaaggaatgcccttggactttaaatttttactatcagtttgacatctaacttttactgtccagtggttttctttaatcttaaagaaatctagttattctaatattgagcagttttagagagtatacttaataaaggaaagtggtataatgaacagggatggatattaaagggataagtgagggagtaactatcagagccaatataaataaataaataaataaataaataagtacctgtactcacaggataacctggagatgatttctaagcctctgacttttagccccagagttctaggtaaagttctttcttgacctctcttctgggagggaacttttcacagtttattaatcaatccctttcagggtctttgcagaaaagattttctctgccctggtttgtgtcatatttgggtctaatttggaaagtggagcaattaaagagtcaaaacctttcattaggagcctgccattaaaaaaagaagaaagaaagaaagaaagaaaaaaggaaaaaaaaaaaaaaagctttgatctgtaacccttggactgaacattctagtcattcatcttccaaaatttcaagtgcaagatttggttgtggtttgattttacgtctttgagacacagcttgaatgtctcaatttgattttatgcattcgacacatttttagggatctggtgatttgggaagggctgtaccatatggtcttggtgaggtgatagattttcacattctggaaattggcagcaaagggtaggaactgaattagatgtggaaagggaagattaagcgtttgggcctaattcactcatctcatgaaaaatcttctgagacgtgtaattcccataaaatctatttttacaaatacggcttttgtttgattgtttttggtgtatatgtacacgtgtcctcacacgtagggagtaatttttttaaattctctcaaaagtagaggacatgacatttagcttttaaagctatgacatttaacacttctcagttagtccttcaggagagatctcagacttaggggggtcacagaatataaaacagcccgctacacattccctgaaaaggagattgtatagaaagttaggagctgaggggctggtgccacgttctaaaagaaaacaggacagacaaatcgttttcatctgagaattgtttttggagaaacactagagtcaacgatagaataaatcagagccaggtgtgtatatatatagggaggataaaaacaccctggcggcaatgaaatttaagaaagagcaatttaagaagaaaggggtgccctgtgtgattcctcgcggtgggatagagggagctgaagtgtaggattttccctgatctttcagagaattcagattcaggaggcctgacatttaatctggtctgtgcacggatttctccggcttggttggggttctgcggaatgcaacgctcctcgggcgctttctgccttcacctcttccgtggtctttgatccccagtccccgcgcagggccgcagcggagccaggtcgtgcgcccatttctcgcacctccacgagcccgcggctggcgccaccgggcgcgggacgcggggcgcggggcgggaccgaggcggggcgctccggcgcgcagcgggttaagcggcgagggcggtggcgaggggcggagggagtgccgcggctcccggctcccggctccaggcgcccgcgtcccggacagcagcgggttaagtgccgcccgcgcggagacggctgagtccggagccgcggctccgagctcgcattcggatccgctagagcaggaagatggcgacggacggcgcgagctgcgagcccgacttgtcccgggccccggaggacgcggcgggggccgcggcggaggcggcggtaaccgagttcccggggcgggcgcgg

SEQ ID NO: 39138 - DNA, 2300 bp, Homo sapien
catattcaaatgctgttatgtgggcttgcccaaatatccttagtccaaggtgtcatttccagtcttgctttccaaccactagacctcatctgctcctgatcttgggacaaaaacttttgttttcatgttccaatcttaacccattctgcaacactgaacttttactgatgtcctcttgttcagttttaaacctctgaacacctttgcctatatttataatatcctggcactatgacattttgggccagataatttttttttaatagtggaagcatgtcttgtgcattgtaggctgtttagcagcatcccagacctccccctactagatgccagtggcacccttaccctaattgtgacaaacagaagtagctccagacattgccaaatgtcctctgggaggcaaattctttcccgattgagaaacactggatatgaagtaaaaaattagagttaattttagttttttgaaaatgtttctgtaattttatattgccactttatccacaattaaagataagttgcagtctaaattcattataacagtccctatgttcccattatactttgaaataaataaatctataataacatttatcacatttaattatagtgctttaagaaacacaaatatagcatacatatttttggctataaaactagcatctctttggtgacagagatcatgtaatttgcatctccagtgcttgcaaatatcctaatacataatatgtgctcatcttctacttttaaactgtgttgggaggaattccacgtgttggctttttaaattatctaagagtacagaatacccatgtattgttttgtaacctttattcacatcacggccctgccatctagtggctaattacccaaactacaggtacaatatctaggatgaaataagctaacaagccgtatttctcaaatacaaaaatgcaaaattacattcactgtcataagataaagaaacttcagaactcctttcatatatgtgcaaatatatttttcaactgctgaaatattccaatttttgactctttgcttagtgaaattaattcacctgtatcaggcttttacctcccatatataattttttttttttttgcaaatgagtgaatatataccgatgtaatgtctaaattatccccctttgattttatacaatatcctttcctaatcaagctcagcctttcctgctttttccctcagttacctctctccctgaagaatctaaaccattcaacaaaacacctgccaagacacagaactcagagaaataagaagacctaaagaaaagctccccagagagcaggattcattgttggattcagcccaaagttgttccactatttggattgaaataggcagttttgtgcagcaggctattagtgtggttacagcattgactgaactgatacatcagttggataggggtccaacagaatagaaggaaggtgcgagataaggttggcaattcaatttcaactttactatttagcgtttgagaggtcataaattaattcatatttatgagttacaaaatgtatttgctttagcaggaaggcataaccaaatgtctctaaaatatgctgaattgttctttcacttacctattttgttgagatcattaacacagtttgaagtcaaatgcagcagatgcataaacactcagatagttctctttcttcctaatattagctcctgatacattgatttgaaagatgaatatttatttttaatactgcaaacttaccagtggcataacctcactttttcaatgtcagatccttaacatgtctaaagaagtttaggaaatttagatcagttcctcattgcatagattaagcaactgggattttgaagggtttagcactttctctaaggtaatgtatctaattatggcaaattatgtagaactctccactgttgagagagtaactattagcccagaggctgcaccataatttaatgccttaggctgcacacaccactaagaggatgacaagatgagactaccaggttcaagccaatcatgcttcacatccctgtgtagctcactaatctgcagaagttccagcctctctaagtccttctttttctcataaaatcataatccacaaactgttattctctccacttctccccctccctaaataaacccttctagtgtttcatgtgactctcatctgtgttcagcagtccagtcccctttccctcattttcccatcatctccttgccttaccttagttgaaacctatctggtccctgagagaatgtcagggccaggattggaggtagg

SEQ ID NO: 39139 - DNA, 2300 bp, Homo sapien
atgtaatgtttgcatccagatgtaattcattttgtcttagtaaaccgacttttatttatccataggttttctcgctacatctgtgatccttacagactacagaaaatatagcgattttaagacacatgtaaaaaagtttccagccaaagagattttgtgatgctccataaacactgttcatctgttatttatctggcatattaatttaatgacaactacacagggcaatagacttacaaaagcacactctaagggatgaaaagccatagggagtattcattttttttttttttttttgagatggagtatcgctctgtcgcccaggctggaatgcagtggcacaatcttcgctcaccgcaaacttcacctcccaggttctagtggttctcctgcctctgcctccctggtatatgggactacaggtgcccgccaccatgctggctaatctttgtattttagtagagagggggtttcaccacgttggccaggatggtgttgatctcttgaccttgtgatccacccgctttggcctcccaaagtgctgggattacagatgttagcaactgcacccggcctcatttttataagatcacacagaggtttttttgtttgtttgtttttgaaatggagtttcgcttttgtcgcccaggctggagtggaatggcgtgatctcagctcactgtaacctccgcctcccgggttgaagcaattctcctgcctcaccctccagagtagctggggttacaggaacccaccaacatgcccagcaatttctttttttaacaaaactcctaacacctcgttaatcattaattagtctttgggttttggttcaacacctaacatttgcaaatcacacaattatctttgttctttcattagcggaagacactttcatttgttaccctgagaatatgagacattcacaatctaattcctgactacatttgatttcaaacagataggaataagttccagaatataaaatattaactatttgggagtatcttgtgggtatgctctaattaagaaatgcttccttttccgaggaaaactgctgacattgcaagagttattacaaagccacaaatcttaagaaaatacatgtttaactgaaattataaagatattttgcaaaaaagggaaatcgctcctgctggtgttttgtgtataaatctctttctaacttcaagctctctcaagttagggcaacagtaaatgaagtgggaacagtatcgcattgggaaatatctgaaatgatacctatgggactatctaacgaaactgaggcccagaagaattgaagtgacctgtgcaatgacaccaatttgttagcagagccaagattagaaccaagtttggtgccttcctgcatccttcctgcatcggtcctttctcggtgctgcagcagccttttacttactaatttcaccctgaagaaaggtagaccatcctggcgtggcagaagcgtggacattcgttttctaagggatggtcacacacctttgcctatttgcatttagtttctttaaaaagtaaaaacacctccattttggaacacttttagagacaaaagcagaacatacgaaagtgtatttcactgctgagttcttaagaggcgtacaccgtgtggttataacgtgcgcaactctgtcccgggcaactgaacttatttttagcgttattttcggcttctgctgcagaaaactagggattcaactacccgcacctacgtttcacacaacagcactcgtctctctccttcactcctaataaaaacaccttacttcgtttattcctgcctgctctacctcgtctcaacattttctcttgttaacttccaccacactgccttttactcggattggaaacccactctcccccaacttctgtctcatacccccaacttctgtctcatacccccaacttcaggaagcgtcttccttttttccgcctctcgttcgcttttgtcttacgaggcttccggaacacggcccagaattacagagaaaacacactgcgcacgcgcactctctcgtcaccgctgtgcggcttctgtttggttggccagttcgtcccaatttccgactcacagggctgcggagcagcaactctcacgatatttgctgcgacccgcaggcgctatccgctgccgggttctggcgcgccctttcagttctgcttgctgtcggcaccgctgcgttacccggaaccgccgggccgaacagcatgacgtccgctttggagaactacatcaaccgtatcctcaagctggccgccgcgggcgtgagccggggtcg

SEQ ID NO: 39140 - DNA, 2300 bp, Homo sapien
gagaccagtttagacatgttaagggtgagatgtttattgagtctataatataaacaacccaaattcaggtattgaataggcaagtggacataccagttgggagttcaggagaggaaccagactagaactctcaatttgagtgtcagtagcatatagatgccatttaaagtcataagactgtgataacccagcagggaatacagatacgataaaaaaattctgaatatattttgtatttacaattgacaggatttgctggctgtcaaaatgtaggtataaaagataaaatttgagaatgcctccaaggatttataaagaataaaaaaagctgttggtggattgattctggggctctccaataattgaagataaagaggagccaacaaattggattgaaaaaaatgtttaaagaggtaggaatcaaacgagacaagtgtggtatcttggaagccaaaccaaaaaaataaaaagtgtttcaaggagttagcaatggtcagctgtgtcaaatgctgctgtatttacatgaaaactcagaaatgaccattagctttcatgtgatagacatcatcatcaatctggcttaaaagtagtgtcatttgagtgatgggagcaaaaaggtgatgatgggaactgctttaagtgagaacagagggagaaaaattgtagcagagattataacattttagacaatcctactgaggaattttgccacaaaagagagcaattgcggtgatggtttcagggggagatgtggtcaatcttcctgtttgttttcttagtaggaggcaaatactagtatgtatttaagctagtaagaattggttaacagagagggaaactttaaagatacatatgaaagcagggaagaaggatttactgaataatgtttttggataggctagagaggatggggtctagtacatgcaagaatggtgctggcctttgctaggaacatgaacatatcatctacatgaacaagagaaaggtaaagttttttttttttttttttttcaaggtgcaggtaagtgggtagatatcgtgggagctggtacagtttctcttttgattggatctttttctcaatggatcaggaaaaagggccatgagccaaggaggtgtgaagagagaggaagaataacagaccttttgaggtggattttcctgaactggaaatgaaagatgatggcaggactgtgttttttcctttggtcacattttgtggcttagggcagagcaaagagtttagatttaatgagggttttggtttaggcacagataggtaagaaaaggaatggggaaaaacttagtgaaggtatctgcatgggagtgattatgacgattgaccgtggaatttagttaagtagtgaagtgaggacacagggtgtgggggtccaggccagggaaaggatatgagactaatggactgtaggtgcagtgagttagattttcaaaggacttttggagttttgtgaccagacaaagtgagctggaatatgagaagtggtgttaaaaagtgtgtatgaaattgagattattgaggaattgcagttattataaagacaatttgtcgcatgtggccagggaggtgagaggctgggagtaggttggagggaagatcactggaagagatccacccctccccatccccatcacaaggaaggtaggcattagtttgcaagagttcaagcccttagatctgcttttgaaggagaagaggctatttgtaagaaagctggtaagtttctattccaaggttcatgatctaataggaagactgcaggtgtggccgtcaggcccaagtcctaggtgagaatgcaggtctgcgagcccctaggaccggaccataacgaccttaacagccataacggccgtaactgccataacggccggctgcgcgaggcccttccagcatttccactttcgtcaggtactggagagggctgccggccggatgccagggcagaggggcagggcggacggctaggagttcaagaaacatcctggtctgagggaaaggctgcagcctgcaccgccatgaataagcttttcagcttctggaagaggaagaatgagacccgcagccagggctacaaccttcgagaaaaggatttaaagaaacttcacagagctgcttcagtcggggatttgaagaagctgaaggaataccttcagatcaagaaatatgatgtaaatatgcaggacaaaaaatacaggtgaccagactgaagagccagcgcgggaggacgggttggggcctgggtcgttcaaccagaaataagacaagtgggggctgtttgaca

SEQ ID NO: 39141 - DNA, 2300 bp, Homo sapien
ttgttactgaaggttttagattcagttggtggaagagcgaggtatacagcagggtgcagcagccatttgtggaggacctattgggaatccatttactttctcttagtaagagcagtgtgtttgtgtgtgtgtgtgtgtgtgtgtgtgtaattttatgcgtttattttaaattaggtaaaaaattggagttggagggagaggcagatctaaaaattgggtggaaaccaccaaagttccttggaactaaattctcaagatatgtgtaatagcagatgagggagacacatcaaaatgtttgccaggatttgctatctactgcaagggattatctttggtgggcttaaagctatttagccctgtgttatgtttggattgagggctctgaaaactcctattacataaggaatttcatccttaagccaaactgtaaatgtgaacagaaagcttaattagtgcttcattgtatcaggattactgagaaattagtcatcagaaatttgcttggtaaggatggaatcacagtaaagtaaaggtggatagttttgagggaaacataatttagaccatgttgtttgatgaatcatttttgtcctacaacaaagtacttctttgttcgttccttaaattcagattgtcttttccatgtagtatgttaattaattatggataacttctggttttattctgttatgttagctgactgtcttcttcctgactgtgctctctctttagctaaataataatataattggttaaaatttggctttttatattgtagttgtattacagtcttgccttccagagattacattcaggtaaacttaattagaattttagctttctccaattttttgaactgtttttatattttcttggtttattgccatagatggtaagttattgtgtataggttttgtttgtttatctttttgaaaattgccttatttttaagtagttatcttatttttgaggttcacctttttgctactcctgtgtgtcaatagcaggtttatttaggtacccatagagtacttctgaggagctaaagtgaaacaaggaaaatatatttaagtttcttgtttggaacatggattatttatatgtggccttggtattataaaattatctaaaaacaaggctataatgatatcaccttagaagtagataaatgtttattgagggccagtccaggctaaaaactgcaaaatttaaatggatctaattagtcttctgtcataattcatgaatgtgtgtctggtttccggtaggctacctagaatagggttctttagaagtagaaattagtgtaataacttaaaatagggttaagatctacaacttagagagtacttaggcattcaccttttacttctcagaaacaaatgccaactttaatcactgagtaaataaagaaaaacacacaattaggtacagcatgtcattgattaagtaatatcctttcctcctgttacctattagatgtatttcaggttttaaatataatttctaaattttatggtgatacctaactttattatcttttccaaggcccagacatcattttggtattttttaaaaaatctattttcatctcattatagttaaattttccttgaagtgaaatcagttaaatatttaatcttcaacacacttgcgcagccctgaaagttcaataaaatgtaattgtaattaatgtacatttgtttaaatagaaatatgtgcatgaagcaagtaccttaccaatgtacaatctggcttgtttttgggtaaaacaagtaacttctcaaacgaagacttatctctaactttgtgttttgttttattgacatagaacacctttgcacctagcctgtgctaatggacatacagatgttgtacttttcctaattgagcaacaatgcaaaataaatgtccgggatagtgaaaacaaatccccattgattaaggtatgccatagtttttctttttcaattggaatgtgtttgagttctcctagttaatttttgttgatttttcatgttttaaaacatagtatcaaacattaatttatcatatcccaagtagtaaattggttactcatctactcttgttgcattaacaggcagtacagtgtcaaaatgaggattgtgctactattcttctaaactttggtgcagacccagatctgagggatattcgttataatactgttcttcactatgctgtttgtggtcaaagtttgtcattagttgaaaaactgcttgaatacgaagctgatcttgaagcgaaaaataaggtagttttctattaaagaaaaaaat

SEQ ID NO: 39142 - DNA, 2300 bp, Homo sapien
ttccattttccaggtaacatgcttgtgtgtttgttttcaggtatgcaggctatatagattggttaacaagcatctttcacttaaacaaatagataaagagcaggtgtcttcagttccttgtcctcaaacttaaatggtgcattagctctgacttcattactactgacacaggattccttaaatctctattctgtaaacaaataaacaaacaaaaaatacccttttatctctacagaaaatcctgtacatgataaggatattttaaattctctggttattttctatactcattttttagtttatatattttctttgacgtatcccatttcaaattttcaaggttgacacatcatgcctgtaatctctagggcttaaaagtcaatttccgtaaagtacaacacacagtccacttattttacaaaccaagggcagtcaaaccaagccatgaaaagtaatttttaggtagaaattaggctactattcttcatcaatacagatgaagcctcattattgccaaagatcttaattactatgatgatgatgattcagtaatctagatttaattttcaaaggaatttcaaaaggaaactctccacatctcatcccacaactatccaaatgcagactcaagcctaagtagtatatgtcacataaacacaaaaaaggtgggtggcagcgaaggggtttggggatgtttatgtgatctgactctctgttggaccagttaattttgatccttcaccttcctaaagcatccaaaccttaggtgcagatttaacttctcgccatccacgccatctagtggcttgtatgtgttacgtttggttttaaggatgattcctaatgactcgggggcggggtacgcgaaaaacaaaaaggttggtagcgacaattttcctgtgtctctctacctcagtaacccctcatacgaacacctttaactcttttaactattttaaatatgcgcagtgatgcgcagagaggatgaaggggacgcaaactttcagagacgcacgccccttgacgatgacatttagaaaagggctccacatccctgttattcgtaaaggacgggaaaaggagttgtgtcaagacctcgatcgaggagagtctctgattttttggcaagttggacagatggcatatcaatccctgcaacgttaacaatctggttttgaaaataaataaaaacagaaagaggaaatgcacttaaaaattccgcgtcggagctttgcgggtcttgccttccagtcgcccccagaagacaaccaattcctgcgcattccgctccgctcaccctccttcccagcttctctcgctctctttccccccattttcccacgctcgccttgaaccgggactcgagaggcagaagcaaggcacgggtcccctttctcctctcctccaccaaaccaccgcagcccagcacgtgaagcttccctttgttcatccgaggctcgcttttctccccagcagatccacctggatgctctccctcggtgacattttgcgccggggttggtgggtggctggggtggagcgagaggagcccgagggggcgggggcggagaaaggtcaagccgagggaaaggcaggagacgcctttcctaacctgcgtggcggggcgtgcgcgcggttatttatttattttctccttatttattgatcgcactagcagagcagcgcggggagcccggggagatgcaggaccacccactggcggggaagcagctagcagccctcccgcgcccccgcgctgccgagcgccttctgcctccgcgctcggacgagagcccgtgccggccccggccccggccccaccgcgccaacgccgcccgcccggccgccccgcagccccgccgccccgcagccccgcaccgcgctggccaggctcccgcgacagtggccccgcagtaagttggcaggagcgagtcccctccgttctcgcctcccccgcaccttttgaacttgttgctgctgctctgctcgcctgcgcctggcttttggaaggtgaaaaggaggagggaggcacggagggatgggggaagggaaagaagagctcgcttgagctttatttatgctctctcggcgcatcggattcggctgctcgcgagctgctttctctcctcttccctttccgggtgcacggcgaggagaaagtctctatgcaactaagccccggcgcgcacttggccaggtatgtaccgcgggagcggcgcgttctgcgcggaagcagatgctgctgccgccacggcggcggcggctgccagctcctgagctctgtaactgtcacactgcac

SEQ ID NO: 39143 - DNA, 2300 bp, Homo sapien
actgcccattactgcaatgtctcaaatgtggtgaggtctcctctactgaaatgttgattcactgtctctgatgaccatttatcaggaatattagagcagtaactacagctctgttttcttcttaacttgtaaaatggggataataatcccaatttatcgactcacaggagagggatttgatccaacgaaatctaaagagacccttttgctagtttttaggcagctgtaaagccctcgttgcagggttttcaaattttgctgcaaactagaattaccttgggagcttggaaaaccctgtgtgtctaggcctcacctgcagagactccgatttaagtggtatcaggcatgccagagaattagggttgtttcaaagctctccaagtgattctcgtgtacaacaatttcgagaaccattaaactagagtactaagagccattattctggattttactttggaatctaggttggactacagatgtgacgttgagcaactactttatcttggatctgtatttcttgtttaccaggaagaagaggacatgcatacttctaaagtaacttcctctagtattttattactttaaggcagttgacccttaaaggtatacgaattaaggaaagggcacttaactaccttctaggagtagaagaggatctctgctttgacacatgggaattgttggcactctttttctcagttttaatagcagtcatggactcctttcaatgcggggatgtttatacctctccggggaatgtatggcaccaacagcatttggatggctggttgtttcagcagtcctttgcttaaaataggcatgcaccctaatttgagaagaaactggcagaggataaaagtgggtttctttgctcttccccagtattctagaagctgcttcattatcagagttggagtcatctgatggataactggacatgtttcttggtgttttttttgtgtatggctatacttctttatactcttttgggttgctgtcttacatactgcttagtgacttgcttaccaataattttcctagcctaacccaggacaaccatgttgtcttttggtcttgacttttccatatgagactgcatgtcttattgtcactccagtcatgcagcaactaactctagacaggcagtcatggacataggattccatttttttttttttttttttttctgcaaggaaatccaaggactccagttattaggtcaaagatgttgctcgtattccaggtaattcatatttgctggtgaagttttatttgccatgcagtgcccacaaaagtaatcctagaaatgagcagtactgtgaggcatagcacaacacatccacattttatgtggaggatatgatccagtggcattttatttagtgtgaaacttctgtcttctaaaagggaagattcttttggaaggatggtctcctgctgtgtaatacttcatgaatttctagtttaaaaaaattagattttccaaagatccactactatgtacacatttcaaaataaatcacccagttaactcaaaacaatcttatcgtgagaaattttggaaagcttgagttacttctaagagttaaaaatgttctttcctcctcttctgcatgtcagactgcacatgattactctgatgtttccgtaaatgctattagtgcactatgaaagtgggaaagaacttaaaaaaaaaaaaatccgggagggcaacaaagcaataagaaggatcatagggcaccatgttaataacaaatcacaggaggtggctccataaaggttgtgaaaactagtttctcattgcaggaattgggttgggccaccccttcaccccccttctcaaacacaaatattatcatataataaaagcctgcttctctatgcttataacccagcctccattccttcgacgccaccattttaaagggatttactgcacggacttctcccaagttcctaggcattatcttctggaccctatcctgcagaggtgaagcgtccctttggggactctcgctgggtgagagggacaagaaacacccactaggacccaaccccggcagccagcggctcgagcatgcgctgagagtttgtgcagctggccctggctgccgccgctgcctcgtccggactcggagaggacttgggagggacagcggcgctgggaggtggcttagcagagactttccagcaactgctgcccaggacttttttttttttttttctttttcccaggaggcggcgacggcggcggcggggggagaggaagagaaagaagcgtctccagctgaagccaatgc

SEQ ID NO: 39144 - DNA, 2300 bp, Homo sapien
aaatgacatataagcctcatgcacagaataggccagtaatgaaacatgtctgtcttggccttggagcccagtaaagaaagaaaaaaaaattctcctctgagaatctgtaacaatccatttgggatagaggcccaaattcaatctatctgtgcaatacaataaacctcaaggggacaatttaatctggtcctaggggtttatgatgtctccaaacaaactgacaagcaaattctaatgctctccatgaaaactcaatttcaactccagctcaaagaatccttatgcttgtaatcccagaaacaggaattcagagtccaaaatcgcaacccaacaggaaaaagccaccatgagtaaaagtgcccatttctgaagaaatagcactaaaaggcccataaatgtttcaatattaggtttaacagaaacaagatacagactaaataatttgtataagaaattataagatgtcttgaaaagagaaccgaatagaacttccaaacctgaaaaattatgaaaattctaaaataaaacatataaaagaaagattaagataaataagagaataaagagagaaagtcttaatggaaaaaatgagaaataagcaatactgaaaagacaaacgctgagaattttctagaattgttgcagggcaccaatcctgaaattcaggaatcccctcaaatcctaagcataattttaaaattttaaggaaagaaaagggaataaggaaggaattcagacttagatcactacaaaactgcaaaaagatgtcaaagagatgttaaaagcagccagaagaaggaaggatgggaaacgaagaaaggaggaaaaaaagaagggagaaaaagatcgaaagtacttgattttcgatggaagtaatgaaaaacttaactagaaactataaaattctaattcttattaggatcgaagtaaggttccgttgagattcatcatgattcatcattcacgacaggaaagtttcctgcttaagagcagtgaaaaccttgagtacaagagtatgtaatggagaaggaaagcaagaaacacacacacacagtttcaactgcaatttgaaaaacagaaaatgaacaataaattatgaactaatgacaatttccccagaaaatcgaaaagttaagaagagtggaaaataacaatatctagcatttattgagtgcaagagtttttaataaaaaacaatttaaaaagaaactgagtagggacgtactaaatatatcacaggaaaacatttgctgggagaggtcgaaaagtagaaactaaagaacgccgaagacaaccaacctcgaatatggactatttactcaacataaagttactgctattaacagcctattagaaatcaaggctgcatccgtaattcatggctgctcactgtgatgatgaagattattattattattatttgcggatgcagattgtatgtatagatcaattacattagaatgacgattagatggaccgcaaactagaatatataagtggctactgacactatttgtgcatcttttaatctgggaaatgtatattcactccatagtctcagtataaactattttaaaattacacgtaagccaaccaggtgtctcttttatattttagagtgaataatgaggataaattccagtagagagttctattttaagcaatccaaattccccgaactttgctgattattctagtgtttagaacctttgctatttgcctggcacttcttgaaacccataactcacaaacgccggggcatggaatcacatcaaagaacaggtgaaaagttgttcctagttgtgttatgcaggtgcatacaactcccgccattctctgtgcaaaaatcaacaaataaacagaggcaccgcatttcggattctgttacgcactgtttgcaatggcgcccggtattcgtagtttctgcgaggggagccgccagcgcgccaaccctcgctgaggaggaagaaaactacatttcccacagaggcacgggggcgaacaccggccgggctacgtcattgcttgaaccaaccaatagcagctccgggcggcagtgaggcaagcgcctcaggcgccaaagtggtttttttttttttctttttttttttttgccggagtcgagcgggtgctgctagcggaggcgccatattggaggggacaaaactccggcgacagcgagtgacacaaataaacccctggacccccttgttccctcagctctaagggccgcgatgttgtacctagaagactatctggaaagtgagtgcgcggcgctggcggcggccgccagtgggacg

SEQ ID NO: 39145 - DNA, 2300 bp, Homo sapien
tgacaccacatctcccataaactcagtgaggaaggagcacagcctcaggattcaaaccttaacatacatgcattcagcattcatttatccagcaaatacagaatgcttagttgctttccatatattatctcaactagttgtaccaacaacacttcaaaggaaacattagtatccttatatcacgaatgaggaaagctgagactttggtcaaaccacttgtttaagaacagctgataaaaggcagtgccatgaatcatatccagattgggtttactctaaaatcagatgcttgtgtatcgccttagtctatttggtgataattcctgctatatctcctttccacctcttgtttgcaccttctcaagctacctcttttctctctcttgcaaatatttccttactgctttcttccactcccttggactcagtggttaaaatgggaaatggggttctttaatctactagaatcatttctgggatactaattttccaccttcttcccaattcccattatttgaagtctagctatattatcttaaaattttcaatactgttgtctttcatttctcccaaccgaatggcaattttattttagcatctgatttactttcttctgtaccttgttctcaacaatttaataaagcataagaatgactctttagattccccaaactctgtttttcagacttcttgccttaacagaacttaatagaactgtctgcctattccttatcactcagtaacagcattgtcacaccctggattccaatttagaaatctcacaattcttattatctctcaaatcacattgcatccaccaaaacgatatgtcctacaacaccactgttcagccattttctcttaaaactcttttggcttctaaaagtgaagcatcactttatttttctctatcccatttgtcataagattaaggactctgaacctatacataaaataatattaaagccactggaggcgatacatgcaagggcttgggataaatccagcttccgtgtgaatatttcttctgtaatgtgttaattaatttgttctataggatgttaaaagggtttctttctcacaagcaaggaactctagatgcccatttctctgaatctgtgctagctgggcacccctagggggcgctccgtctctcaaaatacaaggggctgacagcagcgtgcctctgggtgaggctcactctaggggtgtggcctcacggagaacctcaacccacaagagtttggcttagaaacaagtttgaaaacctcttcaggtccagagcctttaaataatgcctgctatgcgctaagacagccctgggtatccagagttcacaaagcaaggactgatttcctttcgccttgacagcctcagcaaaagtggaagggggtttgcagaattgcactattagcagcgtccacccgaaggtctgcacagaattagactgagctgattctggacaaagcccactgtgtacctttatctactgggcaaaagttacccccaacacctgctataatcgactcattttaggagcaaaatgtcaggccatgaagcatcagatcattgaaagacccaattaattagtccaggaaaggagtaataagaacatctgtgatctgagttccatactaagacacagagagacgactgagttattctggtgcttgctgtctgaggtccagacagtacttgtgaccctcttatcctcagaagagtaaccacaattccctggagtgaagaatatcccaattcactcatggagttcactttagtctcattctcgacctttgtcaccaattggctaaggctatttgtttttccaattctgtattaggaaaaagaagttgcacagaggatcagacatcagatacgtttctaaattctgcagctctgggtgggcagcctcatttggggaaatgctagctgctgtttccaaagtggggaagcccacggtttcggacacagggctgacagcgctgctccagcagcccccagggccagaggaacccggccttagctccgccccgctctgcccggccccgggtggctgcgatgccgaggtcctctgctcccgccgggcgtgcagcgggcgcgcgcgcgtgtgtttatgtgtctgtgtgcgtgtgtgtgtgtgtctctctctgtgtgtgtgtgagatgaattggagtcatacgactgggtgtttccttccgagtggttttcatcagcaatccattaggaaatcatggaaactttttttttcctggctaaaaggatgaaaactgagtaagtacatagaactttgaacttgagac

SEQ ID NO: 39146 - DNA, 2300 bp, Homo sapien
ttttctctatcccatttgtcataagattaaggactctgaacctatacataaaataatattaaagccactggaggcgatacatgcaagggcttgggataaatccagcttccgtgtgaatatttcttctgtaatgtgttaattaatttgttctataggatgttaaaagggtttctttctcacaagcaaggaactctagatgcccatttctctgaatctgtgctagctgggcacccctagggggcgctccgtctctcaaaatacaaggggctgacagcagcgtgcctctgggtgaggctcactctaggggtgtggcctcacggagaacctcaacccacaagagtttggcttagaaacaagtttgaaaacctcttcaggtccagagcctttaaataatgcctgctatgcgctaagacagccctgggtatccagagttcacaaagcaaggactgatttcctttcgccttgacagcctcagcaaaagtggaagggggtttgcagaattgcactattagcagcgtccacccgaaggtctgcacagaattagactgagctgattctggacaaagcccactgtgtacctttatctactgggcaaaagttacccccaacacctgctataatcgactcattttaggagcaaaatgtcaggccatgaagcatcagatcattgaaagacccaattaattagtccaggaaaggagtaataagaacatctgtgatctgagttccatactaagacacagagagacgactgagttattctggtgcttgctgtctgaggtccagacagtacttgtgaccctcttatcctcagaagagtaaccacaattccctggagtgaagaatatcccaattcactcatggagttcactttagtctcattctcgacctttgtcaccaattggctaaggctatttgtttttccaattctgtattaggaaaaagaagttgcacagaggatcagacatcagatacgtttctaaattctgcagctctgggtgggcagcctcatttggggaaatgctagctgctgtttccaaagtggggaagcccacggtttcggacacagggctgacagcgctgctccagcagcccccagggccagaggaacccggccttagctccgccccgctctgcccggccccgggtggctgcgatgccgaggtcctctgctcccgccgggcgtgcagcgggcgcgcgcgcgtgtgtttatgtgtctgtgtgcgtgtgtgtgtgtgtctctctctgtgtgtgtgtgagatgaattggagtcatacgactgggtgtttccttccgagtggttttcatcagcaatccattaggaaatcatggaaactttttttttcctggctaaaaggatgaaaactgagtaagtacatagaactttgaacttgagacggaatgaaacaaattcaagcaaaaaccctgacagtaaccatgtccattcaaattgcgtatgccctttttatgttaaaagccgtgaatacttacaggacagtgggaatttaaaactaaatgaagggaagcatacaaaaggctgaaagcaagactgctttaaaaccggaggaaaattgaggaactgctaaggcaacctggcctgagttcagctgtgcaacaggcactttgggttttaatcttttgcgttcttcaatgctgttttcagactccagatatactttggtattgttttctctcttcctgcaaagctgaggcagagtcggactcctttactgtgagttgaaagatgtgagaataaggcattgctggaagcaacagtttggcagcctggggtacactcaggttattcgttacaactattattatttgatgtctttttttaaactcaggtcatccacttttgactgtcatccatggaagagctcttattaaaagcctcagactttcgggacctatgattctttggcacaaccttttggaaaattcttaagcagggatgaagcaaacttgattggagttggggaaaaagaagacagattagtatttttcatgctgacaaaaaatagctgctatgacttttcccgcaacgtggacaggggccaagtgaagctgaactggtcatggtctgtcgcccagtgttcccttgtcgtcggcgattttgcccccgacccttcttggtgggcttagtggtggcaatctgtctcttctaccagactctgaccctccgagggtcgaggaagctcacagccgctgcccctggggctgtcccacacacatccactgaaacccaggcaagcagatgcaagaaaggattctctcaggacaaacagtgcttccttctc

SEQ ID NO: 39147 - DNA, 2300 bp, Homo sapien
ccaatcagtgccctgtcaaaacagactactgggctctaccaggctctaccaatcagcaggatgtgggtggggccagataagagaataaaagcaggctgtcccagccagcagtggcaacccgctccggtcccttttcacgttgtggaagctttgttcttttgcgctttgcaataaatcttgctgctgctcactctttgggtccacactgcctttatgagctgtaacactcactgcgaagatctgcagcttcactcctgaagccagcgagaccacgagccccccgggaggaacgaacaactccagacgcgccaccttaagagctgtaacactcaccgcgaaggtctgcagcttcactcctgagccagcgagaccacgaacccaccagaaggaagaaactccgaacacatctgaatatcagaaggggcaaactccggacacgccgcctttaagaactgtaacactcactgtgagggtccgcggcttcattcttgaagtcagaccaagaacccaccaattccagacacattaggattgtgaaaggtatattgggatagaaatctcttctaatgcatattccctttttcaaaaattgatctcatggaaatatcctagggtttaaatattattatcattttatcagtgcattgtaattcttttaaagatatgaaaggatttgtgctaaataagaaaaatgtctgtgtataaatatacacacatacacatagatgcatattgtatatatggcattcaaacctaacacaagatctgtatatattaaaaatgataaaaaatgataattcggatgataatgatatgtaggttcatcaagtgtaacacatggcccactctggtgggggatgttaataatggaggaggctgtgtgtgtgttggggcagggagtatatgggaaatctctgtgtcttctgcttaattttgctgtgaacccaaaacagctataagaaataaagtccattaaaaaataattgcaatgttaagctggagaagctcatcatataaaagtcagtgaatccaaattaaaactcctttgatgatgttccacttaatgatgcaaatcttatacattttatgatacgtgtaaaagtaaaaatacgaagcagtaggatatagaagagtattactaggtttaacaattaaaaagttataatctgtgtaatatagttgagttactacagctgtatgacacatgacccttgaatgtttttacttctttgtgctgttattttactcagtttaactgcttagtttggtgttcagttccagagtagaatagaggtgatgtttctggtgtcacatgttgctacagtcatgtcgtcagccacactattaattctaaagatgaactttggaggaaggaacacagggagaagtcattgtttgggggacaggaaaatagaaggcagaaggatagaacaattgtttcccttggcttggctctattattttcaagtgctttgttggttaagagaaggttagcaatggatcagagtcagtccataacctttaatgctacttacccagtgctgattctctttctgaatcatattgttaaggattctattaattcaccagcaacggaatgattttgccctatttagggaaaatggctcaatttcattgatttttgaagcttttcacagactaatttagaaagatactttgtgaacttaaaaaacaaacaaacaaaaaatctctattacaacactacattgtaaaagtccatacggacaccaaagtgtgtattagtcctttttattagtctattatgggttatctatacttttgcaatgctgtttgttccctccagccctttttaaattctggattgaagaattcagggtttatgaaagcccttctttttctacatttagtttctgagatttctcacttttggatttgagaaatcgagacagccttaagattgaaagtgtactgcacttacagccttttctcaattcttagtgcaaatgaatgtcagtgacgtccactttgatatgttctggctgtgtccccacccaaatctcatccggaattatagctcccataattcccacgtgttgtgggaggaacacaatgggagataattgaatcatgggtgcggtttcccccatcctattctcgtggtagtgagtaagtctcacgagatctgatggttttataagggattttccctttcacttggccctcattcgctcctgcctgccaccatgtaaggtatgcttttcactttctgccataattatgaggcctccccagccacgtggaactgtgagtccgttaaa

SEQ ID NO: 39148 - DNA, 2300 bp, Homo sapien
ttgttggttaagagaaggttagcaatggatcagagtcagtccataacctttaatgctacttacccagtgctgattctctttctgaatcatattgttaaggattctattaattcaccagcaacggaatgattttgccctatttagggaaaatggctcaatttcattgatttttgaagcttttcacagactaatttagaaagatactttgtgaacttaaaaaacaaacaaacaaaaaatctctattacaacactacattgtaaaagtccatacggacaccaaagtgtgtattagtcctttttattagtctattatgggttatctatacttttgcaatgctgtttgttccctccagccctttttaaattctggattgaagaattcagggtttatgaaagcccttctttttctacatttagtttctgagatttctcacttttggatttgagaaatcgagacagccttaagattgaaagtgtactgcacttacagccttttctcaattcttagtgcaaatgaatgtcagtgacgtccactttgatatgttctggctgtgtccccacccaaatctcatccggaattatagctcccataattcccacgtgttgtgggaggaacacaatgggagataattgaatcatgggtgcggtttcccccatcctattctcgtggtagtgagtaagtctcacgagatctgatggttttataagggattttccctttcacttggccctcattcgctcctgcctgccaccatgtaaggtatgcttttcactttctgccataattatgaggcctccccagccacgtggaactgtgagtccgttaaagctcttattctttatgaattacccagtctcgcgtatgtcttcagcagcagcatgaaaaaggactaataaacactttggtgtccttgtggacttttacaatgtagtgtttaggaatgccactggtgcagaatcacaataataggttctgctgaagctaggcttcattcatacaggatctgggctgaagtttttccttcttacagctattatcggggaaaagagagtttgctgaacacatgaacagggttaataaagtagcaaggattggggaagatttcatcaatgcacagttgccaagcactttaaatgaatcagtttttagaactgtatcttattgatttggtaaaaatcttagagcagaagtggaacctagagactaaaagctctaaatgctttattttgcaaatgaagaaactgaaaaaaaaaaaaaaaaaaaaagcaaatgatgattctcttaagtgcccgaagcgagctaccacccctgtttccagttgcctctcttctccaactgcagctgggttatttctatcaagtcatgccagcaggacatagtgctgcaatactttattaggttagagtgtgttaatttgaaagtaatcaatatctcaaaaatgaatctgattttcaagctaatttatactgatctgttggttttaacaaggttttctcatattgggtattagtttggggattaagtggatgatgttaatcaatttgtagattcacaggagaagggaagaattaaagttgtatcttttataatcttttcaaactccatatatttgaatttatgataatatttacaaagctgtctaaaaacaagttttggttgaagtgaagttttgtgggtgactgggttttatatttagaaataatcccttcagtatgaagtgaagaatgtttatgaaattttggaacgggtttaacactgaattgccactaaatatcaagttatttatgttactatatttgtctcaagtattttcttttatatttagcaaatatcatggcttcaaaatatgaaagggttttcaaaaagtgatcccaaggaccacttttaaagcttcccaggggcaagttttagttttatgttatcaaataagctacttcattattctggatttgcatgttgacttgcagagatttgaaggtggggtgtgggtggtttagacagtgcatcccatctatactctctgggttttttgtgtttgcttggttttgctttagcgttgatgaatgcctcactcactagaatctttttcattcctttcaggcaaacagattaccagaaatacagcagccactttgcagaaaggaaggattatgtcaaatagttagaagattcccaggtaatctttcgtttgcttccttaggcttaaacatgtgagatatgcaggctcccttagcagaagcagctaacatggtctcaggtcagcatctgttgctactttgtctatcaattcggcaatcac

SEQ ID NO: 39149 - DNA, 2300 bp, Homo sapien
tactaataaatttcctttgtgttttttttttttttttttgagggcaccttcatctgcattaaaaacctgttcaggcagatatcctttctcctcaatgattttcttaatggtgtctgggaactcgtctgctgcctcttagttggcagaaaatgcttctcctgttaccctgacattttttaagccaaacgtctttttgaaattattaagccatcctttgctagcattaaaatctcacctttagatcctttacctttcttttgctttaagttgtcatataatgactttgctttctcttgaatcacattagagcctgtaggcatgcctttcttttagcaatcctccactcacataaaagctgcattttcaatacaagataaaaaggtgtttcacaaaaaatgcaatgttttcacacctgcttgtgtagctgcagtgatggctttatgaattttattttcttttgtttaccatggtccatatgctggattcatttattttaaaatggtgggcaactgcagctacagacctcaatctgtggtacacatcaaggcattcagcattttcctgtgatgttgtggatttgtctccttcttgggagcattttcagcattactagaggtactttgtatgagtcctacggtgttattcaaggttacagcatggcattaaacaagatgaaaaatacacaagaacaacaggaggttttattttattttttttagtttttactgcaatacacagtttactggtctgacaaattgctcaggagaaaatgattagcatcacaagtcattttaagcaaacactggaaatacttgtgctcactgcgatagcaacaggagatggctacaaaattattatagtagtatggtgtatactaccgttaattttatgctgttatgatttaatactgcatttttacatttgtttacctttctctctacagtgccatgcatggtctcaatatgttcatgtgtataagtttttatttattttttttgaggcagagtcttgttctgtcacccaggctggagtgcagtggcgcgatcttgctgcaactttctcctcccaggttcaagtagttctcctgcctcagcctcctgagtagctgggattacaggcatgtgctgccatgcccggctaatttttgttatttttagtagaggtagggtttcaccatattggtcaggctggtctcgaactcctgacctcacgtgatccacccatcaataaattttaactttttgtaagatttatgtacattgcatgatagtaagtgatgaaataggctgaaatctacatatattttacattttcatggcatatctttttcttaatttttaaaatattacttggctgtgtggttcaactttgagctttttaaaaaatcgttgcaaatttccaaaatttttcccaatatatttattgaaaaaacaatctacatattagtgaacccatgcagttcaaacccatgttgttcaagagtcagctgtatttgtatgtgtttgtctcccccacaaggactgagacgccctgagggtgggacattattttttcacttttcaaattcagtacatggtcatagtccctaatatataatagtcactctaataattttgaatgaaacatgctaaccatgggggccagaattaaggaaggggaacactgccaattatcagagagttttggcaatgcctggactgatttctctatgtatgcattatgagctcgatattgagctgatgctatggggcaaataataagggtaggataaatcaaaaatataattccccactcctgcgagacataattaaccattttaaataataagctttctacatgtgtgaaagaactagagaactagttttaatattgtccataaactaggtagaaagatagtaacagctttcataatataggatcaatttctgggtggttaccattgcagctgagagactgttactgctatctaaaaggacaggtttgaccctttcttatgtggttggttgatccttatgcatgtggtctggagatgaacaagtaattttttcaggctgactcatagttttgtacatttcaacccaagtcttttagtattcgttcacctttcatttgaggagaagctaagtgctgactgccagaggatggaataggaagacaatggtgagagttttctctctcttcttatccagcaatgttttagtacttcttatagattagctctctgggaagtgtcttcatcctaatggttctgtattcagggaaaagggaataaatctgctatttcttgctgactatcgggc

SEQ ID NO: 39150 - DNA, 2300 bp, Homo sapien
taattatacagtgttcttctttaaaaatcagaaatgtagacaagaaaatcaaacataaatagtgaaaggttgaatgtagtaagaagaaattcaagttatttcacaagctattttattacactggaatgttattgttccaaatgcaacctggctgagaggatctatgactgagtccttgaaatcttgttattcagggtagcctaatgatgcttagcataacactacttgagctgaaggcaaattggagaagctttctagatttcttcatgcagctacttggatacgctcaccatggaaagagtttaaacctttgcagattctcgctaaattttctgcagatggacaaatacagaagtacctaagcaatgatggcaatgcctgccattaaaatcagaaaaaaacatgtgcatgactaatagaaagagaaatctccaaagaaagaaaaagaccgaagaatgaattaaatcttatccaaagacattagaagggattgtctatgacaaaagtccttttgactttcaagtcactatttattttaaaagtgcatgcatggtactataggggaaaactagaattagaaattgaccctgacctcaaatatttcttgataggctatgagaaaaaagatgcagacacaaaaagccataattttatgaggcttctgtaaaatctgtaatggcagtcaaaatgtaataaaatcaaagagaacaggaaaattaattgtggctaggggcactggatgagacctgttggtagaggcagcattcgtgtagggtccggagggtgacaagtggggttgcagaggaagaactttcaaggcagacagactaacataaggaaaagcagatgttgaatgcaaatcatgtttagcagaaaagtagaagtctaacatgcttacataaagggaggcattaagaggatggggccattcaccttgcatttggagttaaagtacgtgggtttgaatcctgggttctccatttagtagatttatgtcctccatcttcctgaccctcaaattcctcatctgtgaaaaggagatactgaatcaaacctcacaattctaaagattaaaagtgaggactatgtgtgaaatctccacctaacaaagactggtatgcaataaaaacagtatatgtgagaggaacctgtaggattatgtaagaaacaaggaaccagtaaagtttttgagcacacaaatgagatagccagaactagacatttggaaatttattgcagcaatattgtgtgtagaatgaattaaaagacagccattgtacaggaagggagacccagtaggagagcattacactagtgcaggtttgaggcagtgaaagcctgaacagtgctgctgggaatgagcaggaggggatgtgggtaagaggcttcattggagaggaaatggcactgggataggcaccctaggacatgcaccgctgttcagaaaattagattctggttctgtggttctttcgtcaagtagacacgacctctattgagctacctctgtgaattctctgtttgcacatctgtaaaataaagagattggaaaatccctaagtattcctagagcactaaaatgcttcatgtctatttgaatcaatagaacttgttaagatgcttaaacgagaaataaagagcataagggagatagaaaaattgaagataacctgaaacaagtggtaaatatgagtaagtgggtcagtaggtgatggcattactaagaatatggaagagatgaaaaggaacaggtttgggagagaatataatgaatgttatttctaacaatttgaagggctgtccttcaaacagttaggtagtagtgtgaatattcaaaatttcattattttaaactatctcctgtaccatgtaaacataagcttttaaacaaatgctttctctttaacttatagattctgttcattggagattcaaccaacagagggatcatgtactatcttattgaaaggctgaatgaaacgttgcaggaatggcagaaagtacatggcactaaattctatcacaacgtcaatggtgggaagactttgatcagttattcctactatccccagttctggataagcccttcattgagaccaacatttgaaaatgcacttgaacacctcttgcaaaggtacaatgaaactataatgaaagacacaaaacccacaaagtactgatgttctgctagcagtcgtcactgctcaactactcactgtacatcaaatgtgctcaaaaggttagataccaagtaaggcagcagaaaacaagttggaaagtacaaggagtcttatgatcaa

SEQ ID NO: 39151 - DNA, 2300 bp, Homo sapien
ttaaagaatcaaaactatcaatatattccagttttgtgcattttatttacttttaccctctgaatgaagtgaccactcttatttgtcaaggaatgtttttacttttattcccttattccaaaaaaattgcataattcctacaaaataccacttaaaaaaatcttgaggtaccctgttttttattttaagttttttaaggattgctggggaaatgctggtaagagataagtcactttctactgacactttacaagccttcttcaaccttaattgctaggatgagtaaacaaaaaacttttaacttctgtggttgtggaaatttaaaaagcaaagcatcatccctttccaactcctgctctttctcctgggactatcgctggtgtctcctctgttcctccaagtctgtcattcctgcgggtttttctggccactaaaggacagcaggctatccagaatgccattctccaccccctcctaagagccagtggtcacaagcctgtgctctgttccacacttgtagcatccaggtggaatttaaaatagaatggatggggacccagttatgtaaaaagtcacctctggtcttctgttctatcatgggagttaagaccagctggggtgcttctggtatcagtttccagcacataagtctctgtgatctgcagcagaaattcttacaacagggcccttagaagtctcgtcctctgatgggctgccagaggcagagtccaaggcatatctctgcaggcagactttttttgctgagtttcccagggactgagagaaaactatcagaaggaagaggctcccctgtattctacaactagaaatctacaactgtcttgggcggaagatgggatttattgctgtctagctacttatctggttcagttggctcagcggattggagatgataacagtcacagattcagcatcttgagagagctcttttgagtgaaatgagtatgcttgaaatctggctctcccctccctaattccttttcccagaatacagctcagagcaccttacctccagctaggaaaaagagtttaagtgtatgccctctatgtggactccagagactacaggtgcttgagtaaccaatgcaaacttgcagtcatatggtgattttcttaacatcactagtcaaaatctaggcagctgggctcagatcatgaaatgacataatattagctctcatttatgtgtttattaaatgattaatgatatgatctttacaacattttatgcatatggacactagaagcttaaaaagtttatacagtacagtaaactttaggtctcacattctactggtcagtgaatattttgtcgtctcttcaatcaaaatataataaataggaaattaagctcctgcttgctgagaaagaaatcaataatttaaaatgtgcagttgtatacatgtttggaattgatcttttacttcattcatcaagtctaaatagcataatcccctccgatgagagtagagttgaatgctttatattaatagacataaattcgattatgaaagagctcctcaacttcatatgtcaggataaaatatctgtaacttcttatattctccaaataaaatttcatgtgatctgacaagattatattttaaaattcaaccattttaaatgacttctgcaattaaaatagattcattttccttgaaatccagaagcaaaagtgaagctggagatattaagacaagatgggcgccaaaaaaccctggcttatgccaccttggggactgaaccatctttcaggtagacaagttcctgtcaatggctaaggtttcctcctcctgcagtcccccagcaaatgcagtttccccctccccaccatgtgcgcgcgcgcacacacacacacacacacacacacacacacacacacacacacacgtaccactctcctccctccagccctatggtagctccagtaagagattcagatctgaaaaagaaattttgataattttgcaaatgaaaaaactgagactcaaagttgaaatgagtagtccacgatcatcacctgctgacaggagccccggttacccaacccaacccagtgctctttccactgcccctctcagcctgcaaaaaccacagagggcaaagccagaaagatggaaaggcacccatgcagctcaccacttgcctcagggagaccctcttcacaggggcttctcaaaagacctccctatggtgggttttgtttatttttggagaacaaaacaactttttcaatgtttcaatggagagatctgtgaattgtgacgtaaggaaccata

SEQ ID NO: 39152 - DNA, 2300 bp, Homo sapien
ccagcatttaggcctcttacatatccactcaggatgttcctcattgttaattcactcaataaattttgttcaaaaacaggatcttatgtactaggcccaatggcaggggtacagcaatgaatccgccattgtccctcttggagaagctcacagaataaagtgagcttggatgaaggctctgactttcagagaggccactagccgttagccaaaatatttctggatcagtatctacatcctatcatcaacttgactcctcgactctttaaaatgtggctttagaacctggtacatagtgtacactcaataaacatttgttggataagggagtgaatgggataggatgaaaatttcagtgagcttttattgctcactgattgatataggagataagcagctaatgctatctaatcctttttttttttttttttttgagtcggagtctcactgtgtgccataggctggagtgcagtggcgctatctcaactcactgcaacctccacctcctaggttcaagcaattctcctgtcttagcctcccgagtagctgggattacaggcatgcaccaccacacccaaataattttgtatttttagcagggacagggtttcaccatgttggccatgctggtcttgaactcctgacctctggtgatccgcccatcttggcctccaaaagtgctgggattacaggtgtgagccactgcacctggccccaaatcctttatttaagtaattttggctttgggtacccactgagctgatacgtccaccatgggaatgtattaacacttcaaaagatctctaaggacagataatgcttcttagaaacatttcttgtgtctaattaggtgaggcaggctttcccaataccacagctaaacacgttgcacttgccttcagataactctcggagaccttccatcctacaaaacactgattaactaaccttccaaatctgccagtaactggaacacttcctgcttctgaactatcttcggctccagggagtaccctgctagattctttaatctctcttactgatcatctaaacgtattttcttttacacttgtgtatggtttatttgtacagttgtgggaagagagcttgtctttataaattcccacaggactaggcacacagcaggtatttaataagtacgtttttaaaaatgtgtcttccatgtgtagccctgtcctgcagggacgcatcgggtaggtggcaaaggggtgcccaatcctagcgaactttcaactgaggttgggggagaagggcagggaccctcccaccatgagaatcgtaaggtaggactggagaaaaagatcagagcacatctctcatgtactctagaactctccagaaacctctcactttctttgtccccatcttctgcaggggacttacagcgttctcagggactgcaggaaataagacaaatagggaaaaggaaatcacagagcacgattgaaatatggcagatgagatgctagactggaatcttctctttcgctcaaaataaatgcatacataaatgacagtgattgtaagcctgacagcacttcacccactctctaaagtctcctgacagtgggacctcaagcaggggactggaaggttaatttgttcggtaccaactctgactcaaaaagattattctcctgtgaggtgaaggagaagaaaaaaaggtcagtgacattttccagccactacacccagagggtaacccagatgttggtgggatgggtgggactcatcaaacccacgctttcccccaaggttgctaagacagagcgtcctgttagtcttcgggttgaatcaaccccacaacgacccgttctaaggagactgtgacagcaggaaaggtcatgacacacccaggtctggacacgctgtccctgaggccagtgcccggagcgccccccgcggagccgctctccaccaataagagcctgaggtcccgagatgatgagatgcggggccgctgctcagccaatcaggctccaggcgcggccagggggaggagatgggaggagaggccgggggcgatggagacgcggatacatcaacagaagtttctcacctaggaatgcgaggggcgctcccgcatctcctgcacatctccacccctgcgcaggaggagatccccaggctgctctctccatctctcctacagctccctgcaaacgagggggaagctgctgagagtccctatcactgctggccttttaatgttgtatgcaaggaggaagagggcgagggataacttggtgctggacaactgacctgcggcccgaagggcc

SEQ ID NO: 39153 - DNA, 2300 bp, Homo sapien
ttgtgctatgaaggatgacactcagaagctggatgtcacactctctgtatattcttttcgagtcaacaaaaaagttgggctttgaagttgagcacgtgagtttgaatcttagctctgtctggtcatagcagaaggaccttgagcaagtttcacttttctccgctgtatttataggattattgtgagaattaaataagtctatatatataaagtgcttagaaaagtgcctggtgcacaataagcacacaataaatatcagctttagaaatatacattatcagtagctattattatataatataaattatcggtagttattgtaatagccaacacctttggcttatacctcctggagctgtaaagctctgtggttttattaagcttaatcattaatcctgaatacttctcctggctcccctacctcctgccaagtaaaagtaggaagttatccttactcgtttataggtgtaagaactggctgattaacaggagtcctaaagaagtgatttaccaatgttaaaaaaattgaaacccatattaagaaatataatttctactgtatccaggacatagacacacagacactcacccacacatgatgctgtacaaatgtttcatgaagaatacttatcctgaatttatgctttgaactgttttttttttctatttttcagtgaatcaacagcaacaaaatgttggttgtgacccattgttattaatttcattacctaccaaagggttctaagctatatcttatggtcagtggagaataggctactaacacattaaactttatgcacaggaattgtttcaggtgtggtgctataagaatatgtcacatgtaatttccaatctggttggctcggttacagagcagattgctctttcagaaatacaccgtgacctccctactcaagaggcttcataaactctttcagtgagacatagcagtctaggagaggcatgtgtacagtaagtgttatgattttttggtactataataagcaaagtgcctttttgtttatttggagctacatgaagctaggccggaattccagcttcataacttactatcttgtatttttgagcaagatatttaaactcagttttggagtcttagttttttgatttaagtaatacacaaatagcataatattggcacatggaagacaatgagaattcatttcatgctttctcccctgatcacggatcacaaactccagaattcatagttactattagtttgtgtgttttatatttttggaggaaagctaaaatttggtagattattaattctatattaacacactatagtcaaaccctatttttaaatgcaatttaatttctgcaaccactgatgatcccaatattctgtcaaatactaggtaacagttattcattattttagaatatggatctgaattatgaaataattttgcattctaaggtcttatgtagtaagatttggattaacttcccaattatcaacacaattgtaggaaatctcctgagaaaaaatatttctaacgattgtgtatcttataatttaaaaaataaacgtgacttggaaaatgcaaggactactgttcttcttgggtggtgcattaaaggtgatcagaattctaatgacgctggacagtaggattttcagaatcagtttcctagggttcaagaagtcaaacggcaaataacccaaggtccttggttgatctgaccatctcagctatctcaagatatataagatgacctaactggcgcatctctaggatgggtgggtcatttaaaatgttctgcccttgaggctgggattttgtgcgtgtaaacggtggggagacggcggtgacacatttttctccctcccgtagtgccacccggcgcagggccgctgcggcggcggcagctcccacgtggcaagttcagattgtgcagcgcctggccgggggcggtgggcgggaccgcagacccctccctccgctctccggcccttccctctggccggcccgggcgcccgcttggtcctccaccgccagggggcgggcgcggcttcccggcggcgggggcccattggtcgcggccgggaagcgtgggaggaggcccagcggcgagctggctttctcctggccacttgccggggtgaggggcagccggaggagtccgagaggaagcggaggcgcgagctggaggcggcggctcccgtcggcctccggcaggactgagcgctgggaggccggaaggcgggcgcgcgcggcggagaggcgggcgggaggccggtgagacggctgggaggcggacggagccgg

SEQ ID NO: 39154 - DNA, 2300 bp, Homo sapien
gggaaatttatttcaacagtgttgttgtttggtgatctaattcaaaagattgacaagtgatgtgatttttttgtccagtaagagaaaactcagggttatggtggttgttggattattcttgcaggctactggggtatccttgataattggaacctactggaacaccataattcccctaagcaaaccaagcttcccctaaatagcagaagttcttaggagtttcttttgtggtccctcctgtgttgtatttcacatataagctgctccactgggaaatcaatgtttgtcacagtctgaccccactcaatctgctcaaatgtaattcacactgtttttttaatggcatatgacatctgcttctttccttcctgtcctcactgcctttgacatggtttttttccctgctagtccttcttgtttaactacacatctctaggaaagctttcctgcctactccagtcaatattaaataaaactttctctgaactctcagtgcacagtcagtttatacacctgcatacttcttgtaatgctagcaaaaaaaaatggcccccaaattttcttcctatatggaaactcacatgagcagccatcaatccccatcataattcttgtaaaagttgtagcatttctatttctgttcatggaaagaataagatcaaggatcaacttcttaatattgatatgtgtttctgaataaacactaaatggtttcaaaatctgttattacatgactataatctattcctgaagcaacagcaaactgccattagcttgcacatttagccaaatgttcacaggctgggatattagcaagaactcgtagtaacacttgaaatacattcagaacccaattttatgtgcaggaagttttctttaaaatttttaaagctagaatactatttttgagacaagaacaggacacaagagtatacactgtacagatacctacttcaaattgttactaagaatacatgggataattccacaacttggctttctgtgccttagatgggactcctaaaaggctctaaagtgggtctcatatacgaaaaacatgtactaatagttaaaggatatcatataaatgaaaatctcataaattttcagtgtagagactaccaccaattaccttctcattatttccttttggcttcaaattaattcaacaaatattcagggaacacctattgattttttttaaggccattttgctaggatctggggttatagtaataaaggtaaactccctgccatcaaggcgctcacagtctaattctgaacaccaccaaagaaaagagcacatgagggtgacatttccagctctaaggcagcagaaggtatgcattatacattttttgcatacccttcaatcaagcaataaaaaatcttcccgttcgaccctgtgggaggaggcacttgtgtggttcggtctggcaggaccaccgccgtgttgaaagtccccccagacagctgtgcccagcacggcagtttcgttggggtctagggaaagggcagggtcagactggtcacaatcagggctggagattttttggagtcaactctcccaaaggcaatggggtctactgctttattaggaaaatggaaagaaaaaagggagggaaacaatgtacccaggcgcccccaccgcattctgattggacccacttaagcatctgcagaaaacaataaaatgaaaaaaactcttagaggtgaaactcaaaggtcaacctctggctgtgcgggacaatgggtgtccggccttcccttcccttcccttccgaagtgatgaaggagttccaatgttctgcgaacactggaaaccccagcggatccctctaactccagggcagcgaaaccactggcagcggacagagggaggattgtcggtgtgtgaattgctaccctgggatccggacccagagcggcagccgcgcccctccgccccccgcgcgaccccgggtccgaggcacgctcccagcggagcggtcctgcgcccccgccccctccaggagccgcggcgcgcacagccgggctggagcgcgcacccggcactgaggcttcgctgctctcggagcgctcagaccgcggccgccgcagccggcgaaagaggcaaagtcccgcacgccggaggacatgcgcctcggctagcggccccgggccccaccaccgtgcggctttctccagattattcctctctcgctgtctctgactgtctctctctgtctctgtctctgtctctctctctctcacacacacacacacacacacaaacacacatacgcacgcacgatctcact

SEQ ID NO: 39155 - DNA, 2300 bp, Homo sapien
gattctctctacttgggagatttgtatttgtgtttgtgtgtatgtgtgaaagagttggacctagagaagcttgcaacagcagtgaataatgagcctgagcattgtcagagcagaaagaaatgtatattctctgcaaaacagacaaatatgtttctgttgtcattcaaattattaataaaataataaacaagaaagaacttattgttgaactacattatataccactagaaatacaactacgaatgaatatcaaatgacaatgattacccagtaatttttgggtcaggttgcttagccacctgccattctcactaaatgaatcattgccattcagctgacatttctccatcttctttgtaaggatttcatgatagacttatgaacttgctgctttatttatgattggtaagctagaatattgtggtcattattgaatttttctttcagaaattttcctgactttcaaacaagcaaacaaaacttaagaattgtcatgggttatagaaatgagatgggtgtgaagaccctaaaagtcaacgtttgcttttttgtttttaagagatggtgtcttgctgtgtcgctcaggctattctcaaactcctgggctcaggccatcctcctgcctcagcctcccgagtgaagtagctgggattacaggtgggcaccatcatgcccaacatttgctttcttagattttttcaaaaatttagaattctattaaataaactggttttaaagaagtagttcagaaatcatcccccctttggaaatgtttactctgcagtctagtagggttcacaagaaaattaaatggaaggcattcctcacatccttcattcagattttcacttttgaaattttaaatggtgcttggcactctccaaagtgagtctctgaactgaaaagactccagtggtcctaacattgcagtcagcatagcccttttctttctggggcttcatccacagataaatgagtttccattttctctctcatacaaaggcacgttcagaacccatctactaataaggcatgagaatcattaagtttagccaaaggcctcttcaggcaaatcctgtgaatccaccttaaagtacattggcagctccctggtacagtgttattttgtgcagctttagagaaactggtcagaaattgtttccagtggtacaataaggataaaatttagttccaccagcagcaacaaccagaattctcagacctaattttatcactccagaatgctttcctttatctcaacaataataataagccaataaactagaagaaaatttagtcttttaattaaaattagagacaaagaaatccttcattgcattttgagtatgtgtgatgggggtaggggtatgggaaagagaagtactgagatatcaaaagatttttatttcatcactcatgttattcccttcacaatttgtgcgatcttcaatgcatagatagtaactgctcaataaatttagctgtatgaatgaaatgtatgtgactgatgcctaatgtggcatttagaaggctcatgaaagtaaaagaaaagaatgagaatattgattgttgtttgagcatagaagccatttaaataattatctgttgcttttagcttatttaagtttattttttaaacatttttatataaaataattttgtttattttttaaacattttttatttttaaatatttagaaaataaattttttaaaaattaaaatgtttattttaaattttttttctaaatgtttatattttttaaaaaggcaaactctagtgggaaataatttagtgccattttatccaggggaaggaaaaaaattgaaaataagaccttatgtttagaaaaactaaatgttttaaagtcaaattttaaagcttgagagaagaattgctttgtgaattatgatattagtagaacagcttaagtataggatgatgattatggtggtttcattatttttattttttttttcaaatttctgttgctttctttgttcgtataatgcagataagccctaaaagaaaggaacagctgtaaccccatgtgtgccttctcaatgttcctcaggttgtgaatgttgcaggaggcatctcctttcttgatgccgttacgtccatggatttttttccaggattaaatttggaaggctatcctaacagagacagtacgaaatatgctgagatttatggcatttcttctgctcacactttgttgcgggggacactgagatataaggtaagcagctggactttagattcaacatgttgccagttgtgatgtaagtgatgtgtac

SEQ ID NO: 39156 - DNA, 2300 bp, Homo sapien
atgctttaaaaatttacataagatttattctgcataggaataaatgaacctgtatataaaaattaggagcatctgggtgaaaataaaatgtttactagtgtcactttaatttctttaatttggtttaaagtattatttccaccgtattctacgcttcctccagctgagggaaaaaataactacttttagtagatgatatctttcaatcattctctccttcatatgcagccctggttctgggactagggggacaagacacttcttgtaccaagagaatgctgctttgagtagagtttattcatgagaatataccttgcctgccacattgagagaagcccgttacattcatcatagtaagcctttagtaactatttcttgattgactgaatgagtggaattacacaatcttctcacttgaatagcagttggaaaactggttgaggcaggtcggggtttaatacaacagcagacggccatgtatggagagaaaacccaggaagaggaactggcatgtttagagcaacaaaggtgaacagtgaaggtgagctggactctaggaagcagagtgatttaactctgcttcttaatcttctaacacctctggttaaagaataggtttgtttggtcgattggttttctttttttttttttaatactttaagttctagggtacatgtgcacgacgtgcaggtttgttacagatgtatacatgtgccatgttggtgtgctgcacccgttaactcgtcatttacattaggtgtatctcctaatgctatccctcacccctccccgcaccccatgacaggccccagtgtgtgatgttccccaccctgtgtccaagtgttcccattgttcaattcccacctgtgagtgagaacataaggtgtttggtgttctgtccttgtgatagtttgctcagaatgatggtttccagcttcatccatgtccctacaaaggacatgaactcatccttttttatggctgcatagtattccatggtgtatatgtgccacattttcttaatccagtctatcactgatggacatttgggttggttccaagtctttgctattgtgaatagtgccacaataaatatacatgtgcatgtgtctttatagcagcatgatttctaatcctttgggtatataccagtaatgagatggctgggtcaaatggtatttctagttctagatccttgaggaatcgccacattgtcttccacaatggttgaactagtttacacaggttgattggttttcttaaatttccaatctgttgaggaccaatacttttgtaaaatccggtaacaataaattactagaaaaaatgatcttgtggcttgacatggtggatcacccctgtaatcccagtaatttgttataaattaaaaaaaagaacttagccaggtgggtggttgtgcacctgtagtcctagctactagggaggctgaggctggaggatcacttgagcccagactgcagtaagcaatgatctcaccactgcattttagcattgacagagtgagacttcatgtctaaaaataaataaataaatatgatcatgtgatattaaggcttctaaatgcttactttctatttatgtacacatctaattgtgaaccagtttttttgttttttgttttttgttttaaaaaaacagttcagtgcagttcactgactgacactagggcacactgagaaacacttgttttgggaatggtcagagatgaactggaaagaggttggcactaaattgtgaagaatcttgtataccattataaggatttcaaactttacgccatcaaaatttagaccaatctgaaagtcttgctctttattattttcctggatttgcattgtagattaatttgtttaaaacttttgtgccgaatagatgtttgataaaatgtgtatttaaaaagctattttagcttagcagttattggatggtgtcacacacgttgctctatactttttaaaattttgcagttaaataatcttgtttttgaaaacttggctttaaaggaacacttgacatcccagttttcccttccctcttctctaccttgtgtctgttttcataagagcgggttgtattttacctcagatttctcaggagaccagaactgatctgccagccttgctgccttttgttgctctgctctttacattgtctttacagtcaccaggtgtcaagatgctgcaagtacataggactggactgggcaggctgggggtcagcctctccaagggtcttcaccacaaagctgtgttggccgtccggagggaggatgtgaacgc

SEQ ID NO: 39157 - DNA, 2300 bp, Homo sapien
tttgtaaattagaattacagataagtctacaacatgaggtatttggaggaaaataaataatgatttccagtttcttcagtgagacaattaacagggcactttggccattatctcattttgttctcatgactccacgaagtagtggctattattaacccattaacagataatggagcacaggctttttttgaaaactaagtaacttgcccatgatttacaactcaaaggagaagagtaaggattcttacattcttacccagatgcttaatccttaggaagatagcaaggcataaattgtgtttcagtggtggtttcaggctggttctgctgcagaaataaagccaaggtcattgattttggccacatctgaagcaactaacattatgtgaagaacgttgggctaatgttccacaagtactgggtagtctctgaggctttttgcttaggccaatgagacaattggagttgtatgcttaaaaaaatatggtctacgttatatataaaaaggggtttgaagtagggtgatagtagtggggtttttaaaggacagtgtcaacaccaagggtaaggctgaggggccagaggaagaactgaagtgaccgtggctttttaagtctggataggtggtgagtaggaaggcagtgatattagtaacagagctggtgagcacaaaagggaaggctttattttattttattttttgagacagggtcttactctgtcacccagactacagtgcagtggcatgatcatggctcactgcagcctcaacatcctgcggctcaagtgatccttccaccttagcctcctaagtagttgggaccacaggtatgtgccactacacctggctttttaaaattttatttatttttattatttttatttttagtagacacaggtcttgctacgttgcccaggttagtcttaaactcctgggctcaagtgattctccagcctcagtctcccaaagtgctgagattacaggtgtgaaccactacacagcctttggaagactttccaagaatgataagggatccgattttggaaatgtgaagctgaagatacagaagaaaattccaactctacttacagataaaattctaatttggggttgggcacagtggctaacacctgtaatcccagtgctttgggaggacgaggtgggaggatagcttgaggctaggagttccagaccagtgtcctggtcaacacagcgagaccccatgtctaccacaaataaataaataaataattttctctgcaattggagatatgagtggagtctcaagaacgttctggctatagattgttgacataggagttcagtagctaaatacatctatggcaggtataagaagagtaagtggtggagaaagttgtaaaaacaggagggaagattaacttctgaccgttgacgccttggggaatcacagctgggcttcagacgattcttcagttcctagtgctggggctagtgtctatgaaatacgttttccccctccctccaggcctcctaggtagttaggacttttcaataacattggacattgccatatgcacatgaacacactcagttttaatttctcagattctccgcttgctggcttctaaaactgttgtaagaactgttatctggcttcacagggttgtgacaaggcggtgaaatgctttgaaaagtgtctatagctaaacaaacgtgaggtaccggcgctcgcaacttttccccaggagatgtgcacctctatttagagcgtaatgcccagactattttcgttgctttccgtccccgcccgccttctgccacggacagttacaaacctggtcgataattatcctgggagaactcgacgtcccagctaagaacgcaggtcagagatcagagatcagagacagaaggatcttggggaggagcaggggccgggcatgacgtagcaactggcagcgccgccgattggcagatgagaaggttgttccctcagggcggctgctgattggctacgggaggcagaggcgtgacgtcctcagaagttgagcaaacacctcctacttcccggccttccatcccagtttcttctaggaattcggagcctcccctgcagcgactcggaagattcgaggcggcgggggacaagtcggcgccccagagcggacgaggtgaggagaggagaggtccccgcggagagctgagcagacgcgcgggtgggctcagcctgtgagatgcggtggagatagcgggccgggctcgggctgtcgctgggaggggcccgcgagcctggccttcgggtcccggcgccgcgagg

SEQ ID NO: 39158 - DNA, 2300 bp, Homo sapien
agaccggagaatcaacacaatggaaatatatacaataataaaattaaaatgatgcagcattcccgggtagaataatacagatctcaataaatatagcagaaatttgtttaaacaaaacaaaacaaaataaacaccatctctccacccaagatgaaaagtctttccaaattaaaaaaaaagaaaaagaaaaacagaaaacaagcaaaaccctccaaatttttcataattgttagtgcctatatagaatataatacacaaaaccatttagcaggtgcatgcaagaggcgaaaggccaggggatgcagaggcttctggtcggccctgaagtgtggggcccaacatgccctggggtctgcagacgaactcggaccaggagctctagtctgccgctgcctcagcgtgggggcacggctgaggctgggaggacccttagcctcgatcactggtggccctggtggagcccgggctgcaggggccccggggttggcagcggcggctgcagaggaggcagcgtcatcggcggctgctgcggtagcgggggcggcggttcagtgcctggttcgccagctggcgtgcgggccagccccaggctgctgtcgtgcagcttgcggacatgcttcttgaggtcaaagttcctgcagaaacccttgccgcacgtggggcaggtgaaaggcttcttgtcgttgtgggtgtgcatgtggaaggtgaggttgtaaacctggtggaaagccttgttgcagatattgcacttgaactgcttctccccgctgtgggtcaacttgtggtttttgtaattccctgaaacacacaaatgacaggaatatggttctgaaaaaaaaaatagcttaaaaagggaggagcagacacgtggaaggtagcgccaggcaagcagaagagccgccacaggtcccacaacaagtgcagggctactatctgtgcctgcacttgtctccccaagtttattttcaagcatcgcatcaacagtgatgccgtttccttaaattttaatacacatttatcagtccaattacatacaatgagagcatgcagttaaaacatatacccttgttttatgaatcatgcttttctctaatactaatcagacttcgagtagggagttagaatggcaacaaaagtgccacataactacactttaaacatcgtcttctaaaacatcccgaaagtattaagtatggcttttcataagactaaccatgagagacatttcctggtttgcatacctttttgatgaaaccctttgccacagaattcacacacaaacggtttgtagcccgcgtgtattcgggtatgagtgtttaaagtggaacttctattaaatgctttgccacactggttacatttgtgaggtttttcctaagcaggagaaaggaaaagcagagacatttagatattttctaattatgtgaagttctgcaagctcaaaacacagtaatgcttaaacactttcaagcagaacaaaagcaaacaatacatggcattcaccctgtttagctagcactttttaaatgaacgttatcctaaagagtaaggttttatcggctgtttttctgcaaacagttcggaagcaaactaggtgaaattgagacagatgaacacacctgcgtgtgaatgatcttgtgcctgcacagggtgcttgcttgcctgaaaccttttccgcacactttgcaaacgaagggtctggctcctgtgtgcactggcatgtgacgggttaagttatagtgcgcattaaagaccttaaaattaaacacacgtagaacaggttagccgcacaagtaactttgaaatcaaaccgggcagagagagggtaggaggaagagaatcttaacaaaaagtgtatgcaaataattacccccaaaatactaaaaagggaggaaggaaaggaggagcgagggagggaaggaaggaaggaaggaaggaaggaaggaaggaaggaaggaaggaaggaaggaaggaaggaaggagggagggaaggaaggagggaaggagggagggagggagggaaggaaggaaggaaggaagggagggaaggaaaggatctccgttttgcattgtacttgcctttccacacacttcgcaagtgaaaactttgggcttggcattaggagagcctcggctgaaatccgaggttttgaacgcgattttttccgacagaagctgggcgctttctttcatgtaatgctgcagctgagcctgggacaggtctttgaaagctactccagaagggtatttctccaccgccgggaccaccagtttattcctttcggctaaatacgtttttg

SEQ ID NO: 39159 - DNA, 2300 bp, Homo sapien
tttctgttagacatcaggcgcgttcccagcccaagctctcttcctttccacccctcttggctcttggggcagaggcggaactgattttcgcggaaagttagagtggggcggagggacccgggtagcttgcctggcatgtgttgagaatggggtagagaggagggaatactttgacgtcaatttccttcgtttaaggtccagtttcgcatctttgagtgaaattgctcagggacttaataatgccagggtttctagtccgccgttatccagccttccggggccaacccttttcagagctctagcagaaggacgcccccactacacttggcccaatacctgacacccgccaccacctgtctcacagccacgtggggttaactcaccaggcagatggcaccttgagctgctgcggtcggccactcacttcagggtccaggccccaccgccctttgcttgcagctctgcgcgctcctttggcctcctcacgccagcttacagctgccgtgtcttcaaactctgtgcagcccttcctgcgcgcctagctgcggggttcagctctgcgtgatcgccggctggcaagagactgcgccggggaaggtgcgcgccgcagcttccagcgcgctcctggacgctcttgcctgggcggcgggagcccgcacagtcggagccgcagccgtaggcgtcttcccggaaacctccacacgctccaccgcgccgccccaggagtttcggccgaggtgccacacccggcgggtgttcggctggggggcgttgcaggggaaatggtctctacgcgcgctctttgggaggcacaagtgcacctgtggacacaactctggcgccggcaagtctccttgatgcgcacagacatccaggctgccgcctgcgctgcttagaggaggcttgcagacaccggcaaccggagtggggattaatacactctgtttcccttctccgctcggcattcagtatttaaaatgctccgggagagctctagctgagcgcaggtacttaagaaagaaatgctctttccagactctcaatggaaactcggaagcgtgcgcgcgcgcgcgtctgtgtgtatcctgggtggggtccgatcgagtcaaggttgcttgtggtgtgacacccaattattccttgcaactcctcaactttgtggatgaaagtgcgactttcccaggcctattgccgcgggcattgcctttacaaaaccacaaacacagaacaagcctcctaaggcttttaattttcggggcgtttggggaggccagttacctgccggcgtcttctaaatggtccagactcggttcgggccgcggagactccgggattccgggagcgggcaaccccgagccctggaggaagaaataggtctgcggaggtggcacagatctgacccggcccagcccggcccagcccggcccacccaggcccagtggaaccaagcagcgaaacctcggatttcactgccgaggcttcctagccgaggctttctggagcttggcgtttgataaatatagcctggcgtttgcccctgaattagactccgtttccttatttagcccttgcacaatgattttagatgatgtcacttagagctaaacgagaaaattgatctcagatttgcttggcctctaaagcctggttaagcagattgagaattagaaaggcagaggaagcaaaaggggggtggggatgggggggtgcggagggtagtgaagtgtgcgcggcagagtgtgtgcgcagaggggagggcgcgccaagcgggtgaaagcgcccccgccttttctgggcggggaacctcactcaccaatgaaaagtagttactgactgcagatgaaaaaaaaaaaagttttcctgttgactgttggaagcgaattgagcaattatctagtttaccttctcctcttggaagttaacgattggcgagatcttggctgcgttattgacacaacactttctattgatagaaataagtagtgattgtccccgagtcattggtgcgccaagaactctgcgatgggctggcaggagtccattgggctgggcaggcaggttcggctggtgatgctggggaggaggaggaggaggaggctactggtggtgatggtgcccgtccccctctccgcaggtctgtgacaagcagggaacaaggcaacggacggcgcaacccagccccggctgacggacgctggcgactcagacatggacagtagctgccacaacgcgactaccaaaatgttagcgactgctccagctcggggcaacatgatgagcacgtccaaacccttggcttt

SEQ ID NO: 39160 - DNA, 2300 bp, Homo sapien
tgttgtggattgtgtgatagaaatgtgattgttgtaattatgttttattagaatttttataatactgaaagctgcacataactcagatttttcaaagtattcatgtcatcctattcattaaggtattatgaataaaaatccttaaggattgctttattttttggaacaacatcccatcgtgggtacctaatacagcttctccatgtcctggtttccatggcagagcctcctttctgccccccagtagggaagacttagtgatggcaggatgccctcctgccctccattgacaggtggcaggatgaacagggacctttattccagttatagtcactgatcacatctcctgctgaattgagacagaaatgttaagggtcatttcttcatttttatttctctttacttactgatattgaaaagtaaaacaaaaatatgcatgtgaattcttgaaacctatgatacctcggaagaacatgggatgcagcaggaaatcgaggttggcatctccctttttgcatttgccagccctttacctgtactttgccagaaagtaagtttctggttcccagataatatgaaatattacctgggagacatatacattctaactttaacagccatttttgttatgtaaagtttgttgccatgggaagtataatagtaacgttcgtggttccgcatatgaaacaaaattaatcttaaagtttagtaataatcacatttaatggtgcatgtatattttttactatgcacaaaaggatttttctggctgcaaagtctaatgtgcagtgctaattaaagtgctaaatatttgtcagaataattgaatttgatagagagagaatgataaagtttgctattttcaaaaaagaaaaccttgcctaacaaaatatttaaaatgtcatcaaagagtagcctttaaaaaatgttgtcaaaggtcactgatacttggatgattaaataaatcagggatgataaaatccttagtgctgaggctgacttacaagagaatgaaataatacagcatgaaatggatgttttcatattctttcaatattcctttcaatataagacatagaaatagagcacttacgaaagcattgtcttctctatattaacattctgccatatgttttgtaatctgaatgaaagtaaagcaagaataaatgcattaaatatgcagaaagatagttttactaatagtgtaatcaaaacttaatgtgagcagttttatcattatgaaggttttaaagaaaattatgagtcaatgtaacagtgtttataaatacattacattttgaattctggatgtaattgcattttccccttgcccagtaataacatttttaaaggaaaagtccaaaaacacattttaggagcccaacagagaataatcagttattttttaaaaccatagaaagtttttatgtattttaacattcgatacttcataagcattcatttcactaaggcaaagaggtctccttctccctctttgaatacactgccgtggtattcacagcaaatcacaatcattaaaatttagtgagattagaggtcttgattttttttttttcagagctcaaagattatgcttattcttaatggaatttttgttattgttctcaaatatattgctcaaaagactcaaggcttttaaattagggatgtgcaaaacaaactattatttgtcccgagaactgtaatctttatctgaaacagctgctttaatggtgtcatgggtccctggaagaaaagtgacagtcacactgaatggtgacctggtctaggggaggttttgatatgcataaattaggcttaggaggagctaaggtgggaggattacattctcagttgggaagtgcattgcagacccattacatccccccaggttacctaggacccctctccctaataatagtcagatcaaggacaatttgtgtaatttgtctttagtatttattttatgcaacatctgtcttttttcttccatctgtctatccccaaccctgcccctcacccttccacttcctctctctgtaggttttaatgaaagatattgccactcccataccagcagaagaggtgaagaaagtggtcagaaaatgtctcgagaaagctgccttgatcaattacactagactcacagaatatgccaaaatagaaggtcagtgcagtgagcaattgtcgaagtggcagtgagagccaacaatgcctagtaactgaattttctatgagaagtcctttcctttcctgaacaatcctgtgccatggcaaagggaaatgtctcattaaaatct

SEQ ID NO: 39161 - DNA, 2300 bp, Homo sapien
taatcaaaaattggttaatttctaatacagatttaaactgaacctgtgggttatattattcaccaaactttatttgcacctctttcagacacagttttacaaggtaacatgtagctttattgtctggaatctttaatcaataataaataataaggtgaactaagaacttttccccaaatgatcattggatggccttcacctccatacgacattgaaaggatctgccccctcattgctttgccttatttctcagttttggatgctttttctggcagccttaaagttagtccaaaaacgtaaaatatgttttttatggatcattttgcttttttcccctctctttgcttgtactgaaaaaatattctaaagacaattccttccctcccccgccccactaaaggaaacccaggtattttatagctgggtagttgcctgtttttcttaaggatacaaatttgctgttttggaatgttgcttcaaactgtagagaaattttaaaaggatatttaagaaccttctttgggaaagttaatttttaatgtagatatttaatctgtctgtgacattatgcaattttaattttgattatatgtaaattattttaaaaagaaatatgtgaatgttatattggaggagaagaaaagcaggtggcctgagactctgggactgatctgtgaagtggtgccagatgttccttccaatcccatgaatgaactggtgcaagtgagtcagagactagatgcaggttgacaagagcatgctggatgctttcaaattgtactacacatgcagatttcttaggttagattttgaatgatgtcaagggagacaacagtaaaggcagtgcttttctggagcattcagcagccatttgaaagatggctgctttaggctttcatcctccagccggttctgtgcactggtggtcattttaaactaggcttaatgttgtaaaactatataccctctgtctttaagagagaaaacctaagtgccaggttggcaaacattaaagaaagagccaagaatgtgagggaacaaagtgctctcatttgctgttctggggaatataaatttattataatcttctctaagaatgattcggcaccatctaaatatcaatatttggaacatccttttaattgagcagaagaaacaaatctgattgcagagttaaaattattgaatggcaatgctgatataatttagcaagaaaatagaatcttccaaattgatattgttaatttttcccttaatagtttttatcataaatttccttttgctttaaacttaactttttctaagcctttagtaaaaaactgaatttatagccagaagagatcttggcacattaatgtaatgtgaaaatttactaattttagaaatatgaccatatcactcttcaataatgtgagtttttaatgcctatttatgaaaaagcatactcttccaacaacgcatatctgtggtaagaaattgggctattgttaaaatgtttgtttcctaacttggaaagctgtgtgtcctgaacatttttttatagaccagttatcccaagcatcgcaaagctactagtggctaaggttcatctatacgctaaaatatcttccatgcatgttttcagagtttgtttttccttaagcaaatcttatcacaaataaatttaatgtgaaaatatatgcgattttttcattttgtactgcagtgatcctcaataagatatctgaagtaccatagatataatcaaaaatgccaaagcctgaggattttacagcctagtgactcaagtaggatagatatattgagagtgttgtaatttctaagacagtgaagtatatatatcatacaattttgtatgataaaattgaaatatgacttatgtaacactattattttaaaaattattttcaaggaaagaaaattccccaaatttatagcaaaagatatggagaatatgtatatagaagagttgcggtcttcagtgaatttgctaatggccaatttggaaagtcttccagtttcgaaaggtggtccggaatttaaattacaaaaattaaaacgttcacagaactctgcatttttggacataggagatgagaatgagattcagctgtcaaagtccgacgtggtactgtcattcaccttagaggtaagtagctttatctcatgctcacctctgacagcataaatgatgatgcacaataatttctgttgacctttgcagtaacttttagaatttaaaacagtgtaatatatgttggagatgttaaattattctccatttgttggacactcagctt

SEQ ID NO: 39162 - DNA, 2300 bp, Homo sapien
tgcatagtattccatggtgtatatgtgccacattttcttaatcgtatccctttttgcccttatccaaataagaacattagtatatgttaaaaacaaatttttttttcttcaagttactaggattgtgacattgccatagagaattagccatgctattttaaagtttccttttttaatactaattcttgtactttgtttccacattttgactaattttggtatctaataatttatatctctgattctccatggttaattaattttattaatacccaggaaatctagtttccaaagctactcactggattggtaatgtgttctaaataattattttagatgatagtactttggatatgtaaggaaaagtgttctaaattattataggcttcatttaggataacattgcaaacattcacttttgtttgccagagctctttaaatcctagcatagtgactcagctatggtagcagatttcttttctagaagtgtccttagtaaatgcttctcttttcctctccaaatggtaatgaatgtttctctgggggcattttgataacatagggcagagctaaaattttgttcaattgcctttcgatgttatattctttgccttattttgcatcttccttttttctagtagatgaataaacacctatataacaatgagagacagaaagatttaggtattgttgtattgatgaaaatttctgtttctggatgatatgctaaacttttgatacctcagtgtcactttgtgaatatacacaccatatactaccttttaaaatgtgcagggatgtatgaaaataaaatcggattaatggcctttgggagagaaaatcaacctttatgggtatgttttatatcatcagtattctttttatactagtttttgttggcccatagggccctttgttccttcatctttcttgtctcaaattaccatgttgtagatttacatttcataagaagtaacagctcctttagtcctggtgagttccaaccaaaagtgacttctagcactttacgtatgtagaccagagacattcatgttcaaggtcagaatctttggcctcggtttcctagctggtgggaaaaaacccactgagattcaccgccaagaaagtgtaccagtagcagcgtggctgcttgtgaacttactatgcttgtgagtccacatgccatcctttagctttgatgtcatattgtgccactgacatgattgtggcaaaaacataggcagagtggacagagcctgtggaatcttctaatagggatatttgttaagttctgcaaaaatgtttgataaaagcatctacttattgctgctaatggttaactttaagtgtgcaccttgaagtttttcttaatagctgttttttaaaaaatgaattgtgccaaactaatatgactatatttaatctttcccttgacaccctttctcctcctctttcaaaatattgtttgattaataacagacatcaaagtctgcagagaaattagcttccctagatatcagtcctttctttactcctgtcagtcttactacatttgtacagtcaatgtaagacagagaaagtgaggcagaagtaaactgagcaggatcccttactttaaaacagcaaaaccataaaacaaaagccacaaacttctcagaaagcttaaattaaataaatgcaatataatggtttatgtgatgaatcaaaaattagcagtgtgacttttactttttgatgtaaaaataatgtcactaagctcaccacttttgcctcacatccggtcactgcactaatttttaattatccttttttttagcttgccattttgttggaaatatctccttcacttgctgggaaaataaaacattcttacatgtgctttcaggctttaaagagcacacattgtatgaattttagatttaatttttagtttaatgtgctatctactaccattatatgtagctcagtgattatatccatcttataacaacatagaaatcacccataacagcatttaagccaataaattcacagtatgctctaagctcttatctaattggctgctgggtcttgcatgtcataatcacatcacacaatagtaagcagtatctagagttaacagtaggggatttatttttcaatctaaagtttttcacctctctctagtaagacatctgaaactcataagccatctttaagaatttcttacaaaaacatgctggaagacagtggatcttgtttgtatcctgaagatttttttctcttcgttattttaaattaattgtcaacagatgtgcaac

SEQ ID NO: 39163 - DNA, 2300 bp, Homo sapien
ttattttgtgtcgagaatttatacctgaccacccatcggggttgggagagttttgggatgcttctctcctcaggctgtttcattagattagggtttcttaaccttactattgatattttggaccacataatttcttattatgtggagctactatgtgcattttcagatgttttagtggcaacgctggtgtgtactcgctagatgctggtagcactctctaattgtgacaatcaaaaaatgtctgcagaagcagccagatgtcccctgagaggcaaaattgcccccaagttgaaaaccactttttaagagatagatgattgtttcttataggtctattttgttgtaagacgagggcagaagagagggcagttctatcattgccttaaccactttatattataatgagaaaaatagaatgaatgagctaagttcctcaaattggtcctttcaaccatacagagaaccttttgatgtgagatatgttttgaagcaaaatatagttacaggttaaacacttcacccacaaaaaatctgcaaaataaaaagtcagagttatattattttgtaatcctacttccaaaggttaaataatcacagatttaacaaattacctctaatatgatgatgttaaaccgtcttcttaatgaggcttcaatttgtcactgttaatagaatcagccaggaattcactccatttgaacatgaaaaaaaaaaagtctacctgtaaggacagttcaggtgttacctgaatcatgcttcaacagaattgcatgaatgggacaagtagactgtttcctagagtttttttttaaaaaagcaaatattaactaaaatacagggaatactaacaaatattaactaaaataggccagggaatacaataaatgcttttgtccaaatgagaaaactctatcatgtctatgattaaatgttcatgtccatttttcacactaggaaataaggtcttttctttttctatccctaggactttgtggcatgctgagcacatagaagataacctatacatgatagaaaataaatttttgagtgggtgttgccaatttattggctccttgaaacagactttagataaagatttaagataaaactaaacaataaggcatctttaaagccgtaaagattctgtaatttgcaaaaatcatgtagtgattttttatcattgtggccatcctttcctcttcccactactgtccttccagttactaaatctgttattcagcctttgtctgtgtctctacatctatgctgctactttgagtccaagccactatcttcttttgcctaagctcattctcttgttattctccctctccaatacattttccccataaagcaaccaaagtgaacattttgaaacacatttgtcacctccctggcttagaaccctacagtgtgtttctcttgtccttgggacatcatccaaaatccttagcctctacaagagtagggccgtctctattttcttctccaatatatgtccactctcagtatttgccagcacatagtaggttcttaccagaagatgggactgtattaggctaacaataagagtttacactgttttcttagtgttggatctttaggtgtgggataggcatttaatgtgggaagtgggtgggaatggtttgctcctacttcccacagaatgccatactgggtagtgttgaaccatcccacagaatgccatattcggtagtgttgaaccatcccacagaatgccatattgggtagtgttgaaccatgcatgaaaactggcaactggcccaggtacatgcactaatacatgaattatttttatctttgcctttgccttacagctagaaaaaacattatatggctgggtagattttcagtctctccagaactaaggaagaaacccaaggctttaaaaaattcttaccagtttatttattgctttacagcctattcaaattgttatgtatcttgactcattgcttagctttttggccaataggatttcaggatgcaatgcactaatataaactcttggattggtttaactacctctgatgtcataatttccccatttggatgtcataattttcttgaaatcacatggtaccaatcacaagtcttgttattttgtttcattatgagaaagataatctactaaatattaaaatactggaaggagcaagatagctttgatccagggagaccttttccatttatgtgctttagtaatctgccgccaacaagctatcttctttatgttcttctacaactgatgttgttttgttttctcatgtttgtctctt

SEQ ID NO: 39164 - DNA, 2300 bp, Homo sapien
ttattagatgttttcctgtgggatcctcaaggcttggagatctttgacttaataaccacctttaatgggaaaagaataagtgatcacatcaagtaatattgattaataaaaggaactgaaaaatatacctattgttggcaagaaaagggcagtaaagttgctatatttaaatcatacatttatgtccctagaaatttttattagtttagtaaacctcatacatttattatactgtcttattatcaaggcaaattgcagtagaaaatgacactatttggaactagaaaactgttttgagtccttattccattaggtgctagttctgtaccctaaggaaaggattcttcaactctcaggttccttatttgaacaatggaacctaaaataaatgagataatgtatgtaaagagcttagtgcagtatctggttcaaagggcaatcaataataatactacctgcctcagaaagctattactttgatgagggtattaaacaatttcacagatctttgcaaagtgctagataagcatcagctattatgacaagattgctatttgtttgccttgccaaaaataaaacattgcctttaaatacataggtgtttgagattttctatttcttggcagtttgtgatcatcccacagccatgctcttactgaagaccttttattactagggggcctgttatggattaggcagaaaaataggtaagactcctcaggagtaaatgcctccttgtcttttacccatctagagagaatgtcagtaagtgcagaagtctctcttgtgtacctaactatatgaaagtggcctgaaaaagctaaaactgctgtttgaccatggtggtagaggagctcagagctggtagttaatttgccctgtgttatttccactgaacttcatcacctccctgcccacctggtcgctgcacactccacctggtgttgaatgcattgttttgcctatttccccctctgtcaggacttaggacataagatacagaattactataagaaactcctaggtggttccagcactaggactgagaaatctgcgcagataaggcaggcttcagcgcagctacaagacgccgacttgaggccagaaccaccagcgactgagtgtcatgtgccttagtcaccgcgggctccgcaaaaggctaacagtgctggacaccgggagggcgctcaaatctttgttgaataaatgtccacactacacaacctgttttgagtcaactgcatcccaacccagaaaataatcgagatatgtttgagctgaatcagtatcattttgcacatataaaatctctcttgccttgagtctgcaggactagaacagtttaaaaagtaagcctcgttggttttcttttttttttcattactccgacttttataatttgggcttcagcatgagtatcaaaacggcagcagagcagagtgagacttttcaaagtcttgtcgcaaagatacttcgtggtgaagggctccagtcccgcttttccgcgctggggttcaatcctaggcagccgattcgggttggggagatgtctcggccgctccccctaacctcttgctagggaacagtccctccccgctccccattccacctccacctgctggagaaaagatcacaggtggtagggtgagggtagtcggagcagccccggtggacgcttacacgggccatcgcgctcggccgctccccgcctttgcaaactgtgtgctagggctccaggcgggcccgggcagcagcggcggcgcgcgcacgcgcactccgcggccccgcgcggctcttcaacattcaattccacgtgttgcttgttgtaggcgccacaggttccccacctgcgtccgggcgctcgggcggctccgcctctgccggcgggctctggggaaccgctgggtcggcgcgcccggggctggcggagcaattcctgaggcgcccaagctcacccccaacgctaactccgcctattcagtcccggcggctccccctctcccccctcccaatcctcctcccggctcctgcccgcccctttcgccctggtggtaggaaacactcctgaatctaactcgacgtgtccggaaagccctggccagttttcctttcgttctgcggccgctgcagccagccccgcggctccctcagacccgcgggcgcagccgccgggggtgaggcgcttggggaccgcgggccgagcggcggggatccccgagcaccatgctggacccgtcttccagcgaagaggagtcggacgaggggctggaagaggaaagccgcgatgtgctggtggcagc

SEQ ID NO: 39165 - DNA, 2300 bp, Homo sapien
gggacattaggaaaaaaactggtgggccttccctcatgtctacctgagaagggggaaagagaattggagagatgacagagtagagaggcatgggcctcctgccatttatcatttttactgaaaagaatgccagagtttgccatagatcaaatgtacactgcagaaggtagctgagcttcagtcaccttgccagcacctgaccaatgaggactagttaagggacaacaatcccctgtctgataagggaaagggtgtgagctaaaggagagtggaagaaggcaaaccagaattgggatcactgcaatgaggagaccccagaggtggccctgaaggttcacatgcacacatgatgaaagagccagactctcaactcctaaccccagggaacatcaatcaccagtctatggacactctgtatgtctcaccttcaaactttcccaaaaagagtatctgggttatttaatcagccactatcacatagaaaacactccagtggagtagagtagtgccaggccatctctcatgcagcaggccagtctatgaggggctgctttggacagaaactcattcctggtcatactattgtggctggaatccagtcatgaggggtgtagtatggtggccacactttcacaacccctcagacagagattgagagcatcacagtccttccaagtttactcagaatggggcagtgtatatagctggcaacatgcttagtgtattcaggacataaattagaggttaatgctattattgcatgtttcacataccaacatttcatatctcatctttctcccttcttatgtctggatacatctcaaccaattcaccttttaataatatatattgttttgtcatctcagttttttatttcctgtttcttgcattttattgagaatgcaaagcagatgctttcttacacttaattctgttttctggtgtaatttttcaagctattgcttacctttgcttcatgagttcagtagtttcttgttttgtgttcaagaattctaagattcatgtttgcttgcttctgtgttgtcttccttgaatgactaaaaagtccatacagactccgagtttatcatacataaggtcaatgactttcactttgtctctgtcaccaactagcaattagaataacctctcatttctgaagccacttattacatatttggtgtctatttggaagagttgtcctgaactgaaggaaaacgtattccttttatagcctgcttgtatagctatgaaatgatgcctgcacatttagaagtaatacgctttactagtggtaagagggtcctctttcaattcttcctgagcaatgggagcagtgacaaaaagaacctagccatgtaagagaaaaaaaaaaacacacagtgatgttaatgggacaagaacaattcctgaaaatatataaggcatatgctcaaagcatcggaattggcagaagaacaatagctaagagaggctgtgtgcagtgttttctctgcagtttgatttctctaagtgggggaattcaatgggcagttatgagagtggcctgcattggatggaaatacttgaaggtctggggttcagcaattttgtggaatttcggaggaaagacttttcattatcatttttatttaccctcacactttggttgtagcatccaccactagctgccatgagaactgggaagatagggcttctgaggttcgctttggtactgcactcaacagagcagaaacatcatgcaggacgtgaatgaacagggaaggattcatctttcttgttgctcaaattttaggttaaaagagtgaagatgtcatttaaagaagataaggaaataagctaagtgcacctcagaaaaagaggaaataaacaacatggttatgaaatacatatgcctttttggaataatcaaatcacctcaggagcaggaatccacatttaaacatttccctacattcagatgtgatagcaaaccagcaagcaaagcataaacaaattctatagataggaaaatgacaaaatcaaaaatgagcttgggaaaatttgcttccagagagaggggttttcttgtaccagacagtggtggaatcaggaacccattctctacctggaaattggtacagagattcagagtctttgtccaggaagacactttggagtagaagaatgatacccatccaactcactgtcttcttcatgatcatctatgtgcttgagtccttgacaattattgtgcagagcagcctaattgttgcagtgctgggcagagaatggctgcaagtcagaaggctgatgcctgt

SEQ ID NO: 39166 - DNA, 2300 bp, Homo sapien
aaatttgacaactgtgactaatttgtcctaggcatggagctagttaaagcgtgatgtgatttgaagggtaccttaagatatgtatccaaggggccccgaagtctcccttagagtttcattccccagtgactcttgcagagacattcagctcacatcagtcattcatgtttagtgcaaattattttattagatttttttctctctatgacagtgaagagaaaaccaccgaggaataagaggttggctgaaggtaaggagaaggtgaggctgttttgtaataatgaacacccacagcagattcagctagctagagcccaggccataagaatagggtcctggagccttcctctggtgagaaatgaggacctaaagagagaaaatagggcacagaaaggagggactaacaaatgtcaagtgcttttcccttagcctctgtctggttccagttgcctacacataggctctcatttcctttaaatgtcacacaaatgccttttcgttttttggtgtcatctcacaaagtaaaatcctctaagatgaaaaagtgaggctcaaatcatctcaccaggtagctgaaggaaatctgagagcaaaaatggtttcttcaaaaagtagtagtttaaaaaaaagcatgcaatgaactagagaactgtacagggtgttaatggaaaaaaataagtactacaactggtttgagtaaatcagttcataaattaattttaacactatatactattgttacctatttattatcacttaccattttattacaatatcatttgtaattatcctttcatctaagaaatttaagatataataagactttctggtttggaaactttttttctgtttactattctgattttcctgaataactgtccataatagatgtttaggaatttaaattttttacaggaaaaaaatgctttctcatttacattaatatggtgagtactggtgagagaattgtttctcttgatggaaagagaatgcagagttatattagtatgaagttagaaataagacctaaatgctaactatagattacataagagtaaggttatctatgtcaagagatattgactataaattctagtagggctgggaatgtgtttcatttatatctaaagacaagtagtagttgctaacttgaggtttactggatcatcaatttacaacacaacgtgaaaaaaaccagggtccttatccctgaagattttcaaaatacatcctccatatcactgttggaacagtctccaacttcccatgtgctcatgtgcacaaaccatacacacacacacatcacacaccacttgaatgtccctaatcactcatctttatgcagattccctgataattatgtagtctgtatcagcacaacagtatcaaatcaagccttcaaaggtcttaaaatagagggtttatataacacttcatggttattttggttttctatcaaaagagacaatagggtccaagaaatacacaaaactttgcttctaaccaacagggacatttgctataaattttgtagaagacccttgcaatacattgtccaagaagtccgttaaaaatccatctctaaacaaaaaagtttccctttcactgtcatacactgaaattccaactattagttgctatttcaatttacacactgaaaacatacttccttagaaagggccatggaggctgcctgtggagactcactcatggcaccatgacaatgtggtaactactccagttagggagtctggaagtcagaggacatcaaaagggttggaagtgcctcattgtgaacaaacaaccagcttcatggttttgccttctcctaggcttgtccagtctgtatttcagtgaatgtgatcaaagaaagcagggaaagaacagtttttccttgaaaacccagaggagcaaatggtctttgatttctcatgaaaagtcttgggcctatctcttcatgttaattgtgatagtaaaacaataaaaaatgagatttaattttaacttgtgttggtcggtctagggcagtgagtgaaggtgacaggctggaaaaatattaatccaagttggttatttaacatctgctttatttggaggacactattgaagccacctgctcaggacaatgaaattcttcagttacattctggtttatcgccgatttctcttcgtggttttcactgtgttggttttactacctctgcccatcgtcctccacaccaaggtgagtgaacctggagaacagactggtggatttcctgacttatttaattgtcctttattaaaactgtttgctgttt

SEQ ID NO: 39167 - DNA, 2300 bp, Homo sapien
tggcactgcctagtggagctgtacctgtggagtcttccagactccagaatggtagatccattagcagcttgtactgtgcacctggcaaagccgcagacactcagtgccagctcttgagagcagccatgcgagctgagccctgtggagccacaggggtagagcttcccaaagccttgggggcccaccccttgcatcactgtggcctgtacgtgaaacatggaatcaaaggagattatttaaagctttaagattcaataactgccctgctgggttttgaacttgcatgagatgtgtagcccctttgttttggctgatttctccattttggaatgggtatatttacccaatgcctatatctccattgtatcttggaagtaactaacttgtttttgattttataggctcataggtggaagggacttgccttgtctcagatgagactttggtctgtggactttagagttattgctgaaatgagttaatacttgggggactgttaagaaggaatgattgtattttgcaatgtgaggacatgagatttgacaggagccaggagcaaaatgatatggtttggatttgtgtcctctcccaaatctcttgtcaaattgtaatcctcagtgttggaggagaggtctggtgggaggcgaatggatcatgggtgcggatttcccccttgctgtcttcttgatagtgagtgagttctcatgacatctgattgtttaaaagtgtgtagcacctcctccttcactctttctcctcctctggccatgtaagatgtgccttcttcctcttcaccttctgccacattttcctgaggcctccccagccatgctcccatacagcctgtggaatggtgagccagttaaacgtcttttattattttttttcgagacagagttttgctccgtcgttcaggcttgagttcagggtgtgatcttggctcactgcaacctcttcctcccgggtttaagtaattctcttgcctcagcctcccgagtagctgggattacaggcatatgccaccacggcctggctcagttttgtatttttagtagagactgggttttcccatgttggacaggctggtcatgaactcctggccatagtgatctgcccactttggcctcccaaagtgctgatattacaagcatgaaccgccatgtgtggcctaaatgtcttttctttataaattatgcagtctcaggtagttttttatagcaatgtgagaaagaactaatatggggggtaggatggctattaaaataattatccttcctcttgatatgggtatgtcctgtacttacagttaacacattgcgtttttttaatagaatgaatgtttagcatattattctgctcataccatagaatgtctttattttttaaatgtttatggagtttcatggttgttatgtatttatattcctgatgaactgagagtaatgtagtgttatttataatgccgaattccttctcaagaatgccactaaaactcttcctattatggagttttttgtactaacatcagagcaagaggtagaaactattaatactatatttaataattaaacgatatgtgttcctatgagtaaatatattaatagtatatttaataattaaatgatatgtgttcaaagtttcaaagttcacctttgatattttccatctccttaaaatgagaatgtgtaattagccatttctagaaatggtgactatagttaataataatatattacatatttgaaaattgctaagaaaatagatattaagtgttcttaccacaaaatgataagtatatgaggtaatggacatgttaatagctgtattaagctacttcacaatgtatacatagttcaaagcatgctgtacacaatatatacaatttttatttgtcaattaaaaacaaaaaataagatcaatgaatagccatttctttgtcataaaacttttaaaaattttatttcaatttttaggaaaaattcttaaaaataatgagactctagtacaacatggagttaagccacaggaaattgtacaagtggaaatcttttctacaaatccagatctgtatccagtcagaagaatagatggattaactgatgtctctcaaatcataactgtcactgtccaaactggttcgttatttgatgtcttttagataaagtatttttgagtcccttcttggttgagctttcattgaatcttggtgttatctctcaggacttgatcaataccagcaggtacctgttgagattgtcaaatctgactttcacaaaccatttcttggtggattcagacat

SEQ ID NO: 39168 - DNA, 2300 bp, Homo sapien
ttctccccgccccctcgcctctggctcctcccccttttccctatcgcgttcctcctttgcagcccccatccccctcctctggctcctcttcttccctaccgcgatcctccttccagaccccggcccccagcccgcctctagctccttcccttatttcctgccgcgctcctccttcccgacaccgcccctccgcctctggctactcctcttctctcctgccgcactcctccttcccggccccacctccccgcctctggctcatccccttctcttctgccgccctcctccttcccggccccgcccccagtctttggctcctccccctaccctgccgcgctcctccttcccggcccctccccgctgccctcttctggctcctcccccccacccgcctctggctcctctccttcccacccctgccgtgctccggcaggaagaggtggtgccagggccgttgctaggatacgaccaacagctgagaacgcggcgagtatggaagctgcgtcttaggagcctgggaaagcacttcgacgagaatagtttggtttcgtacacaggtaggagaacagattttgactgcggcctcctggtccgacgcttagatccagcctagagccggtgacagccgcgctggactctgggttctgtgtgctgggcagtgattcccacctgagcgcctggggctgcctagtcggtcaggaatgttccgactttactttaaaaaccgtgcgaagcatctcatctttctcggctccttttttggcttcccctctctgatttgggacttgaaccagcagcatcaagctaggaggtacacctcacctcacaccctgggtgcttgtcacggtaattgcatagaagatgtgtgtataacccacacctggcactagagactcttagccttccgtggccaccattctcatattaagtcgagagattttagactttcctcacctggcactctcactccttcctctccacccttggtctttgcctcttaacaaacctaaaaattcaacagatctatttggtagaaggcaatactggatccctgcctcactaattatactacattctaaatgtgttaagctttaaatggtagggaatgaaatgtaggtgaaaagggagacttttttgtatgcaaacatgatagaggttgctttttaaacaataagatttaaacattttcatttgaatagataatacataaaaaaatagttcgaatagtaaaaagaatgaagagtgaaaatcctccatctacccatttctccccatctccaggccaccttccacaggtgttttagacatacgcaaatatgtagttacacctgtaacattgtgcatactcttctgtgattggcttttacacttaagactgtgtgtccagttgttttctatcaatatttacagatctgtctcatttatgcatttatggatgaatttatgtatttatgtttcattgtgagaaggtgtttcgaagcatgtcaggaaatttggaaactctcataagcaaaaagattgataaatgtcactacctaacaatctaaaacttttatatagtaagagaaaaacaacatcaaacatacaatgggaaatataagggcaacacacaacaaagggatatttaattattaggactcataaaacaatatgaggatgtaaggaaacagtcaaggggaacttcttggggctataatagaaaacagtttgatggaatttaacaaaattaagatctgtatgccctttgacttgtccattctaattctgggaactcattttcagtatacttacacatatatacagagatagatgtataaaatgtttgttgcagcactatttttaatagtaaaaaactagaggggtctgcatggcggggcctcggagccaagacgaggttgagtagactcgttttgaattttctcccctctgctccggcggacttcccatgtcgccttgtggggctatcggcggcggcaggactgggggagtcagaggtctggcagcgctgtctgcgcagacctaccggacgctacctcccaacccccctttcttcctcctgcctcctcctcctcccgtcacctcctgacccgccggagctccgagcaactgccggcctccgcccccagccgcagccggtcactggcggcgccttccgcgccaagcttgggggccttttcggggtcctacatggcacggcttccgacccccggcccgggacggggctcgcaggccccagaggggcaggctggagaaggaggaggttaggtgtcttcaggagggttgctgagcccaaggacgcg

SEQ ID NO: 39169 - DNA, 2300 bp, Homo sapien
taaattatgattttggagatgggagtgtatgagtgtttgtaaaatcttatctgcacacctccacacctggtctacccatccaagaaagcctaattctagtggttacctctatgcccatttttcccctttacttttcatgaatgtgtggaaatgattaaaatgaatttacttttactgatcattattaaaacaaagccaattttatctgaatatatatttcactattctagtaaaaatatattttaaaatgggatgactgaaaaaaatggcattggatattacaaagttattggggagatgagagtgcaatttcagcagaacagtataaagaaataaatgaagacaatgaacatttatgaataagggaatggacctgtattaattttattaatccttttaacatatcaaatcaaattaaacagtactgtaatggttaaaaaatctgggacctggagttagattgcttaggtttaatcctggttccctcattaaactttgtgtgccttagttttctcatttacaaaatgggtctaatagcagtttctccctaataaaatcgttgtaaggattaaattagaaatctatgtacggtgcctcatgacaatgaatacttcataaatgttagctgctattatgagatagcaacatgtagtttgttactaaatttccaagaggaacatacttgacttgacctccaatactatcctgtggttctttaaaagttttcttattcattgataggccgggcgcggtggctcactcctgtaatccccaacacttttgaaggcggattgcttgaggctaggagttccagatcagcctggccaacatggtgaaaccccatctctactaaaaataccaaaattagccgggggtggtggcgggcgcctgtaatctcagctactcaggaggctgaggcaggagaatcgcgggagccagggaggtagaggttgcattgagccgagatcgaaccactgcacttcaacctgggcgacagagcaagactctgtatacactagaaaaaaaaaaaaaaaaaagaatttgttgttagacaaaatttagtttattaactaatttagtgattaacaaaagttcttctaagcagaattatttgatagctactatctcccttttctctttggctgccaggaagctgagagccaagttgttagtttaacaaaagcaagtaggcacctgacagtttctcgcctctgacttcatcgtgatgatttctctgactcggattttttttatatctgtaaaattaaactgctgtcagtgtttggtttagagagctgtgccgtttcacaagtgtaaaagatcttggagagaagttagtgtcctgattcacttggatctaggtagccagttggtaacagcctccgcctctggctcctccccttctccctgccgcgtccctcctccccgccccttcgcctctggccccgccccttctccctgccgcttccctcctccacgcccgctcgcctctgactcctccccttctccctgacgcgtccctcttcctgtctcttcgcctctggctcctcccctttctcctgccatgtttcttctccccgccccctcgcctctggctcctcccccttttccctatcgcgttcctcctttgcagcccccatccccctcctctggctcctcttcttccctaccgcgatcctccttccagaccccggcccccagcccgcctctagctccttcccttatttcctgccgcgctcctccttcccgacaccgcccctccgcctctggctactcctcttctctcctgccgcactcctccttcccggccccacctccccgcctctggctcatccccttctcttctgccgccctcctccttcccggccccgcccccagtctttggctcctccccctaccctgccgcgctcctccttcccggcccctccccgctgccctcttctggctcctcccccccacccgcctctggctcctctccttcccacccctgccgtgctccggcaggaagaggtggtgccagggccgttgctaggatacgaccaacagctgagaacgcggcgagtatggaagctgcgtcttaggagcctgggaaagcacttcgacgagaatagtttggtttcgtacacaggtaggagaacagattttgactgcggcctcctggtccgacgcttagatccagcctagagccggtgacagccgcgctggactctgggttctgtgtgctgggcagtgattcccacctgagcgcctggggctgcctagtcggtcaggaatgttccgactttactttaaaaaccgtg

SEQ ID NO: 39170 - DNA, 2300 bp, Homo sapien
tgtttcatgagaaatacgaagtcgtttggtggaataaatcctgagaaaatgcatagatttatcatgaaaaggaaaatggaaaatggtattgtaaaattactctttcacttttggaattgagaagctttttcctattggttgttttcattaagtttgaatataaatttattatgtaaccaaactacatttgtgtgtatgtgcgtgtatgtgtgcgtggacaggattttgacatgctaataacttttccatgctccacagactacccaaggaagcctaactaagttaggttcctatttaagattaaattgtataaagtcatcctcacagcaaactacaaaaaaaaatgaatagtggctatcaagtcacatttaacactgtgagacacttaagttctctcctaccagtttttcttcccccatctcctgactctattcctaaacctactgtttgcataccgtctctaacattgagaacagtgaatgacaaattttaaagaggagacccagcaaagtgaatgtttaaaaccagtggaatgtttattagtagcagaatgtaagataaattatgattttggagatgggagtgtatgagtgtttgtaaaatcttatctgcacacctccacacctggtctacccatccaagaaagcctaattctagtggttacctctatgcccatttttcccctttacttttcatgaatgtgtggaaatgattaaaatgaatttacttttactgatcattattaaaacaaagccaattttatctgaatatatatttcactattctagtaaaaatatattttaaaatgggatgactgaaaaaaatggcattggatattacaaagttattggggagatgagagtgcaatttcagcagaacagtataaagaaataaatgaagacaatgaacatttatgaataagggaatggacctgtattaattttattaatccttttaacatatcaaatcaaattaaacagtactgtaatggttaaaaaatctgggacctggagttagattgcttaggtttaatcctggttccctcattaaactttgtgtgccttagttttctcatttacaaaatgggtctaatagcagtttctccctaataaaatcgttgtaaggattaaattagaaatctatgtacggtgcctcatgacaatgaatacttcataaatgttagctgctattatgagatagcaacatgtagtttgttactaaatttccaagaggaacatacttgacttgacctccaatactatcctgtggttctttaaaagttttcttattcattgataggccgggcgcggtggctcactcctgtaatccccaacacttttgaaggcggattgcttgaggctaggagttccagatcagcctggccaacatggtgaaaccccatctctactaaaaataccaaaattagccgggggtggtggcgggcgcctgtaatctcagctactcaggaggctgaggcaggagaatcgcgggagccagggaggtagaggttgcattgagccgagatcgaaccactgcacttcaacctgggcgacagagcaagactctgtatacactagaaaaaaaaaaaaaaaaaagaatttgttgttagacaaaatttagtttattaactaatttagtgattaacaaaagttcttctaagcagaattatttgatagctactatctcccttttctctttggctgccaggaagctgagagccaagttgttagtttaacaaaagcaagtaggcacctgacagtttctcgcctctgacttcatcgtgatgatttctctgactcggattttttttatatctgtaaaattaaactgctgtcagtgtttggtttagagagctgtgccgtttcacaagtgtaaaagatcttggagagaagttagtgtcctgattcacttggatctaggtagccagttggtaacagcctccgcctctggctcctccccttctccctgccgcgtccctcctccccgccccttcgcctctggccccgccccttctccctgccgcttccctcctccacgcccgctcgcctctgactcctccccttctccctgacgcgtccctcttcctgtctcttcgcctctggctcctcccctttctcctgccatgtttcttctccccgccccctcgcctctggctcctcccccttttccctatcgcgttcctcctttgcagcccccatccccctcctctggctcctcttcttccctaccgcgatcctccttccagaccccggcccccagcccgcctctagctccttcccttatttcctgccgcgctcctc

SEQ ID NO: 39171 - DNA, 2300 bp, Homo sapien
ttttttttttttttgtgagacggaatcttgctctgtcacccaggctagagtgcaatggcccaatcttggctcactgcaacctctgcctcctgagtttgagtgattctcctgtctcagcctccagagtagctgagattacaggcacacaccacaaggcctggctaatttttgtatttttagtagagagaaggttttgtcatgttggccaggctgtctcaaacccttgacctcaggtgatcctcctgcctcagcttcccaaagtgctgggattacaggcatgagccaccaggcccagccgaagttttcttttcttgttgatttctttgtctggttggaatcagagtccacacctggctgaagtttttgtttcttgttgatttctttgtctggttggaatcagagtaatacttgccttatagaattagttgttaattgtttcctcctcttctatattttggaatagtttcttaagtgttattctttaattgttcagtggaatttaccagcgaagccatctggacctgtgcttttccttctggataggtttttttttttttcttgctaattcaatttctttaattatgttagatctagtcagatttttctttatgccttcttgagttgatttaggtagtttgtgtttttctaggaatctggccattttatctactttatcttttttaagcatagttgttcatagtattccttcttattcctgtttatttcagcaaggctattagtgatggttcttttattcttgcttgtattaaatcttctctcttttttttcttagtttcactaaaggtttgccaattttgttgatccttttagggaaccaattcctggtttcattgattttctttattgatattctgtctccttcttttctaatctttaatatttcctttcttctgtttgcttttggtttagctttcattttttctagtctcatgcctctaatgaaaggcctcatctcttccaactcattctcttcaactgttgcctaagttgtttgtatatctgaaacataaatttgatggtgtcacttagaagcttaaaagtcttctcattgttcccattccttaaaaagtaaaattcaaattttgtataatggcaaacaacacctttcataatcttaaccagtttaccttaacaatcaaacccacctttccaatcacataaaatcacctggaatttatatatacatttttaacctcttttcctttgtacttgtgttttctcaatttgttcttttctcctactgactttttagaaagtcacccacgctttttagttatttccttttccctggtaccatcacactttgcatcaacttcttttagaacagttaccaaattatttattaatacacgccttcttcattattctttgaattccaggatgtgaaatcccattttagaaattatgtcccagtaactgacacatagtgagtggtcagtgtttgtggaggtaggaaaaagtggtatggtctgatatcatttcatctggaaataagatgatgtatttcagccagtgaaatcgaaaagagcgatggaaaatgacctcacactccatagggctttggttcgtaagacacagagaatactgatatccttgtgcgaagaactaacttgctgttgagagatcaattcagaggatgctcaagctccgttatcactttcattttactaaactgagaaaggaaggttgaggaatgcatcaacggttaagcacagtgcaggttcctacagcgactggagttttttggtagttgggagtgtttccctcaatctttgggcaagccgtcagcagtggcaggaacaggaacagacagctgggaaaccctttctttccccaatcgtcttctagcttagctttaggcttgtatgcccatcgcgcatgcgtcaatttttctcttttaagatgggcggggcagagtctttgctcctttggcgatcctgaaggggtggagctaagctgtttccagggtgacagagtggcgacctcggtggtcgattgagcaggtctgagaattgttcccaaagggttgtgcgtcaccgagtcgttggcgctgtcatggcgggtgtgctgaagaaggtgagacgaatggaggtcactgttggaatttagactgtgggggtagactcagtccgatagccctacttcccgcgggtgttgacccctactgtcgcgggctcggcggtgcttttcggggactcgttctgcatgccttaccgggtagggcaggttagtggttccgctccgagagtcaggaaaaaagctccaaacaagcgagactg

SEQ ID NO: 39172 - DNA, 2300 bp, Homo sapien
atcatttatttgtggtgtataatttttttttcatatgctactgaatttggtttgctagtacttttctgagtattttgtgtttattaataagggatattggcctgaagttttattttcttttttctttccttttttttttttttttttgtgagacggaatcttgctctgtcacccaggctagagtgcaatggcccaatcttggctcactgcaacctctgcctcctgagtttgagtgattctcctgtctcagcctccagagtagctgagattacaggcacacaccacaaggcctggctaatttttgtatttttagtagagagaaggttttgtcatgttggccaggctgtctcaaacccttgacctcaggtgatcctcctgcctcagcttcccaaagtgctgggattacaggcatgagccaccaggcccagccgaagttttcttttcttgttgatttctttgtctggttggaatcagagtccacacctggctgaagtttttgtttcttgttgatttctttgtctggttggaatcagagtaatacttgccttatagaattagttgttaattgtttcctcctcttctatattttggaatagtttcttaagtgttattctttaattgttcagtggaatttaccagcgaagccatctggacctgtgcttttccttctggataggtttttttttttttcttgctaattcaatttctttaattatgttagatctagtcagatttttctttatgccttcttgagttgatttaggtagtttgtgtttttctaggaatctggccattttatctactttatcttttttaagcatagttgttcatagtattccttcttattcctgtttatttcagcaaggctattagtgatggttcttttattcttgcttgtattaaatcttctctcttttttttcttagtttcactaaaggtttgccaattttgttgatccttttagggaaccaattcctggtttcattgattttctttattgatattctgtctccttcttttctaatctttaatatttcctttcttctgtttgcttttggtttagctttcattttttctagtctcatgcctctaatgaaaggcctcatctcttccaactcattctcttcaactgttgcctaagttgtttgtatatctgaaacataaatttgatggtgtcacttagaagcttaaaagtcttctcattgttcccattccttaaaaagtaaaattcaaattttgtataatggcaaacaacacctttcataatcttaaccagtttaccttaacaatcaaacccacctttccaatcacataaaatcacctggaatttatatatacatttttaacctcttttcctttgtacttgtgttttctcaatttgttcttttctcctactgactttttagaaagtcacccacgctttttagttatttccttttccctggtaccatcacactttgcatcaacttcttttagaacagttaccaaattatttattaatacacgccttcttcattattctttgaattccaggatgtgaaatcccattttagaaattatgtcccagtaactgacacatagtgagtggtcagtgtttgtggaggtaggaaaaagtggtatggtctgatatcatttcatctggaaataagatgatgtatttcagccagtgaaatcgaaaagagcgatggaaaatgacctcacactccatagggctttggttcgtaagacacagagaatactgatatccttgtgcgaagaactaacttgctgttgagagatcaattcagaggatgctcaagctccgttatcactttcattttactaaactgagaaaggaaggttgaggaatgcatcaacggttaagcacagtgcaggttcctacagcgactggagttttttggtagttgggagtgtttccctcaatctttgggcaagccgtcagcagtggcaggaacaggaacagacagctgggaaaccctttctttccccaatcgtcttctagcttagctttaggcttgtatgcccatcgcgcatgcgtcaatttttctcttttaagatgggcggggcagagtctttgctcctttggcgatcctgaaggggtggagctaagctgtttccagggtgacagagtggcgacctcggtggtcgattgagcaggtctgagaattgttcccaaagggttgtgcgtcaccgagtcgttggcgctgtcatggcgggtgtgctgaagaaggtgagacgaatggaggtcactgttggaatttagactgtgggggtagactcagtccgatagccctacttcc

SEQ ID NO: 39173 - DNA, 2300 bp, Homo sapien
atatagatagaaggaatgcgtatttggatgtcagtgtcattttgtataccttccttggaacaacagtagtattcaactagtccttcactgttaaatctgacccctccctgaaactcattctcaccagacaaaactagaggcactgtttgaaaagctaggactcattttgtttcccctttgagaaaacccacaggaaaagccagctttcatagaggcaaatgtggaagcgattactagcattatgaatagatcattctttcaaatatatgagttactcaaagtatgtcttattgtgtgtgcatagatgactaactacttgaggaataggcctcattaaaatggtggtgccatggtcattgtatcatcatcatcatcatcactcccatactacagataaataatctcaaaaatgtaaataatgcatctacagaaacagtaagtggtaaagcaagacgtgttcacaggactatgtcttcagtaacaggctctcatttattttaccacatgatcttattttggcttttctatcattatatgcattattttaaatgttgtatggtataggtagatctataacaactattatataaacggataaaacaggcataccatcattagtttaagagcagaaaagtcactgcaatgtgtcaagccacactttaaagtgttaggtgcacattttcccacacatttgcattatactctaaagctttatatgaatttctaatattgtaagtaaaaaaaagttgtataaaattaaagtgtttcacaatgctgattgcttttcacaagaattcttcattgaaaaattccaaattagattaataatgataaaatgtagacaatgtatgcaatgatctaacttttacccttgactattgcaatacacagttaatagtggtttaaacataaaatacttctcagtttgctttgaagatgactgaaacgcaccttcttttatcacagttaaagaggagttaggacctctcatttcacatttacggtttctcaatttttgaaataaaactggcaaattcactacaatccacgtatttatattcattaacactgagtacaaagaaaatgtcagagatgagacgaaaaacaaaagcgtgtagtgctcccagtagcttaagaagtagagagtttcaggaaaaagggaagaatcactggcagcaaatccaatgagggtttgtaaaataagaaatgaaaatgaatataaaatatgaaatgagtttctaatgtaagtcagaaagaggtcactgagacctgcaaaacgagttgttttagtaggggggtgtaggggatagaggccagatggctttgtgagtgccgatggtggcctgagttaatccaaggatagctgtgtcaaaacaaatttaaggcagactattttcattggaaaatcagtaagacaataaacttaattggttttttaaaagaaaacaaccttcctcaattaaaaatcccaatttttttgcttgttttattaatacatttgctactcatttttttagactatatatgctcaataacttgacctaaaaattcttgatcagattagatgtcactgactgccctatctccgtctgtatatcagactagcaattattaaacaaaaatcaaagacagcaaattagtatgacaagaagattgtatttaatgaaatttgacctgaatctgaaagatggagaaagaaaaatagtgtgtattaaaatatgtcaaaagtggattaggctctgacaacacaaagacttacagatttgtctcttgaacaaatacctttaaattgtgcgttaattccaagtggtttggttttgttccatcagtagcaacactccctgcagctgaattggcaggtcctttgttttcataagagttctttgaaccaatcaggacagagataatcttattatacctctgtaggcttgcgtttcttttgatgagagtctagagaagtcatgggtaatactttaccgtgtgccagagaccgcttatgtttcagttgtacaaggtcaggtcttaatttaaccaccaactggatacttaattttagatacacagaagcacacattggctccagggcacttcctctgatttaggaaggcaagtccctggataagaatgacaagatgatcattccaaaaggtgagattatgaaatatttgatctgtacctcaccaactagcttattgaatagttcattattggtaatattttaaacagattgaaatacaaattatagtagctactcattactttctttccacttgatcacctacgggcttacctgtttagag

SEQ ID NO: 39174 - DNA, 2300 bp, Homo sapien
tatctctctgagatagtgatttcaattcctttggatatatacacacagaagtgagattgctggatcataaggtagttctatttttaaatttttgagaaacctttgtactgttttttaaaatagctatacccccaaaaaagataaactatgtgccagaatggatagtttacttagcttgatagtggtgaatatttcacaatgtatacatatgtcgaattatcaagttgtacatggtaaatacatataattttaaattgtcaactatacttcaataaagttgggggaaaaatccatcatagttccttaaaagtggttagtcatatctggttaaataaacatcatacttaaactaacactttacatataatgttaaatattcttcaagtatatgaattttaataactgtgtagtattccatttttatgtgtacaataatgtcttatacaaatttcctattttgggacatttatgttgtttctaatgttttggcaatttaaacacagctgagataaacattctcacatgcacatctttttttacatctctgattatttcttttatttatttacttatttagtttttgagacagagtcttgttttatcacccaaactggagtgaagtggcatgaacatggctcactgcagcctcgaccttctaggctcaagcaatcctcccacctcagccccccaagtagctgatactacaggtgcctaccaccacatccaattagtttttgtatttgttgtagagatgaggtttcaccatgttgcccaggctggtctcaaactcctgagctcaggcaatccacctatctcagcctcccaaagtcctcggattacaggcatgagccaccaggcccggccttcttcctagacatagaattacagaagaaggatagggcttttaaaaatcattatatcacattagcttgtgatcagggcacgtctactaataagttgtcttttcatgggcttatctttctttaactctttgctattctgtaagtttatattcccctagaaacctgtgagtttgtgagtctaaagctccttcctaaactgttatgagtgtagtcctcaaaagctaacatgcatcttcccacatttctgttataattaaatttgacttggaaatcaatagtaaagagtaaaactttcttttttctctattttttcttgttcttattttatttttttatctagtcctcatactaatttcattaaaattttttacttttgtaatatgaaactggagataaaactactaaacgggttctatcgttagtatatttgcatagaaattaagcatcaatcagtaaagccccaaaatttgaagagaattcggcaaaaatatatctgtgacctataaagaaacacaaggctaattttaagagttgtgtgtatttaattatacaattattcattcatttagtaaatgctgagtttttatcccatgccagatatcatgtttagtttctacagatcattttgccttttatatctttttctaaaatgttgagttgtgtttcttcgaagtaacataaaagtagcatttgttttttggactaagattgtttgtgtgtgtgcatgttttcaaggtatcagaagaacatactttgctgttaagaaagatgctatttaaactgatttagttctccccatcatgcttaggatttctcttcagtagaaaaggcaaataccataaagaaggaatcgctgtaacttattgcttgtaagtaaaattacctgtgactgtggggtaaaacccaattctgacagttacacttctatctgaaatttttggggaactagttgattctgttgtttaaatcatcctaacgaatccattcatgtgatttgccactttgtgctatgcaattctttaaaaataagcattcagccaccaaataaaaagcaaagttataacagaattgtatttatattgatttctccacatctttaaaagtatgcatacaaatgatcaaagtgcataaaaatgagaattcgtattgtttggtatataacaactgtattttttttaccgtaccaaaaaaaaaaaaaaaaaagaaaatgtcttttaactcttgcccttcctctgataggataaatcctgatgattctctcagggacctctagtagattagctcaacactcgagaatcattgcagcttcaaggtaaaagaaaaattcccagggaatcagtgtcccccattccacacagccgaaacctgcatctccctcagaaccccagggtttctatttgggctggccttggataaaattgtaaagaaaaccaaatt

SEQ ID NO: 39175 - DNA, 2300 bp, Homo sapien
agctaatttttgtatgtttactagagacagggttttgccatgttggccaggctggtctcaaactcctgggctcaagtgatctgcccacctcagccttccaaagtgttggaattacaggcgtgagccaccgtgcatggccagaaaaagatttcttaactataacaccaagcaatacaacaaaaaaattgataaattggtcttggacttcaccaaaatttaaaaagtttgctcttcaaaatgaatcaaaagacaagccccagaatagaaaaaaaaagtcatatacctaataaaatatttgtctccagcacatataaagattcttacaactcaataataaggagacaattaacccaattttaaaatgggcataagcaagagattgaggctgcagtgagctatgatcactccactgcactccagcctgggtgaccgagcaagaccctgtctcaaaaagttgtttaaaaaagggggaggtaagatttgaataaatatttcaccaaagaagatataaggtggccaataaacacatgaaatgatgaacatcttactagggaaatgaaaattaaaactatcatttgacaccctctaaaatgactataatagaaagacaagcaataataggtgaggatgtcgagaaaccggaactctcattcattgctgatgggaatgtaaattggtacagccgtttcggaaaacagttttttacagtttcttaaaaagtaaatttaccatataacccagtaattctgctcctacatatctactcaaaataaatgaaaacctgaggttactcaaacacttgcatgtaaatgttcatagaaactttattcatagataaaaggtagaaacccaaagctagaaacaacccaaatattcaccagctgctgaaggtataatcagaatatcatgtactatacatgtattgataaatgtatttttgtatgcattaatatttttaatagattttacatatctataaaatggtgttatatttatggagtcctataaactatggatttattttaacatatacacaacaatatgctcatatataatttctttttttaatttgtgcaaatgtatggagtacataagaaaatttgttgtatatatataatatgtagtgattaagtcatatatataatttcaaattagcatctcttccattttcaggccagatacaaatctgggctcagattctagctctctcacttcttagctctgtgctcccatgctagtaacttaacctctctgagtgtgtactagttaagtacaggcactaatgtacaccttacaggactgtagaattaaaggagataatgcttaacactggaatggcataatgtcagtccttaataaatcatatccagtattattatttgtatttttcgagtttcatttgcaagtctagatttttactagtaatcatggtgagtaggaagaagcatttcgttcagtggagaaagacacctctctgtactttcagctctccaacttctgacgtttcacttaatctctgagagcctcagttgccaacatctataaatgagaatcatgttattcatctcacagtatttatgattagaaaaacttattgaagtgctttgtaaactgcaaagtaggataaaattatgaaatactatattattatgaccttttgtccccatcaataccacctacagtatgtttatagaagaaccaaaataactacccatggagtattgtggagacatttctcaaccctaagattataatgaaagaatcttttcatggccatggaggtggtggcaagtcattttcaaaataaattttatttccctgttgtttgaatacaaagtgagaagaactgtgttactccttatctgaaacactctgcctgtcctcatgagctatcagactcagctaaatatggccctggccagtatgttaataatccccactggttctgagacctccatccaccaccgatgtgacattctttgtgttcaaatgtctagctgacgtctgatgcttaaaacagcccatgccttcacccctctctgcattgtcacagccctgtatcaccactcttaaaaggctcccacagccactcctagcaccagttgttgaccagcctgccacttgcctccctgcctgcttctggccgccttgaatgcctggtccttcaagctccttctgggtctgacaaagcagggaccatgtctacctttggctaccgaagaggactcagtaaatacgaatccatcgacgaggatgaactcctcgcctccctgtcagccgaggagctgaaggagctagag

SEQ ID NO: 39176 - DNA, 2300 bp, Homo sapien
ctatctcatggggtagttgtgtggattaagactgtgtataaatatatggaaactatttttataaaggtttaggggattaaaggagagaatggtgggagagaggatgattaaaagctttttaaaatggataactgattatttatatttaaacaggtactccctaggctgatgagaggtatgaaacagcttgaaaagttaggagacctactaataagtttgttaggtttgttagggagcaaggagggcttctgcttgggctctcagatttaggtatgaattggaatcattgtggagattatgagaaatgcatatgcctaggcccaattcctagatattactcagaatcactggatctgaggtgaagcttggacatgtctatttttagcaagcttgacagaaaattctaaagtatatcacagtttgaaaaccactgctaaagtccacgttgtctgataggataatccttgagcacattggaaatcttaatagatttttcttcaatttttggtctatattttgcaaattgaagctaaattaagttaaaccaaattcttttagtacagcatttctctcaccgctgaagataccagtgtacatttcacaactaagaaggagatacagttggggaagtattgcactatttaatggggactcacaagatcatatttgacttagaaaattttcaggggaaaggtggaggcagtatagaaggtggattgaggattgtgagggaaagacaagggaaatcagatagttgatttatagtattgcaggtgaaatatgatgagggcctgaattaagagagtactttgggaattcaagaacaattaaagtctccagcagaaattagtcccagttatatatagaaggtgagggaagggagtttcaataaaggcaggcattataaccaccagcagaaaaagtacacagaaacatatttttattctcattcgctgcaaatatgcctaaatgttaatgagactctggattggtgattggcttcatggaggaggcagatcatcagtaaatcttttgttttaccacagtttctaaaaattcattttgtggaaattgagatttcattgtaatacataaatacatgatatgtacttttacataaatagttctgatgccattcattagctggtagtattatgaagggagaatgagaaggttataaacaagattactaggtcttattttgtagttagatctgttgcctttcatgtagtgtgattcagttaattttatataaagagtatgtgcagttttgctaagtgaagttcaacatatatagtcctgaataagtgagaaactaaggaataggaaaaaataaaacattaaactacgtctctacagccatatctggtttatatggattggggctgataatgttattgagcattatctttccctgccatactcacctggtttgttttttcaagatttagtgatacttaagccatttttattaatcaaccttaatctttatttcctttaactcctcagcacttgttttaacttgcttattttctttagttttttgtttcctcactatatataattcttggagatagactttatgcctaggtagtcttctataatttttgtaacttctggctcccagatcagtgaatacttattgattgattgaataattataattactcgtttattttttaggagctcattctgcgtttcttattgcttgattaggttgttaagcccttcagtttctaatgcacatggtatctggactttagtcttcatttattaagcgaccgaaatggtttagttgtgctgctgaactaatataggtggtaacagttgtctaacagtagtttgtttgtgttctaaatcagacctgttgggtagggattcttacataggcatacagggaaggatatgcttagagggatcattgtattgatgatggcctgagtaaggcactgttggtggaaagtttagaccgggaatgtatttcaccttgagtagtaaggaaagataaaagttaaaattcactggatttggaatatacaaagatgagaagatacctttgtctagtatagaggaaaaagatgagcacaaaaatgtatgtgacgcagcgtagctgtaagcacaagaagagattcagaaaagtccaacagggttgggttatgaattttacttctggttattcttagctctatatatataatacagggacatttcttaactagtctcagccttcatgtctagatttgtaaaatgggcttagtcaaggatttcaaagagtaattcaatcattatggaaaatactt

SEQ ID NO: 39177 - DNA, 2300 bp, Homo sapien
taacattcaaagtgctgaagattttcctaaactgagcatatgcaaacattagtggtgctttaagaatcttgtattttaattagtttttggtgaaaaaggcaaagtggttatttctttaacaccacttttagaaataaatcagtaacaggaaaaaaaaatacccttctaaaacaacatgatgtagtgcaaagtacaatgggataggactaggtgtgaggagtcctggttttctagttctggttacattattaaattgctgtatgacttgggctcactggatcagttttctcatttgttgaaaaaagtgtgtgtgaatggggaggggcttaaagttgttacccaaaattctcgttttgagccactcctcttgtttcatccttctaatcaggaaactcaatgttctctaaggtctaaattccgaaatatgaaacacatctgaaattgaatggaacgattcaatctccaaccggatggcacaagatacaaagggtggactcctatgaagttaacaatgaatccaataactttccagaaattgtctaatcctaacttcttaaagaagcaggtgaaatctggtttggcatacctaatattacttaaaggagttataaaatggtattgctttgttgaaatttccgtgttttctgggttccagtggcacatactctgcaggtgctagcaaagtggagagaaagggatccagccagtatttcaacaaaccacacttcaacccagtcaccgcagtatgatcccgacaaggcctacaccacagagcagaacctccccacccccagaattgccagcagccaatgtaatgaatgcttccgtcaacaacacacattccccttcccacagcagaactgctcgctcccaaccggccatctggggttggaattggccgcacagcaccaaactaagaatcattctcggccccaaaagccaagagctaccagagattgaggtttccctgcgcatggctgcggggagagcagcaccccctcccaccaatggggggaaaaaaaaaatcagtgggaaggagagtagaaaccaggcctaggcaaggttgctagagaaataaatcttgtttctctttaacgaagagcaataacatttcttgcaccctctctaatccgaagagagcccaggctcttgcactcgacttcattccctcctggaatcctaatgggagattaaaaaccaccttccttccccgacctatccactcctcaaacctggcattgttaaggaacgtacccccagatcaagcagtaagaggtgaagcgagagctagaacaagggcccagattctaggaccaagcggctcttgcaagaaaatccccttgtggcctgagaataaagttttaaccagcagcaagggcgcgggccgaggcccggccaggctggaggacaggcctgcggaggtgacactcccttattctccagcagctcgggaaggcggcgcccgaccgccacggcccgcaccctgggagcagggcgagggcgccgacgaggggccggggccggggccggggctggcgggaggcctggcccgcgccgctcccgcctccttccccactcccacttcccggcccccaagcccgggcccgtgaggtaatgtcacgggtggcgacgcgggtctcgtccactgaccacacatttcttgccgaggaaagtgaagagggactcgttctcctgcggggtgagcaacagggaccccacgttggtgaccctccgcggcggcggcggctgctgctggacggagctcatggtttcgccggcggggttgggagtccagggccgtctcctccggcgagtgggcgagagctcgttccccctctcggtgacaggggcggggagaagtggagtcagaggcgccacatctcgcagctcctccggagcggggaggaggacgaggtcgagggaagcaggcgctgacggcgagccaccttcgcgccgcgctgagaaagggaagctcccggcacccgcccggccaggctagggccggatggtcgttgtcctcgcactccggcgactgcgctaaactcccaactcctcccccaaccctcccgcagcggcggcggcggccgcacaatccaacatggcagcgggggcgggcgagaccacaggacggagggcgcgggggagcgcgccggaaacgcgcggctgcggcccgggagaaacccccccactcggcggcgggcctcgcggcgcgggcccgaagccacgcccccttccggccgaggcgcggaccgcgcggagctaagtggaatcccggttggcttggggcgcaggcttccaac

SEQ ID NO: 39178 - DNA, 2300 bp, Homo sapien
tgaaaaaatatgtacaattgtatatttgaaggacagtttttgaagagtcagaattagaacaaaggtaagaatacatatattaagtcttgatcccttagctcagggaaagcagaaaagaccataggcaaggactgtcaatggccgacaactaatacttgagtaaccactatgtatcaggtactttacatgtgatacctttttttaatgtcttataattttagtttaaaaaaattttaatacacaataactgtacatatttatgggggtacatagtgatgttgcaatacatataacatatagtgattagggtaattagcatatctatcatctcaaaaacttatgtctttgttttgggaacatgcaatatccttcttctagctatttgaaactatacaatattgttaactatagtcatcctacagtgctacagaacactagaacttatacctcctatctagttgtaattgtgtattttacaactttgaagtaggtgtaattatccctatttagactatacctgtatgaaacagaaattattttcattttacagatgaggaaacagacgcagagaagtaatttgtccaaagtccatagggttgtaagactcataacaagaactacaacttgggcctatctgaatcttatacttctggtactatacttgttcacaggtttgaaaagagctttaatttctattatttctcaagaatttgtaatgctttctcttgtcactgtgctttcaacttagaggagttgcagttttgataaaagacaaactgatttagcttctaggtttgttaaatatgtaattcagaggcaactccaggcttatatttctacgactgctttctaaatctaattattttataaatagtcctgttgctttaattcactttttaccctaacataattaatcaagtttaactttgaaatctccatattttatgtgagaactcccaaggctatccacttttattttcctttgtaaatttattgttgctcagcctatttcattaatggcagctttaattataatattttattatattttcaaagtgcatgataatggtttaccagtctggttagtacatcagagatttctattgggagctatcagagatgttaacatccaacaattttaccaaagtgtaattgttatagacgtcttaacatgaatttacgcaacaaaaatatgtttaatgtggagaacagtgagatgcatatttgataattcactgcagtctgcatcatcatctctatattccaaaatttcgtcttaagccgtttagtatttaacttacagaagaaagggggttatcttagataacttttaatatcctaaggtattttccaattcacgatacagggagaaaagaaatgtgtccaggcccttagaagaaaatactttgaatttaaatgtgacacatacattaaacccgcgtgacacgccaggcaggcggtggaagtcaagtgcatttgtttttgtttcatccaccagggcgatctctttcacaattctgggagaggcctgtttgttcctccactcccacagctgaagtttgggacaaagtttgagaaaatcccaggcacctgcggctcctatcgaagccggcgaggagcacagggtagagcgtctcttcccagttttcagtcttcagatcgcaggcctctcggacccgcagagcgagcttcacgctgcagcgcttgagaaataagagctattccaaggaggggccctgggtcctcactgacgcttcgcaaaggtgtacgtccgcccagggaaggccggcggcgcagcgacggcgaggagtccccatccatcttctcttcaagcagcagtagctgggttcgggtacccaaccgacgagccgagacgccagaggccagagtacgaagttggaagcctgcgccccaagccaaccgggattccacttagctccgcgcggtccgcgcctcggccggaagggggcgtggcttcgggcccgcgccgcgaggcccgccgccgagtgggggggtttctcccgggccgcagccgcgcgtttccggcgcgctcccccgcgccctccgtcctgtggtctcgcccgcccccgctgccatgttggattgtgcggccgccgccgccgctgcgggagggttgggggaggagttgggagtttagcgcagtcgccggagtgcgaggacaacgaccatccggccctagcctggccgggcgggtgccgggagcttccctttctcagcgcggcgcgaaggtggctcgccgtcagcgcctgcttccctcgacctcgtcctcctccccgctc

SEQ ID NO: 39179 - DNA, 2300 bp, Homo sapien
ctttagccaaagcaatatattgcaacagtttaaatgccaagtagatatgagaatccaaatgaattctattaagcagacattgaagagatttgtaaaaatgtaaaacaatgccactcttctcactagcttttttgtttgtttgttttggaaaaataaatatatttacatacaaatatgttacccatgttaatatgtaagaggcttatataagattccagattccacatttcaactaaactttattgttattttaaaatgaattaataaagattttaaaaaatttctcagtattaatttctaatctagtaaacatcaatagatatagcccacataaaccaaagctctctaaagtcctcaacaagtttgagaataaaaaggggtcttgagaagaaaaaggttaagaactattgtccaagaccaaatgaaatgctgatatgagtgctacaacctaacatttctcggggcagtgacaatgaaggagaattgaaactgagatttccagagtgcttgccctttggacaaaagcatctttaggaaaggcctgatattttccatagaacatctttaataatgcacataatgtaatatttacaggtgaaataatatgatgtctgaaatttgttttaaaataatataatgaaaataatggtgatggtggtggtaagggtatagatggaataagattgtgctgttaattattgaagctgcatgattggttcatggggattcattataaaattctattttgagtatgtttgaacattttcaaaataaaaaaaattttaaaattttcatctctaggtaaactttttaatagtataaatttaggagagaatcaagcttaattttctcagatgttataattattcaaaaattctgttaattatggtttcttggatttacatagtacctttcttctgtagagttcaaactgattcatcttggctgacttttaaaatatgagtactcattatctatttatttggtcttttgaaacatcttagggaagtttgcaaattaaaaaaataaacacatcaaatacacataaaaaactatcatacaatgacaagtaaaattattgcatttttggaattagctgtaatacagtatatgttgcttgcatgcaaattgcataattctcattaagactgtaggctctaaaatcagttaaatttgaatttgatttctggctctcctactttataacacctgtaataacagtaataataatagaaatactaacaaatccagtatttgtagatcttgaaatgtgacaggttttgtgctaagtcatactatagattacttttggtgagtaaataagctgcctaaatatatattcgctaagaatttcatcaggatttcaaaaccagggtgccagatcatcgtccttgctcttacccactgcactacattgctctatcttaccagctaagtgctttgcctaagttatttaatctttatcagcctagttccctatttaataaaacagggataaaaacgtatccacttcataggcacaaggattacctcagataatgtacagaaaagactgacacatggctgtcacataagaatataaggaatgacagttaagattatttttattattcatttttcctcaccaagtagtatagctcccttagaatcatcatctaagaatatatgaaatcatctgcacagccaaatacaaaatatctaagagtagttttagaactctccctccaatatggttgccactggtcacatatgtggggaaaagcaagagagatcagattgttactgtgtctgtgtagaaagaagtagacataggagactccattttgttatgtactaagaaaaattcttctgccttgagattctgttaatctataaccttacccccaaccccatgctctctgaaacgtgtgctgtgtcaactcagagttaaatggattaagggcggtgcaagatgtgctttgttaaacagatgcttgaaggcagcacgctccttaagagtcatcaccactccctaatctcaagtacccagggacacaaaaactgcggaaggccgcagggacctctgcctaggaaagccaggtattgtccaaggtttctccccatgtgatagtctgaaatatggcctcgtgggaagggaaagacctgaccgtcccccagcccgacacccgtaaagggtctgtgctgaggaggattagtaaaagaggaaggaatgcctcttgcagttgagacgagaggaaggcatctgtctcctgcctgtccctgggcaatggaatgtctcggtataaaacccgattgtatgc

SEQ ID NO: 39180 - DNA, 2300 bp, Homo sapien
accatgttggccaggctggtctcaaactcctgacctcgtgatctgcctgcctcggcctcccaaagtgctgggaatacaggtgtgagccactgcgtctggctggtatctatacctttttacaatgtgtggaattatgttgctttccccactgcttcactagacctggctacttgcctgaaacatatcagatttgttgaacaaaaattcaagtgtatgtgtgtatatatgtatgcatgtattagtatatatattttataagtggaaaaatgtagatctagttttatattttgaataataaaaatagctagaaaaaataaaatctcagcagcatgtagaaagaattcattatatttaaaaatgcataccattataatgcatatttttgttactgtagtagaagtctgttataaaatgtagactagggaccaaaataatgccaaaataatttttccataggctagctagaaaaatagatgattgtgtatcatttatatacatggaaaacataatgaaaatctcctagaagaggaaatttgtaacagtattttactaaagtacaatattttgtatttttaggccctttggctctaaaaaatttattgtgatatgacattttaaaaaggtgttttttgttcccaagggtgtcagtttattaggcatatatatacgcaatgtgcagtcatgaccagagggaggtaaagaataatatttatggagagtagatattctttcattttccctgaacaacaaataaagaatgaagaagatttgcctttatatttttgtgggggagtgggagtcaaattaagatcccatgattagagaagagtgatgggagaaaaaccatctctgatagcttagagattcatctggtgctataatacacactccacatgaaggcaattgtctcaataatatccaatttatttaaaagagtaaattatcgttcacatttgttaatttaaaaattcagtgtacagagagcatacgacttgaactcaagtttctttacaaacttggggtgctatgttgtgagagttagcgtacaattttggttggtgtctttcctgaatttagtacgttaaataaagacaccaagaactacatgagaaacaatgtatgattcttaaaaagaaactgagtttaattatatcagagaaaaatctgtttaaaataaattcctttatttaaaaaaatccatacgataagataattttgatatgtaactgaaaccatattgctttcaggatgagatcttgttggctggaatgcatcaactattagatagtccttatattctgggaagattctttggcagttttcgtcccaacagactagttaaaggggcctaaagagacaagttttatttagggtttaactgctgaatatacaatccagtttctttataggaaaaccactggagttaaagaactaataggattttaggcttgtttatatgcctaagaagatgatagcaccaaaatccataatcaacacagggtaattaacatttctacttgttttttatttcagcctatgctagttccaagggtaactgctctctgttttaaaaataaacatttgaagccagtgcatttcaaattgcatgtaaagtattacttactgttagtacagttagttatttctttttgttctatttaatattagttaaaatcccaatatttgttaattttcaagtgggcatgttcttggagtcactttgtaagtaatcaataaggagatatgacaatccattcagacttcttttctagttcctcttagagccagtgaaggcttgtcagtacaagaaggtttgggttagcgtattcagaatcataggaaattaaaaccagaatggctagcagctagagtttgcatagctgacaaatgtgtgaaactttttatagtttttattgagtatatatttttttcacatttcactataaattggcatagatattaataagcctcaaagatattttaaaatatttggtctattcattgtataccacaaaacttaagagacatttgactccattatgtatgatattttgcttattattttcaaggagactgctgtaatgctgaaaacctcaagccatgtgtaacccatgggtggcgtggttaggagtgctaccactctttatcctattaactcaggcagccctcaaaccagcaatgcctccggtgatcaagagccagcctttcaacattttctgggcagccccaacaatgtattgtatgccttccttcaacgtggatataaatcttcaagtatttaacattatatcaaatccttt

SEQ ID NO: 39181 - DNA, 2300 bp, Homo sapien
gattgatgcagtttcttcatagcatcgatggtctttacaatttggcatgtttttgcagtggctggtgccggttgtttctttccatgtttagtgcttccttcaggagttcttgtaaggcaggcctggtcctgacaaaatctcccagcatttgcttgtctgtaaagtattttatttctccttcacttatgaagcttagtttggctggatatgaaattctgggttgaaaattcttttctttaagaatgttgaatattggcctccactctcttctggcttgtagcatttctgctgaaagatctgctgttagtctaatgggcttccctttgttggtaactcgacctttctctctggctgctcttaacactttttccttcatttcaaccttggtgaatctgacaattatgtgtcttggggttgctcttctcgaggagtatctgtgctgttctctgtatttcctgaatttgaatgttggcctgccttgctgtgttggggaagttctcctggataatatcccgaagactgttttccaacttggttccattctccccatcactttcaggtataccaatcaaacatacatttggtcttttcacatagtcccatatttcttggaggctttttcatttctttttattctttttctgtaaccttgtctccttgctttatttcactaatttgatcttcaatcactgataccctttcttccgcttgatcgaattggctattgaatcttgtgcatccgtcatgaagttcttgtgccatggttttcagctccatcaggtcatttaaggtcttctccacactgtttattctagttagccattcatctaatcttttttcaaggtttttagcttccttgcaatggattcaaacacccttctttagctcagagaagtttgttattactgaccttctgaaacctacttctgtcaactcatcaaagttattctccatccagctttgttccattgctggtgaggagctgcgatcctttggaggagaaaaggcattctgatttttagaattttcagcttttctgctctggtttctccccatctttgtggttatatctacctttggtctttgatgttggtgacctacagatggggttttggtgtagatgacctttttgttgatgttgatgctattcctttctttttgttttccttctaacagtcaggtccctcagctgcaggtctgttggagtttgctggaggtccattccagaccttgtttacctgggtatcaccagcggaggctgcagaaccgcaagtattgcagaagagcaaatattgctgaacaacaaatattgctgcctgatcctttctctggaagcttcgtcccagagggcagccgcctatatgagttgtctgtccacctctactgggaggtgtctcccagataggctacacgggcatcagggactcacttgaggaggcaatctgtcctttctcagagctcaaacgcggtgctgggagaaccactgctctcttcagagctgtcagacagagacgtttaagtctgcagaagttgtctgctgcctttttttgagctatgtcctgcccacagagatggagtctagaggcagtaggccttgttgagctgtggtgggctccacccagttcgagtttcctagctgctttgtttacctactcaagcctcagcaatggcggacacccctccctcagccaggctgctgcctcacagttcaatctcagactgctgtgctaggagtgagcaaggctctgtgggcgtgggacccaccgagccaggcacgggaatcaccttgtctactggttgctaagtccttgggaaaagcactattttggtgggagtgtcctgtttttccaggtagtctgtcacggcttaccttagctaggaaagggaaatcccccaatctcttacacttcctgggtgaggcgatgcccccgcctgcttcagctcgccctccttggactgcacccactgtccaaccagtcccagtgagatgaaccaggtacctcagttggaaatgcagaaatcacccgtcttctgcgtcgatcatgctgggagttgcagactggagctgttcctatttggccatcttccagtttcaatagttctttattttatttatgctatctatttcttttccttttttttttttttttttttttttgagatgaagtcttactctgttgcccaggctagagtgtagtggtgtgatctcggctcactgcaaccactgcctcctgggttcaagtgattctcctgacttaacctcctgagtagctgggactacaagagcatgccatcatgcc

SEQ ID NO: 39182 - DNA, 2300 bp, Homo sapien
cccatctgaaactttaccataagtttctcataataaaatctgaattagtggctgtggagagaagaatcagtttagcagctgagtgatagatcttcaaaagaagaatatgtagatcagaatgagaataaataagcagaaaagtgcaaatctaagcacatttctccatatcccattaaaccaatctcccaactctgggaataggtcagtctaatcaaatggttgagcctcattatcttatggagaatattaatcttttttgttcaaaggtataaatcagataacgtttgtcccaactgattcacaaagaggcagcattttcatcaaccacacaagatagaatgaccagtgttgttcatgaacaaaaagtggaacctgtaattcccaagatctagtgtgttccacaacttttgttattggtcatattgatgtctccacaccttcattttcacgtgcctctgtcagtttgtagaagcagaaaatgttgtgaaacatttgacataggagaactgcaatctggctttggcagctaaaaggcttgattttgtcacctgaccaagttaatccagatttttgatctatttatatacaatttctggtgctaaggagcctaatcaggagagcagccgagctatcccacccaggttgtgcaagagtggcctatgaaccagccaacacatttggtgatttggcaaaagtttgtgctataaaaggtagttctagaatcacttattgtcaccggatagaaagtcctgactgtgagttttccaggttcttggagtgttgaacaaagaattgaacaaaacgcacaaacaaagcaacaaaagaacgaagcaacaaaagcacagatttattgaagtgaaagtagcctccacagagtaggagcaagcttgagcaagtggctcaagagcctgactgcaatgttcttcagggttttaaattaaactaaaagaatttggttaacacccctaggtaccctttagagacctccaattggttacaccctacgcaaatgaaggattgacctgtgaccaatcagacactgaagtggaggcttggtttgagaccaatcagaggctgaagtggaggcttggcctgtgaccaatcagaagctgaagtggaggttggcctgcaaccaatcagaggctgaagtggaggcttgggccacaaccagtcagaggcatttctcgttcgtgaggtaggggaggagggttttgtagaggtcaggaactctggtcccttttcacctgggcatggagaggtggggttttccttttggtccaattccaagaagtcagccaatttgtcctcaggctccctgtctcccaaccctattctcctgcctcattatgacctccatgatgggtttgaggatgtggtgtatggagtcaaactacagggtttgattgcaatattgtcttggattgttacttgggaagagatcagtaccatatttgtttttaattggaaaagtctttttcttccaatgtctttatttgagcaagggacaattcttgagcttacatagaggtttttccttgcccagtgaactcaccagaaggaaaagtagagtgacattgtttttctgaccatggataccatactctttcattcatttatcttccatagttggtccacctggtaccccatggacaggaataaaaactaattcaggtttgttcatgctatcagatgttgacataagcaataattatattgtttagctgacatgaccaaggtttgggaaactggtgcaagggtggtgtcaggtttgtgtttaacctatgaagaaaagagtgaggttaatatgaaagaggcagcatttgaaagaaagcccacagtggaggatcagagagagaataggatagattgagacaagtaatctccagtcagcttctcaataaatgggaggttttgttgaaaaagatcccccctctactcccctccccacaccagggaggaaagaaacttaaagggggaaaatagatgaaagcaaagttttttatctgtgatcttgaggaaagctgtttgctttgtggtgtcatcttgcttctagagccttggctctgaaatccttactatgaggtcacctgtagggatggtcttccagttgtcctgagagtgatgactggctccaccttgatgtggctcacataaattcagaaagtatgatagcagtgtaggtggttagcagcacctcataaggtccttcctagcaaggtaacagtacaagctttttctaaaaatcttgatgtatacctgatctcctggttgaaagagttggcttgatggattttttccta

SEQ ID NO: 39183 - DNA, 2300 bp, Homo sapien
gtgcaagagtggcctatgaaccagccaacacatttggtgatttggcaaaagtttgtgctataaaaggtagttctagaatcacttattgtcaccggatagaaagtcctgactgtgagttttccaggttcttggagtgttgaacaaagaattgaacaaaacgcacaaacaaagcaacaaaagaacgaagcaacaaaagcacagatttattgaagtgaaagtagcctccacagagtaggagcaagcttgagcaagtggctcaagagcctgactgcaatgttcttcagggttttaaattaaactaaaagaatttggttaacacccctaggtaccctttagagacctccaattggttacaccctacgcaaatgaaggattgacctgtgaccaatcagacactgaagtggaggcttggtttgagaccaatcagaggctgaagtggaggcttggcctgtgaccaatcagaagctgaagtggaggttggcctgcaaccaatcagaggctgaagtggaggcttgggccacaaccagtcagaggcatttctcgttcgtgaggtaggggaggagggttttgtagaggtcaggaactctggtcccttttcacctgggcatggagaggtggggttttccttttggtccaattccaagaagtcagccaatttgtcctcaggctccctgtctcccaaccctattctcctgcctcattatgacctccatgatgggtttgaggatgtggtgtatggagtcaaactacagggtttgattgcaatattgtcttggattgttacttgggaagagatcagtaccatatttgtttttaattggaaaagtctttttcttccaatgtctttatttgagcaagggacaattcttgagcttacatagaggtttttccttgcccagtgaactcaccagaaggaaaagtagagtgacattgtttttctgaccatggataccatactctttcattcatttatcttccatagttggtccacctggtaccccatggacaggaataaaaactaattcaggtttgttcatgctatcagatgttgacataagcaataattatattgtttagctgacatgaccaaggtttgggaaactggtgcaagggtggtgtcaggtttgtgtttaacctatgaagaaaagagtgaggttaatatgaaagaggcagcatttgaaagaaagcccacagtggaggatcagagagagaataggatagattgagacaagtaatctccagtcagcttctcaataaatgggaggttttgttgaaaaagatcccccctctactcccctccccacaccagggaggaaagaaacttaaagggggaaaatagatgaaagcaaagttttttatctgtgatcttgaggaaagctgtttgctttgtggtgtcatcttgcttctagagccttggctctgaaatccttactatgaggtcacctgtagggatggtcttccagttgtcctgagagtgatgactggctccaccttgatgtggctcacataaattcagaaagtatgatagcagtgtaggtggttagcagcacctcataaggtccttcctagcaaggtaacagtacaagctttttctaaaaatcttgatgtatacctgatctcctggttgaaagagttggcttgatggattttttcctataagttctttttatgtctagatttttatgttccacttgacctgatgattgaggatggtatgaagtaagaagttttaatgagtaatccagagattttgtgagtgagtggtttatttctactaaaaaatgagttccttggtctgattcaatctataaagaaatgccaaaatgaggaataacctcagtcgttaatttctttaccactatcatggtgttgcatgaacctggcagatggcggttttagtgagccgagatcatgccactacactccatcctgggtgacagagtgagactctgtcacaaaaaaaaaaaaaaaggcattacaatggagggattggttaataagacctgtgtataggtggtctgctactgtgttgcgaggtgctgtgtcttattaagtcataagagaatggacacagaatgggagaatggggaacgtggaggtaaaggagggaacctaatgtaagaatactgaatttgccaattaaggcaccagctgtgactacttcatacaggaatggggacatgcctgatgccatagggtctaattgacttgagaatgtgaaaggaaaataaaaactcagaaccccaattcatcatgccaaaaggaaaaaaaaattaagctgaaatgtgagttgtgcaaga

SEQ ID NO: 39184 - DNA, 2300 bp, Homo sapien
tacatatgttgattgatgtctcatgtctccctaaaatgtataaaaccaagttgtgctttggccaccttgggcacctgtcgtcaggaactctagaggctgtcaccggcctgccttctcaaccttagcaaaacaaacctctaaattaactgagacctgtctcaggtattcaaggttcacaacacttatagttattccttggttatatgctaaaaaaggggtggattattcatgagttttccaagaaagggaagaggatttcctggaactgagggttccttctccttttagattatatagagtaatttccggacttagctatggcctttataaactgtcgtggtgctggtgggagtatttttgagaaggctaatgcattataattagcatataatgagtagtgaggatgaccagcagtcacttgcataggcatcttggttttgatgaattttggctagcttctttacatcatcctgttttatcagcaggatctttgtgacctgtatcttgtgccaacctcctatctcatcctgtgactaagaatgcttaacctcctgggagggcagctcaggaggtgtcagcctcattttacccagccctattcaagatggagtcactctggttccaatgcttctgacagcagtagagataacacagataggagggatttaaagaacgtcaccgtagctaagatacagagaacagcataggggttaagcaaggtccaatatgggactagctttgttaagcagctttgcttgaagtgataaatcttatttcttcttcaaaaattcttttgaggaattttgtttaatacctaacagaaaaatcaataattaaaaaattatggtagatatcttcaagtcaactttatattaaaaagtgttccttctttgaaaggaaacacccttttcaacacccttggctttttaaaatttcatttttatacttatcagagttttaagagtcagatagatagttctagaagactgaaaatacggtaacttgctagacttctcaactgctgcctcctaattcccactttcagagtcaatcattttaaattatttcagaagtttcttcaggtatttacctctgtttttctattataatatgcttatagtgctatttcttattttttcattttagaaaccattcattttctagtattttgtataccataaaagatgaggatttagctctctcatatgctgtgtatcatctctatactttcctactcccatcctcccaatatggttctatcatattataatataagcacttaatattcttctgtaatattgttctataataattatattatataagtatattaatattatattataaaattattctataattatattgtaagcattaatatcttcaaattttaattagcattttaattgtgtggtttctttttatgcagtttttaaacctatctttttattaaaagtaaactagcttatgttttatattaataattatattttttattttaaaatgcatttaaaaatagagtgaacttaaattttgtaataaataagattacatatgttcgtagatttggcaaaaaccatgaaagtgttatggatataatgcaagtctaagaaacagtatgtccggccagtgtttggcaaattatggaccttgggccaaatccaactggctcctgcttttgaagtaacatattattgtaacatccattcaaactattttctgtgactactttctcctacaatggcagagtgaagtagttgagacagagtctgtatggctcccagagcctaaaatatttaccatttggccctttacagaaagtttgctgatctctctcccaggctatactatgaaagcatttaaaaaaaaccttaatcatcagtataatcatgactctataaggcaaagatatatttaacaaatttgtcctacattgtcccttttctacattcaagatggtttagtgcctttctacagatctggagcattccaggacacctaaggctggaggccatgtgacaacactgggctattatgagagtttctttgtttactgtttgacaggacagattctgtcttctcaaattctgtttgatcagaaatgctgtagcataataaagggagcagatgaatgactgaagccctacagctccactaaagattagagtaaaatctgcacttcaaaagatcctggtaaagcagggaaggtccttagctttccattttaagtgggaatgagacaaggggatggggatgaaagaactgggagccatcattgccagatgcatgtttgcagagca

SEQ ID NO: 39185 - DNA, 2300 bp, Homo sapien
tatcacttgaggtgcacaagaagaattcagacttttcacctttttcttcagagaaatttcatagctcacagctttatacattcaatcagtgaagcatctattgactttcttttatgtgacaaacaggacatcacaaatgtgagtaaaacagcctttacctcgaagaactgcatccatgatcttgcaatactcacactgtcttcttcaccttcaggaattagttgtatctagaaaaagttcctaggcagtttagctaatgtataaagtcaatgtggttttagagtatttgcaatgtacagaaaggctgtcaagttttatagaaactattaaagaagcaaaactcactggtttgatgccttgccactgctactgttaagaagtctggagtctgaaaatgaaattctgtcattgcacttgttacaatattaatatctttacccatgttgacaagtgggcagaacacatttatgttatgcaagccttttctgtaatttaattgatctttcaaaatttactacattggccttgggttgccactcagaaaaattaccctaaaacttacattccactgccaaacataagaccttccaggtaacctaatgatataatagagattgacagtactattgcccccatataaaagagtatgaatgaaagaaaaatctgcccggtttcctcatatcatcttttacaggaaatatggagtctcacagacttttctttatggggaacctatctgtcattgcttgtcatcctatgatagagcaattcagtctgtaatcaaataagcctggaagtcatttttatttatgtttcaaatggtaaaatatggctgtcttagggcatagaagaatgaaaaatcacaatcttcagctggtgatctttaagaactctgttcttgcatgtatccagtcttttatcttaagtcttattttcagagtcttgattaccaggagataattcttctgccttcttcctactaagtcagctgtgtccttcttcaaattagccctatttggtgagtgtccttatttccctctgtaaatgcttctaagaaaaacaatcacacagtcaaaaaagaaactaagacatacacaggaaaataaaatgacatgatttttctgaaccatcatttgttttttcatcatatttatcactgacgtttagctaaaatctcaaagaaaaatgaaaacttcaatgtgataaataaaaataccaatatatttattattaaatttcctttttgatagtgttagcagcttacaactacttgggaaaaaaaaacgtgttttggtcaaaattcatgccatccaaacaaagaaagctaatgagatgaggaacaatattacctcatgaaaacagcagtctgtttcatttcctatgacctgtaatgcaaaagaagtaaacgtttgtcaagtttttaaagaaataaaatagaaagttatttcagataagcccaaagatttttccaaacaatagattctataccattttcaaacactgaaatatttatttgaatattttatcattttactcttattgaatgctaaatcaataagattttctcttcttatgtcactaaaaatgcatatcatcagaaaatagaacagggcaatggttcatttggctctgcataagcatctccttctatagaaaaatgaaatgttcttccttagattacaggaacaagtataaaagggaattaaaggggaagaaaaggtaatcaacaaaaaagcaacaggccgatctttatctgagctagtaaacttcgacaccttctagaatccaaccacttttcactgtatatagcatatgttcaagtctgaacaagagccagaaactggaaactcagatatgcccgcaaaaaacgtatgtgtggaaagtctgaggtctacagaggtgcatagggtgttctatcagcctgattttcagaaaagctggtgaatccatcactggcttcctcttatcatggctgcatgctaaaaatggaggtgattaatatgctaagtaggaaaaccttggctgtcagtcgcctgcattcagctgccagaaccttgaaattaggtcatggccgccagggaaaattccttctcagatggcaggctgcgtgaacatgcgaacagacccagacggtaggaaacacctcccaaagtacccaaagtgatgggaatgatatgcactattaaaattacatcaacctgtgattccaagacctttcattatggaaccgaaacacagctgtaaacttcacacctcagttttcattctgcccttgaaaaggaacagaaagaaacaaatct

SEQ ID NO: 39186 - DNA, 2300 bp, Homo sapien
atgtatatttattccgcaggatatgctaaggtctagcactttcctctgggtagatcttgatgaatgatttgatttctttaatgttatagttcgattacagtttctgaaaattttcttcttgaactatttttggtagtttatgtttttctatacaattattcctgttgtctccatttttagatttaatggtgtattagtttactattgctactgcaacaaataaccataaattttgtggcttaaaacaacacacattcattatcttacagttatggaggtcagaagtctcaaatgggctagtagatccttttttatgcccattctagcttccagagattgcccacatcacttggcttgtgtttgtttttactctgaccctcctgcctctcatttgtaagggctcttgtgattatagtgtacccacctggataatcacgatactctccccatctcaagagtcttagctgaattgcattggcaaaatcccttttgctctgtaaggtaacatactcacaggtattaggaattaggattcggacatttttttgggggggcattattctatttaccacaattggtatcatatgttccattgtgttttctcctgcctctctagatgtgttgctttaaaaaaattcaggccgggtgtgatggctcacgcctgtaatgccagcgctttgggaggccgaggcgggcggatcacgaggtcaggagctcaagaccagcctggccaacatagtgaaaccccgtctctgctaaaaatacaaaaaaaattagccgggcatggtggcgggtgcctgtagtctcagctacttgggaggctgaggcaggagaatcgcttgaacccggggaggcggaggttgcagtgagtcgagatcgcaccactgcactccagcctgggcgacacagcaagactctgtttaaaaaaaaaattcagaatgtgtttatttcttcctctatcattttctcttcattaatttgtctattttattagctatgccctgacagttttgacagggttgtgggatatagtagaaaggttggaaaggcatggacagccgtgctgggagtgctgttcgagtaattttctgcctccagtcatttcccactacttcatcaaatacaactacctcactatgctctgggtggtacgaagtaacccatggtaggatgcttcccaactcagtgttaaaggtaatggtgcatcctgagctttctcgctctgcatctcaatcctggaactggtaattctctatgactgacacctctgagctcccattctctcctatctctagggaatacctgaggaggtgaggtttcaccttcttactccccgcggcccaacccccgtccgcccctcccccgccccgcccctcgccccccagagctgagacctgggcatgcgcatcagccgcaacagattggaggggaccctgctgctcactcccctgctaccctcctctcttccctcccccgaccgctctcatattcccgttcccacccccaccccccactcccgccccgcacccgcccctagcccgggctcggggacctgtcaggctggtttcgacagctggggaattaacctgtcccgcccatccctagcctcgagccgcgcaggctccgcgcctccgcccttgttccctcccagctcctccgagtggaagccgctacaaatggcttgaatgaaacgtgtgtgggtttagtgagtggtgaaccaccaggggatcccgtctccccacaaaccagtatctctccgaggaggaggcgaaggagtgggaggaggcaacgagccgagagtcgagcttcgcgggcgcgcgcagcggctggagcgcgggggcgaggccgggccacctccccttcccggccgcgcactgcctggcccgcggcggttccaggcaccacccttcccgtccgggctgagcccgctgtggcagtgactagctcccgcggctagcggcactgtccaccgacgagcggcgccctcttctcccccttctccccacgatttccttctctgcggcggcacgccgtccagcagcctgcttcgccccgtcgtcaactttgagctggaggagaagcaactttggcagtggccgcggggttggaatcccgcttctcctcggcagcagtaggctcgcaagtcgctggggttaggtggggcaagagtttcgccggcgcatcagcgctgcttcggactgtttgcaacgtgtttccagcgagctgggagcggggttgtgactgcgagtcgtctgggggagggggacttgtttttcttttcctctagagacctcggcttg

SEQ ID NO: 39187 - DNA, 2300 bp, Homo sapien
gtgataatggaaatagagagaagagtagagattcctggaatatttaagaggtgtgattgtaggacctggaatacaagagaagaatcattgaggtctaaactgagttataaaggatgtgaatatcaaaataattttgtagaagtggattcaaaagaactgagatcgctgtgaagtaaaaattaatgtttaatggaagtaacagaatgcaagagctggaagagtagctggaagagtaagaatctgtactcaaatagtgaactttcgggttaagatttcagaggtggagaaacagcaggtgatgataaagcctagggtatggtattgagtgtctgtaactaaagtggagcggaggtgaagaccattaagatcactggagacagaaagccaaggaaacagtagatgtagtgctgcatgagatttccacttttttttgaattgtaaaatgaagattgaggcagagatgaaaactgcgaatcagatcctcaagctttcagtgaatgagaattaccaggaggtcaattcatgagagagttaagaaggaatagaaggttgtatagactaaatgacatcatactaaaagaacttgtctctgttactcagaagaaacagaaaaatttccttcagtgacattcttctgacatcttccagatggaagctcattagtagagtagttgctcttatccaagttacatctttgacatctctttacctgagttaacctctgctgattcatcactttattattcctttaaattccagttcttctgatgtcctaccagtggtttctcctatcctaacattaacagccctttggaaatgtgtgcaagtatgtgtgcctgtgtgtgtgtgtgtgtgtgtttttatgtgctgagtggaggtaaaggtcattctacctgtacagttttgtgtctcatttttgcttcatagaaatgatgatcctttgggtccaaaagagaaacaaaaatgaggcatgtgctgagaagtcagctaaatatgcaatggacatagacaagcaccaacgattgaaaagtaaagttagaggatcacaaagagcagcgttgggaaggagagatgttgagtctccaccctgttttagatagactgctgtatttgagattctggattttcaggacttcattggagccagaatgaaattataggtttgcaggagttagtcttcctattaacgagtgctatggggaaatgaaagtgggatggagagggaaaccaggattaacagacccaacagtcatgagggcctctcattccaaaaataaatgccgtaaaacaggaaattcagggtcttctacccgactgcagacagtgacatcattgagagcaaaaaattatagcttataatttctttgcccttaggggcccctgcaattttattataatggttttaggtgttaattaattgttttcagcttgggattcattgagcttcctgaatttaaataccgatgtcccttaacagttctggaaaagctttagccaccatctcttccaatgtctctgctattctttctggaactttgaatagctgcatatttcttttactctgtcatttacttttcctacttgtgctttcacattctggataatttcttttccctgcagattcaatcattctcttttcaactatacaaatctgctgtataatcctttctctgggtttcttcattttaaggtttatcttttcaatatcttgaagttctatttttagaaaactaaagccaggactaacttaacttaaaatttcccctcaaactttcttcagacaagaaaaatggtgaaaatttgaactaaagactcgcgagaaagcttgctaatggttataaatcctctaaggaggcaccaagttctggacagacatatttctttttgatccttttctaaaggagaggatttacttctcattcacctttgctccgatcgtttagtactctggggtccaagctgtattaaggttttaggctttatctccttcctccttccaccccagtcctgccacggggttgtcagaaaccactgagagcaaagctaattttgtcatttactgctcagtgtttctgctttcacttcagagttgggctctctgctccttcattttgagccaaatcagataggcatgtaaaaagattttctgttggtatagctggcactcttgtttcagtaggaggaccacgctgggtatccaacttgagagacgttaaagtgaagcaggcagaaatccgcttctgagagagggcttcctgagagtgatggtgaaagttactggaagtaatgggagcagaaag

SEQ ID NO: 39188 - DNA, 2300 bp, Homo sapien
ttaacactgcaatcccattactgggtatatacccaaaggattataaatcattctcctataaagacacatgcacacgtatgtttattgtggcactattcacattagcaaagactgggaaccaacccaaatgcccacgaatggtagactggattaagaaaatgtggcacatatacaccctggaatactatgcagccaaagaaaggataagttcatatcctttgcaaggacatggacgaagctagaaaccatcattctcagccaactaacacaagaacggaaaaccaaacaccgcatgttctcactcataagtgggagttgaacaatgagaacacatggagacagggaggggaacatcacacaatggggcctgttgtggggtagggggctgggggagagatagcgttaggagaaatacctaacgtagatgacgggttgatgggtacagcaaaccactatggcacgtgtatacctatgtaacaaacctgcacattctgcacatgtatcccaaaacttcaagcaaaatttaaagaaaagaattagtaaaagcctttcttacaacaatttaagaataagcctcaaaagtctttttgtacccttcaactcagcaattttattttcattatcttaaggaaataatttaaaatatttacaaaggtgcatttaaaagaatatatttatctttcttacagtataaaaaatgagaatacagtagaaaaattagaaaaaaacaaatactaacaatagagaattgtgtacactatttatgtaggatgaccataaaataacattgtaaatgtcaccataaaatactttgtaaccataaaatgacattatagacatacacttgttgagatagaatttcatgatggtctatttagtgattactgtagtttcatttacacactaaaaatgtatatgtacatagcaaaaatatattgggaggcctataaagcaacattttactgttttcaactctgggaaatatgagtgattttttttttccggacagtgattttcttatgtatcagaaataatttttaaattatattttttaataacagaggagctagacattactcgatataatgtctggttacatacaaaatagtataatcattttccatctcaacctgggcacaatattaatattggtaccttttttactaaccacagtgcatttattttaatttttcagtagccgtggtataccaatcgtttgcattaaatataatttaataaatttgttgatctgacatcattccatatttttctctattctgttaatattatatgttttttttttctgagcaatactctcaaattgagttttctctaaatgtatatattctatttgttttaatatctacagtattggtgcggccttatcttttgtgtgttttgttttatggttttttttttttatataaataaccaggcgtcatttatagccagagctggtgggtaatttgtatgtctcacctgtaatacggtttggagaagaaaaagcataatgtgaaccagaaaatcatcatataaaggaaattattcaaatttacaacatttacttctttgtatggaaacatcagaataatgctttacaactaatttaagaatgagactgaatctcataaaaataatttgattaatgtcaaatgtattactattataatttttagagcattcataattttactagttgtatttatgtgcaaaaatattttaatacatatgagtgtttttcaagatcattttggtttgtttttattgtataaagcacttgactcaggaatatttagtctgagcttatggcagtgtgactctttttctcctttacattcttctacattttccacattacccatatttcatatgtagttctttaacaatcagaaaataatgtcatatttaaaatagtgccaatattcagaggcataagtttaattacttttaaatactgtttccaggaaaaaactttttagcacaagcattttttcaaaaggatcataaaactactctactctcttatggcaggtatgggatggcaccaggacaccatttccatcttggagagtcttaatacaagaccttgttcttgaaggtgatttaagtcacatccatcggctacaaaatctgacaatagacattttagtctacgataaccatgttcatgtggcaagatctctgaaggtgatgtatagtaggaaaaaatgttattttatgtttttataaattatagtgatttttgctcatgtaaattttttatatatggttacatgtataggtgatacagtctagaaatt

SEQ ID NO: 39189 - DNA, 2300 bp, Homo sapien
tcgtttgattcatagacagtttgttttgggagggcctgctttgtgccaagtcctgtaaatacagagcagaattagaaatgaccactatcttcagtatgctctcagtccaattattaaatctgaatagaggattgtgagaattgacaccaggcccttgtatgtgcagagcacactgtggtaatgcagaagacttccacttgatagagttttaaattattgaaggaagatgaccaaaagcccagacattttggtgtatcttaaggtttcgttgttaaaattaagggagtaagacaatgaaaaatatatatgcagcaatgcaaaactcttttagtatttctgttttagtatttggaaaataagaaaaggaaatttaaagaatgagagaggaagggataaatggagaatggcttcttactactgttacaaacctaagtagaaagaaaatatctttgttcttattagtatataaatggaaatttcttattatgtccatgccctgtatttgtatgcacatatattagttttgtaatatgtggagtttttgcactgtcatgcctttctcaatgtagtttctcaactttgagatttagtttcatttaaattccatccttattactattggaacatctgagtttcactacataaaactttcttagtgatttagcattttcctggtccatgaagtgggacgttattgtcatctgtggctatattgtagctgtagatgttgaagatgttttagaggaagtggtagtctaaataatgtattcagcaagtgttaaacaagtttaggttaaccagttttctactttatagaggtaatttttattctaaacataataatataaataaggatttatatgacattccaaattatacgtattttggtgattgattcaaaaacttttttttttctatgtaggacaccattgcagtggctagatttattgtttttttagcttcttcatctacaagcagagatggtaaaccttgcatatttttgaaagcatttgaagacctcaaatcaactgtttatgtaagtatgcagcttttattctctaattacattgcagatttaatgagctaaagtgatgggattgaaagtatttctgtaaatctgcagataaactacttggtctgactaaattattttaattgaatattttaagtttaaaaaatagaagtttttttttcttggttttatttttcgaatgacaagatagaatagggaattcctttatatttaataaatacttattaatgaaacttacaaaaccgcacagacattctagactggatattctttgtgattatgccatcaggcactttgttctacttgatttcactttaaattaatcaactacccctctttaggtaaaacggattttttccttctcctactttattcgttgtgaagatggccttcctctcctttcctcttttaacaccctaccttccacacacacacttgaaaactgcctttttagtcaaggctattaggtagaattgggctaagccaaaagcctgcaggccaacatctgcctttttttttctagtatgcacaaaggtactataagcactggtggtggctctgcttgatattaaaattaatgaattaggctggagatgggtaaaatttgcagttagagtgatcactgaagcacttccttattgatttttttctttctgaaaacatctaaggttctatgcaggaaaaattttgaatatcagctctgattttccacttctattggactgataggagttggcattcttttacattctatcctgagaactgtcctgagaactgaatattgctgtgcttcagatttaatctgtaagaacactaatattttaataaagtacattttcatttgaccttatatctttgccttttttttttaagtttctgtagcttagacaactttgcacatttcacttttaatttgtaagccataactttatgtcatcctagtgaatttgaatattttacaagtaagtgtgtacttttactacaactaaaagcatgtaatcacattggaggttatctgtatacaaataagttctttctttttttccttcaggtttatgtcaaatctttaagagatttttctacagaatcaatgtctttggtaagatgatattcagtttaatttagagtattacacctatacctgtatatgccacacacatagatacatgtgtatgtatattcagtccactttgtagtctgatattgatatattatcaatacactggaaaaacataatctttacttttttatagctgataatgttata

SEQ ID NO: 39190 - DNA, 2300 bp, Homo sapien
caaagtgaaaaatgctaaaacgctgtataggagagtttagaggaaggtagaattacttgtttctgagagagaatctgtgatagattctaccaggaagaagaaggctagactttgaaatatagattaggtcagatatgtacagatgggaaacatgttatttatttgtagcagtggctcaaaataaataaagaatatatgtggaaaagcactatacttatgagaggatccaatttgtctaatattgaatgggaagtatgtggaaataaaacaggcagagttgcttgggatgagatcactgaagggccttcaatgcagtttttatatgtatattcaaatataaatccatgtttatgaatataataaatgcatttcaattaaaaaaaactgtgattgttatttccatgctgttgaatatatgccagaggaagggttgtaactttttactgaattgtgtgtagctactgttaaattcagaaaaatttttcttatgaatgctgatgtccagcttttagtcatttattcttttcaaaatttttcttcatgataaaagaaatgcatacatactcagtcttttaaaaaagtttagaatctacaggaaaatagaaaaaaaatggtcatctgtactctaacatttgcatttggtgtataatatttacttttgaaaacatttttaagtggaacagaggataacaagaggtaggtttttttttctacttggataatttagaactgataaactgttggcttccctacttctgtttatcttccggtgttagtttgataaacaactttaaatctttgactaaaatctcaagttttcatttaatcagaatgtattggtttgaggtcacttgaaaacagagtgtatacttcagtttgtaaaactgaaaaaaggtaactcagttgttatttttattccagaaacatgttcattttatttttttaaactgcataaaaggtttcggagaaatataaaatcttcagtaagaagaaaaattttctcccattgaactatgaagagttgtggtaatttggcattatcagcatacactcagttatgtttgcaatctcatgtgaagaaaaaaacgcaggaattgcagagctacaatacctggttagggcaagagatttttagaaaaggcaaaataaggtctttcgtttgattcatagacagtttgttttgggagggcctgctttgtgccaagtcctgtaaatacagagcagaattagaaatgaccactatcttcagtatgctctcagtccaattattaaatctgaatagaggattgtgagaattgacaccaggcccttgtatgtgcagagcacactgtggtaatgcagaagacttccacttgatagagttttaaattattgaaggaagatgaccaaaagcccagacattttggtgtatcttaaggtttcgttgttaaaattaagggagtaagacaatgaaaaatatatatgcagcaatgcaaaactcttttagtatttctgttttagtatttggaaaataagaaaaggaaatttaaagaatgagagaggaagggataaatggagaatggcttcttactactgttacaaacctaagtagaaagaaaatatctttgttcttattagtatataaatggaaatttcttattatgtccatgccctgtatttgtatgcacatatattagttttgtaatatgtggagtttttgcactgtcatgcctttctcaatgtagtttctcaactttgagatttagtttcatttaaattccatccttattactattggaacatctgagtttcactacataaaactttcttagtgatttagcattttcctggtccatgaagtgggacgttattgtcatctgtggctatattgtagctgtagatgttgaagatgttttagaggaagtggtagtctaaataatgtattcagcaagtgttaaacaagtttaggttaaccagttttctactttatagaggtaatttttattctaaacataataatataaataaggatttatatgacattccaaattatacgtattttggtgattgattcaaaaacttttttttttctatgtaggacaccattgcagtggctagatttattgtttttttagcttcttcatctacaagcagagatggtaaaccttgcatatttttgaaagcatttgaagacctcaaatcaactgtttatgtaagtatgcagcttttattctctaattacattgcagatttaatgagctaaagtgatgggattgaaagtatttctgtaaatctgcagataaactacttggtctgactaa

SEQ ID NO: 39191 - DNA, 2300 bp, Homo sapien
ccccctattttcttctccttgttggctaggaattagaaacagaagtttcctgaatttctctttgccactctagtctaattgttctctaagacctactgattctgcttctttatcctgtcaggtctaaaggaaatcatctatattcaaattcctgctctacttcatatcatcaatatgatctcaggcaaattgcttaacctttctgaaacacagtgtctttaataacagtacctatgtcataggtctttgtgatgattaaataatatacgtaaaaactacctaacgcatggaaaaaaatgcaatgaatgttaactttagttattattattactatcttttttcaatatccttcccatcatcccctctgccactggcccagatcatcatcaactctcacctaaattactgtaattgcctcttaactaaacatctttcctctaatcttgcattcgccaatatattctctacctaggagcaaagttttttgaactcaaagtaaatcatgtctttctcctgctaaaacctactaaagacttcccatagcttttagagtaatatccaaattcctcaacatgcacataaggactgctttttacctcaaaggaaggtacagcacagtctgttatcccgtaagttccagctcaactttcgtgatctgtcagaaccaaaagctctctcatgttcacacatcacaatgctaatatcacacctattaattttaattggagatcaggtgattgatctgtcagaccccacagaaatgtgattatctttagttccgggactatatttattcatctttgtacctcagaaacttactccaatgtttcacacacgaatttgataattgttcgctaaataagtactgaataagaataacttattgaaatattcaatctcaaatgttatgacaaagataaaaaccatacctaaaccagttctcataaataaactcaacacttaaaaactgcattccttttagtaggaaaaagcattctgagttatagaaattcttacctgaatatatttcttgctataattgtaacctggctgtagggatccgaaatctactttatgtaatttactcagcggctgaacttcaggcaccccattgacttcctttattaattcaagtggcatatcagttctgcttcacactgatgtccaaagcaaattcaactagggaatctgacaacttgctgctgaaaatacaaaaccagtgttttacccaaaatgaagtcaataatttgctttaagtctctttgacttagttatgcttttccttattatagttaacacggttcggggttggggggtgacaggaggatggattattttacaattttattgcaaagatcaatacaaaacattcttccaaggaactgaaacttaaccattttctacttagctgcgtaaagtacctccaaaaagccagttttaagatctgtaacgtcactaacaaacgcttttaacattgtgctttaaaatgtaaaatttattggggaagagggaggctgaaaaatcgtgtttttttttaacccccacgggagctgtaatattgtatagacaaactgtgcaccaaaagcatcgtactccaacatgtttctgtggccccctcccttcacccgctaaataaatgaagaaacaaaaattactgaactgagattaacttctgcatcgtaggctcaaccttatttcacagacctcttgacggggacactcactagtgtcgatatctaattttaatgtttgcgcaccaaccttcccccaagccacctgagctctgtgagggcggggacttggacttaactcctgtctgcttctcccaaaacaccaagaaagatgctgaacacagcaggctcgagataaacactcgtaagaaagcgtttctctgcgataattacatcaaattttgatctaaactaattcaatcccgggcccgttacgtctggcacccactcaaatgaacacaccaaaccttacaaatttcactcacccgtactctagaaagaaccctaggaagagtttaggcgggcgcgcaggtgacgtcacacgcacgctgacggttcagctccacgcatgcgtgcaggatccctgggcatagtcgcttgttctccgcccgcggtggaccagctgcgtaacggttcacacactgatggcgcctggaggtttggcgaaatactgacaggatgcgacgtcaacgggagcgcagggccaaggtacaggccccgcccagtccggtcacatcccccggaattctcgcagctccccttagctccgcccccagtgactttccagct

SEQ ID NO: 39192 - DNA, 2300 bp, Homo sapien
tgtcccacaggaactgagaacaaccactttaacaaaataaaaggacttacgtatacctctattagacatcttcatcacattctacagaacatggatacttacaggctaaacagattatgagaaattttaaaagattcagttggtagaaggtaagaggaaaactaggaccatgttgtagcacaaagaatgttttcaaaaatatgagactaaaaatgtccttttgggttagcaataaagagttcttcagtggtttttctaagggcagtttaagtgtaatggggtggtggggggcaggggtgggatggaggggtggaagtcagaagtaagataaacagttttcctcagcatttgttcattcaacaaatatttagtacccacagaggagtgtgagactgactgggcaacatagtgagaactcgtctccacaaaatttttttaaaaaattagccgggtgtggtggcctgtgcctgtagtcccagctacttagaaggctgaggccagaggatagcttgagcccaggagttccaggctgcagcgagctatgatctcgccactgcacttcagcctgggcgacagagcaagagcctgggagaatgtgtttaaatggtgacgggaaagaatgaataaaagaaggaaagcttaaaatacattaagagaaaatatattgatgatgatggaagggagatgaaattggtcagggtccaaagcccatgtggagggcttcacataaaaaggaggaatagtatttctcagccggatgcagccagagatggaaggaggatagcatctaaaccttccctatagttttcctcaaatggacagctcctgagttcatgcacttgtcaccccggcttctgcgtgggatataactacagggatggggaggggaaacaggagatgggctaatactgaatgcttcctgttgattaaaaaggcacttcaaacatagctggctgggcacagtggctcatgtctgtaatcccagcactttgggaggccaaggtgggcggatcacaaggtcaggagttcgagaccagcctggccaaaatgggaaaccccgtctctactaaacaaatacaaaaattagccaggcatggtggcctgcgcctgtaatcccagctactagggaggctgaggcagaagaattgcttgaacccgggaggtgggggttgcagttagccgagattgcgccattgcactccagcctggtgacagagcgagattccgtctcaaaaaaaaaaaaaaagttagctatatcctcctgcaaatatgtatataaagaagatattttagttcaaattagccttggaaatattcatgtaattctttattacatttagtttcacactaggatgatttcacttaaatgattgaaggcatatatctggaattagcagagaattcatgtttaacaatttatcattataaatgataaattataatatttatcaattataagttataataaatattaaataaactataataaacctataaaataaattataataaatattaattataccacaaaatcatggccctataaaacaatgacaaggttaatcaaatctgtctgtaaatagcaagactcaatggtggcattatgccaatgcccgaaattactataaaaactcccaaataacattgttatccttgtaaatgcttccttgtaaagactgcagtaggtgcctatttcttggaggaagagaactggacattaaaagaaaggctctgcctacaggagcttcgaatctaccaaagggaagctcaaatcccgcccagcggacccgcccgcttcccctaagcttgcctcccgccacgaaagctggaaagtcactgggggcggagctaaggggagctgcgagaattccgggggatgtgaccggactgggcggggcctgtaccttggccctgcgctcccgttgacgtcgcatcctgtcagtatttcgccaaacctccaggcgccatcagtgtgtgaaccgttacgcagctggtccaccgcgggcggagaacaagcgactatgcccagggatcctgcacgcatgcgtggagctgaaccgtcagcgtgcgtgtgacgtcacctgcgcgcccgcctaaactcttcctagggttctttctagagtacgggtgagtgaaatttgtaaggtttggtgtgttcatttgagtgggtgccagacgtaacgggcccgggattgaattagtttagatcaaaatttgatgtaattatcgcagagaaacgctttcttacgagtgtttatctcgagcctgctgtgttcagcatctttcttggtgttttggga

SEQ ID NO: 39193 - DNA, 2300 bp, Homo sapien
aaattataacagtcaaattaatgtaatgctgatcccaacataagaatatcccacagcatagtgtttgaataaaataataattaaaaatttatctttgttaatttctgggtagtgaagctgcaggttgtttttttcccttgcttctttatacttttctgtaatctaagaagttttacaataaacaagcattatctttacaataaaacatgaatatatttttattcaattgataaagaattaatagagaattaaagatattaagtgtatataagtttacataaagaaaattatagatatattcaaataagtaaaaatataatagatatgactatagtatttaaaaattttatcagaaaacaaaaggtaaatcacaagttggaaaacagtgttaatattaactcccagagagtactaacacataatttaaaatcagcaataccaatgaaaacaggtagataatatgtacaggaatttcaaagaaagaagaaatagaaatgggcaataaagatataaaagatgtacttagtttactgaattaaaaaaattgcaaagtagagcaacactgaagcactatatttttgtttatcatacccattagattaaaagaaatagtgatatctaataaaaaaggaaatggatactctacttcatggcctgtgtgagtttaattaatgtaaactctgggttagcatttaaaaatgaatctcaaaacctaaaaatgtgcttatcctttgatcaagtaaattcacttttaatattatatttaaaaaattggatcagtaagcaaaaatatatgtacaaacatgtatatgacagttatatttaacactcttggaatttagtatcaacctaatgtataactatacaggattatctcataatgttatacttcattcaaagaatattatgcagcaagttaaaatgatgctataaacagagaggttcattctagtttccctacaagtcaatcccattcatgccaggcacattaattgtctctggctgaggagaaaagcactgaactaggtttaatgtaaaaatgaggtaaatgatgaattgaggactagtgaaagccaaatggtatcacactgacctatcagtgaaagtttagtaatagttcaagtaaagaaaaattctcagggcatggtggagggtagttgatcacaacaacgtaagcaaaagaaactcaagagaacatgagatgaatagttagctgtgaccagccatcacatgtatgttcattttgatggtattacactattttttgtgcttaatttataagccagtttaaattcatttttgtttgagtgctgtaagcaattttatattggacttatatgcattcatatatttaaaatacaataataaaataattttcttcaactattggtgaatcctttatattttattttatcttactggggccggtatattactaaagtttgaaaggcattaaattctcttataaatagcactattttatcctaattttggaactggatgtctcatcttcccacagtctgaagcatgaattccaagttctctgtaaattccaaaactaaaatgaagagcttgagtagggcccaaaacaaaggtggtgaaaagattgcatttaggctaatctgagggggttatgtctgtgcttgagaaacattttgacaatcactgtattttacaagaatggctttctaaatattttgagtagattttccattaatttacaaatatgtatgtgtgtatgtatataattatataacctgggaaaattactaggataaatccatacatctatactactttaaagttggaagttggaaataccactgaattatttttgtggataagtcaaggtaaagagccaacgtgaattatgtcagggcctcaggatattctagaagtaagcaaggccattatgtacagttgtgcagagtgtatcctacacaatgctagtgatcatccttcatctcgcttatgctagaagtatgtctcttgtggttaaaaaaatgcatagacaccttgattagacatatcatttttatcacaggatagactgttttcattttaaatttttcataaataatgtaatgttttttttacagtgttatactggaggactttctctttggaattgctgtgcaaataaggtgaacttttagctccaaaaatcaaacccattcagattagttttaatttatagtcactttatacctatactggtgtgagtagtacaacagaggtgaatttcaattgtaatatgagctgataacaaagtcagggcatcagggtgacaaattctactg

SEQ ID NO: 39194 - DNA, 2300 bp, Homo sapien
tgtaagtgtacatatgtgtgattccccacatattccagtgtactgcaggacaatgatgacaaatattgtccttctttatgcaaaatccacaatagccataaggcaaatgactacatttgtttcccttttctattgtaacaaattaccacaaatctagtggtataatggcttaaagcaatgcaaaaaaatattttgcagtttggaagttcaaaatgggtcttatgaggccaaaatcaaggtgtcagcagggttgcattcatgctggaagctctaggggagaaatagcttctctgccttttccagtttctagaggctacctttattcctggactcatgggccccttccatcttcaataaaaggcagcaattaaatcactcaaacctctgcttctgttgtcgtatatcttttctttgactctgcctctcctggatctctttttcactcatcagaacctttatgattacattaggttcacccagataatccgagataatctccccatttcaagacccttaatttaatcacatctgctaaatgctttcagcaatgtaaggtaacatattaatggtttttagggattaggacatggacatcttgggaaggccatttttctacctaccatgacaatacttttgtttacatttaaaaaaaacacaattcaaacctttctatgagttagcaatcataattctcaatttcctgaatatcaacagtgatgatttagattttgagtattgacagaagatttacttgccaaatgactgaataatataaatagcacctgctactgagtttaaaaaatagaggacattattttagagtttttattgcatatggctaacatagacacagaatgattttgtctcccagctaccacatccatcaactcaattttatcactttgttttcctaaacaagaaaatgttttataaatcatgcacatctgtcatctgtaagaggcatcatgtgttaagaacaagtgtttagagtttaaagtgatgtattttctctttttaataacttgtctctgcctggtattttctcaccttgcagcaaaattttagaggttgcaatgttctccaatgagctattctattataaattcaaagaggtttaccacatcaaaaaaaaaaagcatccgttgacttgataattcactgactccattcttcacatcagataaatgctatttgaccatgtgagatctaataaaagccaatgccaattttgttaaattctctcactgctgcatctgtgcatggatcattaaacacctttagcacatcatgtatgctagacattagagccagacctggttcatctaaatcaatttgtaatttatgtagttcagttatggattttcactgctaatgcttcaaaatgtgacccaagtattcttttaagttaacaaactaatcaagtacaattcaaactgagaacaattgcttttattattatttttcgtcaacctcattacagctttgagtttcactttgcttgtattctggattcaaataaattcacataaatcacagattcagataatttggggctctctcagcaagcatagtcaagactatcagcaaacttgtgccacaacaaaataatggaccttctataatgtaatgccctgagtaatctgttctgaattacatcgatatagaagaaacacaatgagattattttaatatttttatatttaaaattatttctgtgaagctttagatggatctgacttattctgaattccattctaggatgagttttaaaacaagatttcattgtatttggatatcaaaatgggaccctttataagaacttagaggaaaggaattcatttggcaactattctttcagagattgttgtacaagattagtctaaagtgtggggaaaagcaagagagatcagattgttactgtgtctgtgtagaaagaagtagacataggagactccattttgttatgtactaagaaaaattcttctgccttgagattctgttaatctataaccttacccccaaccccgtgctctctgaaacgtgtgctgtgtcaactcagagttaaatggattaagggcggtgcaagatgtgctttgttaaacagatgcttgaaggcagcatgctccttaagagtcatcaccactccctaatctcaagtacccagggacacaaaaactgcggaaggccgcagggacctctgcctaggaaagccaggtattgtccaaggtttctccccatgtgatagtctgaaatatggcctcgtgggaagggaaagacctgaccgtcccccagcccgacac

SEQ ID NO: 39195 - DNA, 2300 bp, Homo sapien
gtgtatgtaaagctttgcttggtcttactgagctcatgttggggagatagataaaaatatggtgcaatatagtgtactcctggctctccttgaccccatgatttccccatttcaataggcttcctctcctttgcttttgttaaactccattgtgcatcaaaacccaaaggctcacatcctgctctgaatcaactatgggaactcaactgagaagaaaaggtcagagactgaatttcctatttgacaccaacttgtacaaacaggaatcttaataactgtcgactatgaggacaggattattctgagccagtcctgatttggggaaggaatactactacttcatgtttttggatgcaaacttggggtagtcatccatcttcttttttgtttcacactctggctttacatttcctttcttcttttccctctccttagcctgttttcatgaaggtgggaggagcatgaaagctcagggcagtgtcgggagagttgggccagtgctggacattgacttctagccctaactcctcatttatatctaatttctgattatatactgatgttttgccacaagcaactagtagttttaatactagagagcagtcaagtatataaaaagacaaagttaatggctataataattatgcttttttttgacctgagttttgcagcaaaaacaaatctaccccaaggccaggtggtaggaagctatcatcctgatggccgctgttgctaaccaccatcactggaaaagtgcttggtcaagcactaccccctaagggaagaatgtggcttcaagctgatctttcactggaaaaaaccaatgatgttattgagtagcacaaagaacccaccccgccaacctacttcaccaattaagttccatgatcaatggacaaggttgtttgcagagaacaaaaaccttttttggcaggggggaaaaaaacaaaaaaaaaccctttttcatggtgaaaatatacgtgattcaggtcttaaattgtcttctgtctgcaaatctgtactcagatgtatgcaagtttcttgcagaaagattgaaatttcctagaatttggaggagcttcctctaagctgtgctttaggtggctttttgctagccttgtcaggggtgtcttggcttccttgggatatttagcaaaccagtaactgtggtgaacagatgaaaaacttatggcattctgaatagacaaggcaagtttcaagcttattgcaatgttttgatgtgcaagcagtgggaaaccttgaggcagctgaagttgttcttccttgggccacaaaaagtatttctggtatctaaaagtctctgatccccttggagcctcagagaccctttatttcatcactcagtcatgtacaggaaggctcagtgaaggcaacatggagagacacagttggtttgggggagatgtaagcacttttttccctgtctggaatatctatcttacagataaagataagaaagaaggggtaaatgattaaataatctatgatgttgacctttgattagaaatgtaatttttattctttaatgacacattgaagtccgtgggctgtcaaggtgtttgccaaggtagttatgaagttttcatggccatttttggcatttcaaaaagcaaagtggcagttgtaagcttccctacgagaagactgcacaggctacaactgaagcggcacttcggtgatttgaactggaattccatcacttcagcttggtaaaaacagatgccttgtgctgatcagaagttttgcagctgaacagatctttgattaaaagagaatattggaaatgggtggtgttttaacttaaatagttttatagaaaaatatttcaaagttaggatacatggaagaaaataacaaaaggggttcttgattaatggatggatgggctcattttactttcaatgaatatttattgaacacctactatctcatgggagctcatgttacatctgtgaacaatgcagaaaataaccctgtggaatctacatgttagtaggggaaacagaatacacaaattaatgcaggtggtgaaagaggaaggaaataagtagagtgatgaggtcataatggaaggtgaggagacaacactagatggggtggtcagggaaggtctgttgagctgaggctgaaggatgagaaaggccaggaaggacttacttgggaaaatgtttgtggtgatatgtatgagtgctgcaggtgaaacaaaaaggaagccagtgtagttggatcaggtgagtgagagggataggtggtcagttgccagttcaaaggatcctgtg

SEQ ID NO: 39196 - DNA, 2300 bp, Homo sapien
tgcaactcactggatgttgaagggtataataattgtaccgagggatatgaatgtgtgtaaacccaaagcccagtgctgtctctacggtgatacacttatccacattcctcccactgtcatgacacagtcctcttacttcaactggctcacttctccgaatgcctggaacttcactcaatttaccttcccttatacaccttagatgtcaccttagatagtgcaccttaaatgtgcactattatggtagccactagccatatgtggcttctgagcacttgacatgtggctagcctaaactactgagatgtgctgtaagtacaaaattatatactagattttgaagacttagtatgacatatgtaaaatacctcaataattttcataccagcctgctgaaatattttgcatatatcaggttaaataaaaacatacatattatacactagaaaattttaaattatgtgtgtagctcacattattggataatattgagttggctaattttaggctctctttccctgactccattctactgagctctcttcaattacacataaattgggtcttctaattttatcctttatctcttaatctccttttctatccttttgtttttcctgtgctgcattctgggtaatatctcatatttatcttccaaatcactgattctttcttcactaggtctaatctgttgttaatccatccatccattacattaggttttatgtttactttgttttgatgttttgaatatggttttgtttactgaacttccagacaagatttcatctggtttagaaaaatattggaaaccattaggcaatttctactaatgctgaatacatgcatactctgtcaccagcaattctactcctaggaataaacccaacaggaaaaaacgatagcccaaaactgaaaattacccaaatgcccaacagctgtagaatgtggcatattcacacaatagaatactaaattaaataagaaaagtataactatatggaaaaatatgaagttcttttatcctttttcatatgttgagagacaaaggtcatatacaaaagattatatagtatataaatccatgaataaaatctttttaataggcaaaattaaaatggtataagaattcaggatacttgcataatagtcacacccctatttttggatactggttgaccttggagtaatactagttgaccttggagtaaaagattacatgaagggaacagaaagggggtttatgagatgctggtaatgttctgttccttgatctgaatactggttacatagtacattaatttatggaaattcatcatggtatatccttatgatttttaaactttgtatataatttaacagtataacaaactcaaactctaatcagtgattttcagaaaaatatttggatgttgtattagtctgttttcacactgctataaagaacgacctgagagagggtaatttataaagaaaagaggtttaattgactcacagttccaagtggctggggaggcctgaggaaacttacaatcatggcagaaggcgaaagagaagcaagtcacgtcttacatggcggcaggagaaggagcgtgttgaaggaagtgccgcacttttaaacatcagatctcatgagatctcactatcacagaacagcatggggaaaatctgcccccatgatccaattacctcctaccaggtccctcccctgacaggtggggaattacaattcgagatgagatttgggcagggacacagagtcaaaccatatcagatgttaaaaccttttttttcctttttgagttgtcagttttgaatataattatttcaaaaatttcattttgtttccttttcaaattctgcctagacatttttaatagcattttgctcatgttttcaaatccatcttttatttctagaaacattttaggacatttcatttatattctgactgataattcttaaattcaagttcttgggaagtctaattctactgtttgttgtttccactgatggcttgtttactctgtgtaactggaaacttttcattgtgaagtcatatgtggttgattttaatctgtgagaattctaaagagccccagctgtgggaacattcctacaaagctgattctcttccgattctgctggaatcctgagtctctctcaaactggaattatcttaacaattcttttgcttgaggtttcctggacggcatatgtggataatgtgagtttaagccctaaaccttcatgagttcagaattctcagcagagacatttccccacccccagccaaggcc

SEQ ID NO: 39197 - DNA, 2300 bp, Homo sapien
tcaccttatttattcatttagtctgtactctgtcagaacaagggtcggctcagccacgtggaattggtctcaaattctcaactagtgatcagagttaatgaggttttactatcatgtgactggttttccttgtgaaactgttaaacacaatcttacttctcttaatgggtggccggtgtaatttatggcctatcacttaaatggtttcatccagaaaatcaggttgactttctgagtgtttccttttgtggaatgcctgaggtcaggctgttattgaatcacagattttctgagggaaaagcagctgctaggagaatccagtgtgagggactaaacagtgaagtggtgagaaaaatcagaaagtattttgggggcagcacagaggaaatctaaggcttaatgtgtgcccggaggcagggaatacttgtcttaggctgcacagaactatctcagccgagtgggccattggctggctaggctgccaggtgtttgctcagaaatatggggcagtgggctgctatgagccctcttttctaatctgcaagtgcaaaaaatgcagctttctttgaaggtgtttgggcatattttcagttatcccccagggaagcaccatctttcctttcggggcaagaaggataaaaagaaaattttatgaactggaacttgaacaagtgaatggaaaatacaagcagatgttggttggctagggtacaggagaactgtccaaatttcaggtttcaaacccatatataaataggttagaaatgagcattagattaaccatcctgccaaagtaaattggtgctgtttattctcttaattagctgtgcattacaaatctcagattccctgtgttaagtcagttctcattttcagtcacatctcttcaaaagtcgtttgaaaaaaatcttacggaattaagggtgaaggccgtaggaaaaaggctttgtctgtagatttgcgtgtagcctttttcacttcaagttatttctagtcttgatgaacttttccccactgagtcaggcaaaattaggcagctcttcaattgattgacaactctgatttgctcctagtgattctgggatcaaggcatgtttccctcagaactgttaatatacccattgctcccacaccgacaaattaattggaaaccctgacaatggtaataggaatatcttcacatgtcaccttacctgtgtgtttcattttcaagtctttgttttcttaccagagaataagacaatttatatgaaatagctgactttctatgttaattttttttcacaagctacaaaacttacacattttttagctctttgggtggatttctttctctctttcactttgtaattgaataatcactttttcctactgggtaatttgaggcactaaaaaaaaagtcattaacagatgactggcttgttgaatacatcacagaaaataatatttattatgattttgttgacaaaattagaatgctaaattcagatagctgcaaaaaaaaaaaacagatttgaaaagaaatggtgccatcagttgcaggatttttaccttcatggaaataaggtttattgaaataagatgataaataaaagtgctttctggtttgggagaatcaacctacttcctgatactgttctgtttctcttgctccaaaaatatgatcaatctccctgtttagatgcagtgcagccaggtgttcagaatcacagggggacaaaaagaattagtttcttactgaataggggattttttttttaagaggctggcgtaaacagggctgcaaaatgtgaaacatgtagacccactgaactgaacccccttttttcccctcttcccaggaataattctgctacaaggctgatttcaaggacatgaattgttgacctcatcccaacatcagaacctcagatgttctaatttttgcaccattccaggcaagttgatcttataaggaaataaaattgaaccttaggggtctgatggaaattcactgtgacattcaaatcaagaaaacttgctaatgcccacagagccttttccccatgggccctgatggtagcctccagaaggtgcagcctcaggtggtgccctttcttctgtggcaagaataaactttgggtcttggattgcaataccacctgtggagaaaatggtatgcgagggaaagcgatcagcctcttgcccttgtttcttcctcttgaccgccaagttctactggatcctcacaatgatgcaaagaactcacagccaggagtatgcccattccatacgggtggatggggacattattttggggg

SEQ ID NO: 39198 - DNA, 2300 bp, Homo sapien
atcatcccatttatgtttacatatttgcttacaaatctttcattttcataagatgctcaaatagactagattagattagactattatggattaagttaatgggaatgctgttatgttttctaaaaaatgccatttttatttatgtagtaacatttttcatgctgttttatcaattgagttacgagaatttgagttgcctttgctagtctaaaacattcagactaaaaatatgaaatatcatttttattatttaggacacctaagtgcttatatattttatattaagggcatttgaagcaaaagtagcccttcagattatatatgttccttaacatttttgtgtatcatgatgagaatttaaaggaaattttagtttaatagtagtctttatctttgtagaatactgaaaagtagataatgctcttataaaaataaactggtaatatgatatattctgagatagaggttcataatatatcttaaaatattagagggctacagcaggctaattacttcagattaaaatgttgttttttccttaacagaccttcctgatgtaaatgataaacaaagccaagccataaatgatctcctagaagccatatatccaagtgtggacaaacgagaatatattattaagctagaacccatagaaactaatcaaaatgcagtatttcaatatatttcgaggactgataatcctattgaagtcacagagtcaagcagtactcctgaacaaaccgaagttcagatacaggaaactagcactgaacagtcaaaaacagtaccggttacagatacagaggtggaaactgtagagccccctcctgttgagattgttacagatgaagttgcacctacatctgatgaacaacctcaggagtcgcaggctgacttggaaacttctgacaattctgattttggtcaccagttgatatgttgtctttgtagaaaagaattcaattctagacgaggtgttcgccgtcacattcgaaaagtacacaagaaaaagatggaagaactaaaaaagtacattgaaacacgaaagaatccaaaccaatcctctaaaggacgcagtaagaatgttctagttccattaagtaggagttgtccagtatgttgtaaatcatttgctacaaaagcgaatgtaaggaggcattttgatgaagttcatagaggactaaggagggattcaattactcctgatatagcaacaaagcctgggcaacctttgttcctggattctatttctcctaaaaaatcttttaagactcgaaaacaaaagtcttcttcaaaggctgaatacaatttaactgcatgcaaatgcctcctttgcaagaggaaatatagttcacaaataatgcttaaaagacatatgcaaattgtccacaagataactctttctggaacaaactctaaaagagaaaaaggccctaataatactgccaacagttcagaaataaaagttaaagttgaaccagcagattctgtagaatcttcacccccttccattacccattctccacagaatgaattaaagggaacaaatcattcaaatgaaaaaaagaacacaccggcagcacagaaaaataaagttaaacaagactctgaaagccctaaatcaactagtccgtcggctgcaggtggccagcaaaaaaccagaaaaccaaaactttcagctggctttgactttaagcaactttactgtaaactttgtaaacgtcagtttacttccaaacagaacttgactaaacacatcgagttgcacacagatggaaataacatttatgttaaattctacaagtgtcctctttgcacttatgaaactcgtcggaaacgtgatgtgatacgacatataactgtggttcataaaaagtcatctcgttatcttgggaaaataacagccagtttagagatcagagctataaaaaagcctattgattttgttctaaataaagtggcaaaaagaggcccttcgagggatgaagcaaaacatagtgattcaaaacatgatggcacttctaactctcctagtaaaaagtatgaagtagctgacgtcggtattgaagtaaaagtcacaaaaaacttttctcttcacagatgcaataaatgtggaaaggcatttgccaaaaagacttaccttgaacatcataagaaaactcataaggcaaatgcttccaattcacctgaaggaaacaaaaccaaaggccgaagtacaagatctaaggctcttgtctggtgaggaacagttaacagagttttgcttttttccccccatcgaactaaaaaaaaaatcattt

SEQ ID NO: 39199 - DNA, 2300 bp, Homo sapien
aagtatacatttgcattaaaattgtatctagttactgataatttgataatgatgtctagttacagataatttttagatggagatggagaataaaattaaatacttgactcaatgttacattcagtttcttaggtactttcatatcaatgctttccacttgggttttcctaaagatgacatataagaggttagatttaagaggatatttatttatattaaaatattggatattgttttagaatgtttatatgggccataaatggattttctagtttatattactttttacttctttattctttaacaacttgcaaccagatgtgattgatcacttatttagattccccttaagtaaatgagaaggttgggaataaagagcaaagaatgaggtaaatttgttcatttcttgggaatggtggagagcattaaaaagtctttattaatctttctagtattttctaggtcttgatttgaagatcagttttgttttcagaaaaatttagataagtcattttctcagaaattacattatgttacaggctaacttgagatccagtataactttatgtgataaaggcagatagcagactaatataaagtctttctggaacagaatgtttgttttgaatgcagcatattgtctctgtgtgatgaggctggcagtgtatctaatggtattttctttctttaaagaattaatgtaaatttaaaaaaattcaatattgggctaccttattctttcttgtttatggatttaactctttgttgacttacaaaatatagaacttactttgtcagtctgaaagcgtagatgcattgtggattctgtgcatttttcaacttaacctttttgggattggtatgaaatgcaatctccaaataagtatggctttaattataatgaagctggcttaaagttatattatacagcattgattaaatacaaattttatatttacctggaaatatttcctactactattttgatcttactattctctcattgagatataaattaaaaagcagtctagagattcatttcaaatctaaacttttaattaaaatactagtagaaaattagtttgtcttttggtagttatttattttttagttgtagagttaacttatagagtgaaatggtaaatggatttgctagattactgtgtacttgtcttcgcaatactcattctagaaatacttttgtgaaagtatttttcttatagacactactttattcatcttaaaagacagatgactagactagaagagctataatgaatcacttcctgattggtatagataccagatttggtactaaatttgtagctagattttagagtagtaatacatggaaacctaaccagtgttagacaactctgttacaataggatagttgattgcctgtaaagggtgtaattattgtacaaggaaataaaactacctatggtttttaaataaatctgtatagtttttaattatttgttttagtaaaattgtgtcatgttaagaagacatgtaataggactgagtttagcaaatacttctacacatcatcccatttatgtttacatatttgcttacaaatctttcattttcataagatgctcaaatagactagattagattagactattatggattaagttaatgggaatgctgttatgttttctaaaaaatgccatttttatttatgtagtaacatttttcatgctgttttatcaattgagttacgagaatttgagttgcctttgctagtctaaaacattcagactaaaaatatgaaatatcatttttattatttaggacacctaagtgcttatatattttatattaagggcatttgaagcaaaagtagcccttcagattatatatgttccttaacatttttgtgtatcatgatgagaatttaaaggaaattttagtttaatagtagtctttatctttgtagaatactgaaaagtagataatgctcttataaaaataaactggtaatatgatatattctgagatagaggttcataatatatcttaaaatattagagggctacagcaggctaattacttcagattaaaatgttgttttttccttaacagaccttcctgatgtaaatgataaacaaagccaagccataaatgatctcctagaagccatatatccaagtgtggacaaacgagaatatattattaagctagaacccatagaaactaatcaaaatgcagtatttcaatatatttcgaggactgataatcctattgaagtcacagagtcaagcagtactcctgaacaaaccgaagttcag

SEQ ID NO: 39200 - DNA, 2300 bp, Homo sapien
agcaattttgaggaccctctggtactgaccactttgcattcgaatataaataacactacatttgctcacaaaacatacttttgtgtgtttttttttttttttttttttttttttttttactcacacctggtcagcaaacaactgatatatctgaagcaaagctttttcagggttagaacaatttagacttgcatattcatttttaagcctatgataaatatgtttattacataaaagtaggaaaagatcctctgaaaatgcagaaaatattttacctcacattttaccacgcagaggtctccagtgtagatatttgcatgtttctttcagtcttttttcactgcattttttggagtgacattgagctttattagtgtataccattttcatattattacagccttcttactgcgtttcaaaatttttctgcttattaaagttttatatacttaatttacaaattttgcaaagtatacaaaagaataaaataaaaatcattcataattgcactgttacagcccactgttaaaatatcacatttcaaaatacttcttttttgttgcttaagcatattccatacaactaaattttatataaaatgtgatttttattggctgcataacaaacactatcacagaagtatcataacttattttacattaatttataaactgtggcatttcatattttagtttcacgttgggtgatgcctcttaactatgggacagatatatatgatcataccacttatgtgactagttaaagatcacgtttctatccctttcttgtcatcccctagaatcaagctgctgcaatccccggagacctaatgcaaacgcttcacctcctggacccaagccatcccgccccccgcccccgcctctcccgtagctgggaccacaggcacgcgccatcctgcccggctaatttttttttatttggttgagagggcgttttgccatgttgccaggctggtctctaactcctgggcttaagcgatcctcccgctttgacctcccgaagtgctgggattacaaacaccagccactgcgcctggcccaacatttttaaagtaacaaatgtatcaatttacaaactttcctttggattttgaaaactgaactttttctcttctaaacaaagtctatctactgaacttcagttttttcaggaccccgcacaatggcagcttaagttggaccaactggaaaggttttcagtggatcttggggaggatcggagacaaggcgaatgggctttattctcttaaaatttcctgacgggcggtggacacatatttgcttgatgtcaccaagagcaagaattacgttccaggagctgggaggaaacaacggaggcggctctctcgcccccaagaagcggcccttggttggcagaatttgacagatgactgggatcttcgaggattttccaagcaggatcggggcgcagaagaggagggaaagtgcgtgagcccacgtgacccaactccactttcaagtttgagaagcggagctgccaggataaatacccatctgctaccaatagatgctttccctcccttgggcctgataaaagaatccccaagttccgggaggcatgcttcgaaaattgttggcaggaaaaaaatgttcaacttttgccatttagcaatgcactgacagccttttggggatcatcactacttatggctcatacatctgcccaccgcttcctaagtcctctcccaaccctccccgagtttcagttccactgaacagagaacagcgagagcaacagtttggtggccgagcagcccgtctccgtgggcgcgcacgccgcatcgcgggcctcacacctcactttgggcttcggctctcggtcggcccgagactccggccgcggccctggtgtcccccgccccggttccctcccctcggacacggccctcgcgccggcggccccggtcccctccccaccggccgcggcgggcacagcgcgtcgcctacccacaggcgggggcgccggccgggcgcatgcgcgcggcgctcccgggcgtgccggccacactccccccacccactcggtgagcttgtcacttcctgccctcgccccatctccgtccggggtcagtcagtcgctccctgtcgctgccggagagtctctgcttcccccttcctacgcgctccgcggcggtagctcgggctctccggaggagggggcgacagagtaaaagagaggctgacttaataaagtttcctgaaacaacaactaccaccgaaaaggcccaaggttgggggagacccccatttttctccgcc

SEQ ID NO: 39201 - DNA, 2300 bp, Homo sapien
ccaaagtattattcccaagagccttccatgcctcacctagacaggcctctttcctcttaactttcataccactttgaatatacccagacatactggtgtgatagcaggacatatttgtatgtctggttcctcactagattgcgagctccctgagggcaaggtcgtgtctcttaatggtgttaccatctggcacagcacgtgatacgttgagaatcagactgattagaactcctaaacttactagctgtgtgaccttgggcatgttacgtataacctttctgcctcatgttttcatatctgtaaaatagtgctaatgagtatagtgcttacaagaattactgtaaagactaaatagcaaaactcttgtgagctcctggtatatagctggcactcaggatagacatggctatagagtgccctccgtaaatatttgtggaatcaactcagcagaactaaggaagggtactattaggctgtatgcctactaggtaccaagcactgtgctatagaggactgcagttttcgtggtctaaatgggagtcttaattgttgccttttagggaccatgggtcctgagctcccaaatcgttggatgcgtcgttcacctgggtgtttggtaagaatgcagtgcgacgttgctctgtcgctcgctgagcgtagcccgaggtcaagcttgggcgctctcacaaaaccggtgccactctggtgtcttcgactttgctggcttcgcctttcccaagcctgttttttgccgctcgcggccccactgcgttctcaacaggccgcgcccacccaccggccgacttggccccgcctaccttgggcccactgggggcggagcctgcggcgcctcgctgacgtcacttccagcggacacggaagcgccgttgtcggcaggcagctttagttaggatgtcgtgatgggaccgagctcagcgtaaccctctggccgacgtgggccgagggggccggcccgggctgctgtggcccagacgagcggagagtgcggagcggcttctgggccagcgctaacgagccctggcagtgcgcacctctggtgccagtgtcgccccgcctccggggtagaatccgccccagccctccgggcctgggaccgggcggccgctttcgccagtccgtccggccgttccgcattaggtccgggataactaggtggagtaggtgtgcggcccgccgccggacagcccgctcgctgtttctttaagcccccgcctgcgtcttcacggccctctcccgttctgctggaaagctgacgtggggcaatccgttcagaccctccatggagaagtttgggatgaatttcgggggcggcccgagcaagaaggacttgctggagactatagagacccagaagaagcagcttctccagtaccaggcacggctcaaggatgtggtccgtgcctataaaagcctgctgaaggagaaagaggcattagaggccagcatcaaggtgctgtcggtatcccacgaggcagatgtgggcctcgcaggtgtccagcttccaggcctcacctttcctgactctgtggatgaccggtgctccactcacagcgaggatagcactgggaccgccactagcttggatactgcggccagtctcaccagcaccaagggtgagtttggggtagaagatgacagaccggcccgtggaccaccacctccaaagtccgaagaggccagttggtccgagagtggcgttagcagtagcagtggggatgggccatttgcaggtggggaggtggacaaaagactgcaccagctgaagactcagttggctactttgaccagttctttggctacagtcactcaggagaagtcccgcatggaggcttcttacttggctgacaagaaaaagatgaaacaggacttagaggatgccagtaacaaggcggaggaggagagggcccgcctggagggagaattgaaggggctgcaggagcaaatagcagaaaccaaagcccggcttatcacgcagcagcatgatcgggcccaagagcagagtgaccatgccttgatgctgcgtgagctccagaagctgctgcaggaggagaggacccagcgccaggacttggagcttaggttagaagagacccgagaagccttggcaggacgagcatatgcagctgaacagatggaaggatttgaactgcagaccaagcagctgacccgtgaggtggaggagctgaaaagtgaactgcaggccattcgagatgagaagaatcagccagatccccggctgcaagaacttcaggaagaggctgcccgccttaagagccatt

SEQ ID NO: 39202 - DNA, 2300 bp, Homo sapien
aatgatttgataatgtgactgaatgttatgtataatacagcttgatgttatttgggccactgagaaacggggtctgaacagacctccagggcctgccccatcctgatctgcaaagtctgtaacaaggacagactttgggaaacaggtatgagtgagtgaatgactttccttttctcttcagtcatagacttgcatccctaagaaggcttttacgaggctgaagagtacattttagagagttccaatataataacagaactagtgttcaccaagttaggtcaattctacatttagctcttttatcagcctctttgcttccatctctgttgtcactaccttctgttccccatgactgaaagtctcctcacaggtttcctgccccttgttccctccaacatgtcatacaagtcttgatgacatcccacttttcagattaaaatccattagggccttactataacccaagataaaatttaaatgccataagttgggtccctacctattgtgccagcccctctgttgtcacctccttcacataccctaagctactgaatgctttctgggtgagtcaaactccgataccctacaggtctttgcatttttttccacctgcctggaatgctagtttccctgatctctggttaggtggacaatcacgactcatccttcaaatcccaaagtattattcccaagagccttccatgcctcacctagacaggcctctttcctcttaactttcataccactttgaatatacccagacatactggtgtgatagcaggacatatttgtatgtctggttcctcactagattgcgagctccctgagggcaaggtcgtgtctcttaatggtgttaccatctggcacagcacgtgatacgttgagaatcagactgattagaactcctaaacttactagctgtgtgaccttgggcatgttacgtataacctttctgcctcatgttttcatatctgtaaaatagtgctaatgagtatagtgcttacaagaattactgtaaagactaaatagcaaaactcttgtgagctcctggtatatagctggcactcaggatagacatggctatagagtgccctccgtaaatatttgtggaatcaactcagcagaactaaggaagggtactattaggctgtatgcctactaggtaccaagcactgtgctatagaggactgcagttttcgtggtctaaatgggagtcttaattgttgccttttagggaccatgggtcctgagctcccaaatcgttggatgcgtcgttcacctgggtgtttggtaagaatgcagtgcgacgttgctctgtcgctcgctgagcgtagcccgaggtcaagcttgggcgctctcacaaaaccggtgccactctggtgtcttcgactttgctggcttcgcctttcccaagcctgttttttgccgctcgcggccccactgcgttctcaacaggccgcgcccacccaccggccgacttggccccgcctaccttgggcccactgggggcggagcctgcggcgcctcgctgacgtcacttccagcggacacggaagcgccgttgtcggcaggcagctttagttaggatgtcgtgatgggaccgagctcagcgtaaccctctggccgacgtgggccgagggggccggcccgggctgctgtggcccagacgagcggagagtgcggagcggcttctgggccagcgctaacgagccctggcagtgcgcacctctggtgccagtgtcgccccgcctccggggtagaatccgccccagccctccgggcctgggaccgggcggccgctttcgccagtccgtccggccgttccgcattaggtccgggataactaggtggagtaggtgtgcggcccgccgccggacagcccgctcgctgtttctttaagcccccgcctgcgtcttcacggccctctcccgttctgctggaaagctgacgtggggcaatccgttcagaccctccatggagaagtttgggatgaatttcgggggcggcccgagcaagaaggacttgctggagactatagagacccagaagaagcagcttctccagtaccaggcacggctcaaggatgtggtccgtgcctataaaagcctgctgaaggagaaagaggcattagaggccagcatcaaggtgctgtcggtatcccacgaggcagatgtgggcctcgcaggtgtccagcttccaggcctcacctttcctgactctgtggatgaccggtgctccactcacagcgaggatagcactgggaccgccactagcttggatactgcggccagtctcaccag

SEQ ID NO: 39203 - DNA, 2300 bp, Homo sapien
tcctcactttgccacagacttgtggacctggcttattcttgcacatccattcaggattttgtgaagatcttgactccgtagacccaaagagcttcacatgtcatttccctgcctcattttaacatctgagaggagaatagcaaaataggaatgaaattcttctgcggtggagactggctcattgccaggcattattaggcctaacaaatgcttgttcagttgaactggactgatagattctcaatggagcgagggtaggtgttatgtctactctggattcccagtgggcttctaggatcaattgtttatggactcgaggtaaactgagctgggaataaaaaaaccttcactcattcatttgctttttcagcagatatttactgagcacccaccacttgccagcacgtgatttcaggctttagttcaaatcttaattctgccatttcttgaggatttggcttcagcactcctcataactcttccgttatttcatcatctataaaatgagacttgttctaacttaaggggttatggtgaatcttaaaatgatttgataatgtgactgaatgttatgtataatacagcttgatgttatttgggccactgagaaacggggtctgaacagacctccagggcctgccccatcctgatctgcaaagtctgtaacaaggacagactttgggaaacaggtatgagtgagtgaatgactttccttttctcttcagtcatagacttgcatccctaagaaggcttttacgaggctgaagagtacattttagagagttccaatataataacagaactagtgttcaccaagttaggtcaattctacatttagctcttttatcagcctctttgcttccatctctgttgtcactaccttctgttccccatgactgaaagtctcctcacaggtttcctgccccttgttccctccaacatgtcatacaagtcttgatgacatcccacttttcagattaaaatccattagggccttactataacccaagataaaatttaaatgccataagttgggtccctacctattgtgccagcccctctgttgtcacctccttcacataccctaagctactgaatgctttctgggtgagtcaaactccgataccctacaggtctttgcatttttttccacctgcctggaatgctagtttccctgatctctggttaggtggacaatcacgactcatccttcaaatcccaaagtattattcccaagagccttccatgcctcacctagacaggcctctttcctcttaactttcataccactttgaatatacccagacatactggtgtgatagcaggacatatttgtatgtctggttcctcactagattgcgagctccctgagggcaaggtcgtgtctcttaatggtgttaccatctggcacagcacgtgatacgttgagaatcagactgattagaactcctaaacttactagctgtgtgaccttgggcatgttacgtataacctttctgcctcatgttttcatatctgtaaaatagtgctaatgagtatagtgcttacaagaattactgtaaagactaaatagcaaaactcttgtgagctcctggtatatagctggcactcaggatagacatggctatagagtgccctccgtaaatatttgtggaatcaactcagcagaactaaggaagggtactattaggctgtatgcctactaggtaccaagcactgtgctatagaggactgcagttttcgtggtctaaatgggagtcttaattgttgccttttagggaccatgggtcctgagctcccaaatcgttggatgcgtcgttcacctgggtgtttggtaagaatgcagtgcgacgttgctctgtcgctcgctgagcgtagcccgaggtcaagcttgggcgctctcacaaaaccggtgccactctggtgtcttcgactttgctggcttcgcctttcccaagcctgttttttgccgctcgcggccccactgcgttctcaacaggccgcgcccacccaccggccgacttggccccgcctaccttgggcccactgggggcggagcctgcggcgcctcgctgacgtcacttccagcggacacggaagcgccgttgtcggcaggcagctttagttaggatgtcgtgatgggaccgagctcagcgtaaccctctggccgacgtgggccgagggggccggcccgggctgctgtggcccagacgagcggagagtgcggagcggcttctgggccagcgctaacgagccctggcagtgcgcacctctggtgccagtgtcgccccgcctccggg

SEQ ID NO: 39204 - DNA, 2300 bp, Homo sapien
attctcaacgtatcacgtgctgtgccagatggtaacaccattaagagacacgaccttgccctcagggagctcgcaatctagtgaggaaccagacatacaaatatgtcctgctatcacaccagtatgtctgggtatattcaaagtggtatgaaagttaagaggaaagaggcctgtctaggtgaggcatggaaggctcttgggaataatactttgggatttgaaggatgagtcgtgattgtccacctaaccagagatcagggaaactagcattccaggcaggtggaaaaaaatgcaaagacctgtagggtatcggagtttgactcacccagaaagcattcagtagcttagggtatgtgaaggaggtgacaacagaggggctggcacaataggtagggacccaacttatggcatttaaattttatcttgggttatagtaaggccctaatggattttaatctgaaaagtgggatgtcatcaagacttgtatgacatgttggagggaacaaggggcaggaaacctgtgaggagactttcagtcatggggaacagaaggtagtgacaacagagatggaagcaaagaggctgataaaagagctaaatgtagaattgacctaacttggtgaacactagttctgttattatattggaactctctaaaatgtactcttcagcctcgtaaaagccttcttagggatgcaagtctatgactgaagagaaaaggaaagtcattcactcactcatacctgtttcccaaagtctgtccttgttacagactttgcagatcaggatggggcaggccctggaggtctgttcagaccccgtttctcagtggcccaaataacatcaagctgtattatacataacattcagtcacattatcaaatcattttaagattcaccataaccccttaagttagaacaagtctcattttatagatgatgaaataacggaagagttatgaggagtgctgaagccaaatcctcaagaaatggcagaattaagatttgaactaaagcctgaaatcacgtgctggcaagtggtgggtgctcagtaaatatctgctgaaaaagcaaatgaatgagtgaaggtttttttattcccagctcagtttacctcgagtccataaacaattgatcctagaagcccactgggaatccagagtagacataacacctaccctcgctccattgagaatctatcagtccagttcaactgaacaagcatttgttaggcctaataatgcctggcaatgagccagtctccaccgcagaagaatttcattcctattttgctattctcctctcagatgttaaaatgaggcagggaaatgacatgtgaagctctttgggtctacggagtcaagatcttcacaaaatcctgaatggatgtgcaagaataagccaggtccacaagtctgtggcaaagtgaggaacttcggcaaagcggccagcgcctggactgagaggcggggcccgcagggcgatccaaacgaaggtggacttctccaacagcccaggagtgggtctgtgaccccgccgcccaaggccgggaatcttacactggttctgcggattgggaattaggaagtaggcgttttgaggaaccatggaagctagctagcactcgggcaccttcccctacctcccgcgcactcttcacacgaccacctactacgcgcaagtccctcggtggaagatgaggcagtaaagggaggaccaagacccctaatcgcagcttccactccccaaaggagagtggtgcacacgttcagtgctactggttcccaagggctaaaaccggagcccctaggggcctggacgcaacaaaccaaagcccagcggccggccactgaaaatgggggcaggggccgctgcggagcgatgaatcctttcctcagccgcgctcgggctgccggttcggcggccacaggcctggcaggcgcgttagagacctagacccgttcccaagtaagggccgcacgggacccaggccagcagcggcaactcgcggagcttcagctcccctaggagccagagccgggggaggcggggccgagagccgggggcggggcccggacgggggcgggcccgcggtgacgtcgggagggcagcgacgcgcggaggcggcggcggagcctcctcctgctgctgctgcgccccatccccccgcggccggccagttccagcccgcaccccgcgtcggtgcccgcgcccctccccgggccccgccatgggcctcaccgtgtccgcgctcttttcgcggatcttcgggaagaagcagatgcggattctcatgggtg

SEQ ID NO: 39205 - DNA, 2300 bp, Homo sapien
ccacagcaaatttattactcaagatccagtgccacattatagcaccacccgaagccctcaccttccccctcccaacctggcccctagagtacacccaaaacagaaaaaaaaaaggaaacccagatccctgctcctcctctggaagagggggccttggccaggaagccccttccataggtcccagcaggcaggagagtggacccctctgtgcccagagagcaaggctccaggctccaacaacagagagaacatgcaggcaggagcaggagcagaggcctgtggctatgggggaggaaaagtgggaggaaagggcactgcctgaggagtccgggagtctggtcatcccggggatgcacgcaggagcttccgggcatcaggggcctgcccctggctggttagcgctttgacagctcgtgggacagccagtccagaccatcgtacagacctgtgccttgggtggcacaggtggcctggacataccactgtggggaaaaggaaagaaagaggtcagcaaccaggaacaaaaggaatgcctttatatctctgtcccagcctgcagcttccctcaagaggcaggattcagcaccaggtgggcaggacccctaccgtgcggctgcgtaagtgctgtagccccagcttgtcagtcagctcgctcacgggcatggcgttgggcatgtcctgcttgttggcaaataccagcagcactgcatcccgcagctcgtcctcctgcagctgagagaggagaagagaaggtgggacccaggctgcgtctcctctactgtgttggggaattccctttctacctcctagcatcttgattggaaaaaaaaagtattgtgcagtctgccgttgaagacaagacatagttgtaaatgagcttgaggtgacctgagcccataagtccagaaaagaaagaccttttcctaatttgagtacttgcctaggcaaaatgacaacatttccaaatggaaaaggcaggaatgtaaaatgtttctctttgccacatataagtcccatctctcccacaacttctcagactcagatgtaaagacatgagaatgcggccgggcgcagtggctcactcctgtaatcccagcactttgggagaccaagacgggtggatcacctgaggttgggggttcaagaccagcctggccaacatggtgaaaccccgtctctactaaaaatacaaaaattaactgggcatggcagcgggcgcctgtaatcccagctacttgggaggctgaggcaggagaattgcttgaacccgggagacggaggttgcagtgagccgagattgcaccattgcactccagcctgggcaacaacagcaaaactcccatttcaaaaaaaaaaaaagacaagacaatgcacagaaaaagtgaaaaagtcactcccatccaaaacagggtgagatacacaatgtgtctgtccacaaagaaaaacttatattcctggtcttcaatgcctgttgggggctccctgacttctataccactacagagatcactctgtccccaagctgagggctcagttcccagggctctgggtactcaccatcttctggagttcatcagcagattcttggacccgctcccggtcattactgtccaccacaaagatgaggccctgggcaggaaggaaggaagaaaggagaagcaatcacttctgcctgggacataccgtagtgtggccctttctgttttcttcccatttgtaattgtgtcaatccttctcatctagtaaactctacagaagtttacagaactctatagaagctctacaggagtcatggcacaaactagagaccccactgcaaagaggaagtagtttatccaaagatgtgcaaggaaataaagacatgttatgagggctaaatcaggcagcctggtcccagaatcctgcttctaaagagaagtccaagctggggaagactaaggtgagttctgaagagtgagtaggggatagccaaacagaaggggtagaagtggggaagggttttttccttggcctgggggcccagcctaggccaacaattctgttctcccagccctaacaccttttcccgtggggttagaaagtcccctcccaacactccacctgagtgttctggaagtagtgccgccacagaggccgaatcttgtcctggcctcccacgtcccagactgtgaaacagatgttcttatattccactgtttctacattgaagcctgcagataattggaaaaaaaagatgagaaaactcctgaaagaaaggaactcactaaaactacttagatttcagcagggacacaaaacca

SEQ ID NO: 39206 - DNA, 2300 bp, Homo sapien
tggccaaggccccctcttccagaggaggagcagggatctgggtttccttttttttttctgttttgggtgtactctaggggccaggttgggagggggaaggtgagggcttcgggtggtgctataatgtggcactggatcttgagtaataaatttgctgtggtttgtacacggtgttgtctgtagcctgcaaaggagaggctaggttactgggtaccaagagacaacgtgggagaggatcaaagcagctaaggctgcagggcaaccccacccacacataccctcagctcagcttctccctccttattcttgggctggaaatactgtagggtttacagtggtgcaaatctcattccttcccagctccaaggagcctttgctgaagattacaggatctcccttcatagttccatgaaccacgtaattgtttcccatcattctcgtagctacttagagccgttcttaatgtttgccttacacattaaaattagagggggagagaatgtgcgttaataatacgaatcctgaggtacatttcagaaaatgtgattcatcaggactagtctgatgcccaacaatatgcatctttaaaattacccagaggaggccgggcgcagtggctcacgcttgtaatcccagcactctgggaggctgaggcaggcggatcacgaggtcagaagatcgagaccacggtgaaaccccatctctactagaaaaaaaaaaatacaaaaaattatccaggcgtggtggcaggcacctgtagccccagctactcaggaggctgaggcaggagaatggtgtgaacctgggaggcggagcttgcagtgagctgagatcgtgccactgcactccagcctgggtgacagggtgagactccgtctcaaaataaataaataaattaaataaataaataaaattacccagggaattctgccactaatagtctattacccttattttataaaacatcggtggggtctggggcttgtagttccttgctgcacaccactgagactcttgctacttgggaagacccctcctatggggaataggaaagcaggtataaggaaccacgggtggctgggcactgtggctcatgcctgtaatcctagcactttgggaggctgaggtaggaggattgcttgagcccagaagttaaagaccagcctgggcaacatggcaagaccccatctctacaaaaaacaaaaataaaaaattacctgggcatggagatggacacctgtggtcccagcacctcaggaggctgaggcgggaggatcgcttgagcttgggagatcaaggctgcagtcaactgagatgcactccaacctggctagcagagcaagaccctgactcagaaaaaggaaccaggggtgtggcttattccccaagtgtgatcgactgcccattttcccttggatcctagccaggcttaggcagaactcatcatcacttgtttttgcctttgtttttctttcatgtcacttttccaggttctgagctgggttttctcctcaagctttgcaggaagtgagtccaagagactataactcagagattctttggaggggaaagatacccttgcaggagctctatctgcccagccagatgtcctacccactggcagagcagctggggttgaggaggggtgcttggtgctctctccacctaggcccttctccttacccaggtcctgagccagccttcctgatgaatatgagtaatttgatgtcaactgattaactagggtttcctcatactccctgcaaaatagcatctggaacattttgacctcatcctcctaagggccataaaagctgatagatttttcttggttatcttgaacttaacaaaatacttgagttgcaagggagccaggcagaactcacttccttgggagaaaggaggttgctttctatcctgttaccagaatgagaaacggaggtaaagaaaggaaaaaacttgcctaaattcacaggttgaagttccggatcctggtctcagctcagcctactttggtgcccaaaggggaataggaaggcaaacaccggaggctctgcacccgcctcctctaggccatggattaatgctgctgcgccagggccctttccccactgtggtgtgataagaggctgccctcacagtcacaatgctcccgggtcacagaggtgctgggccccaggccagcctctgcctgggaagttctctctgggaacatctggtgggtactacaggccctattccaggccctatggcctgtggaacctcaccacgggggggagggctgggccagacggagacat

SEQ ID NO: 39207 - DNA, 2300 bp, Homo sapien
ggagcctgcaggggtctcagaagctgagacctcccactgaagctcccacctcatttcctccacacaggtagctcacctgcaggctcattgtctgccctgcctctcatgctgtctccatgcctctgtgtggccaaacccaacttctctcccactctgcctttgcagctacaaccctcctgccccttccaccccctttcctgtttttccatcttgcaagcaccagttattttttcagacatgttaatatgaatgttgggaatgtgtgttgtggctattgggaatggggtttctgtttgtgagttggggcataatgatttaggtttggagattatttaggtttggatactgaacctgcatccctactgctcttttgaattctggtcacttaggagaactgagtcccatcaaggatttagggtttggctgatattttgagctccttcaccctgtcttggcacagccctttacagtccctgcttgattctcctctctccattgtttttgtggcaattacacaaacatgaaacaggggtgggagcagagaaagagagcccaggattaggagccagaaattgtagcttctgatgaggaactggcttctaaaccttgaattttactctctggacagcccctgacttgtggcaatgccaatctgtgcctcagttttctctttggaaaacctctgccttctttcccgactttttggaaagatgagaatttgaaggggtctgtgcctctacctacctagaaacaagtgagtaaaagccaatttagcgactgaacttaataagtagactctggattccaaactctttgtaattctttgtttcactggtgctagtctcttttctccagttgctctgtaatgtgttggagagcaaagactttacccttttctgtttactgccttcatcctgaacaaccagcaatgtgctcatgcttaatatcttattcagcatacaactgcagatgaattaactaagcccagatggcacgcttattataagaaagttctgtgcataagctgttccttggggtgatctccagcactaccagggttccaggcatgaaaggaggcatcttcaactcccattgattactaatgaaagtagaagaggtatggtggcctgtgggacctgtgtcccttgctgctcagagactcgcttgggctcatgacggtttctatgttgctcagcggacagtcttctcctgcttctcattcccttcaatatgcctttgataaatgttagttgaatgaatgagtgtctgataccagaaacatcgtctctgaaattgaagcttcactgtgagatctagaactcttcagagaatgaacagaatgaacaatctcagcaggttagagatgctaagagatgcgtctcctaggagaagccggctcttcaggcgtgttcatctctatgcccagtgtgtaggaccagagcctcaatgcctggtgggttagagctgagtcccagtttccctagagcttcctggagagtataaaaaaacaggagcaagcctttctgaagtgcagcatttgggtggcagtttggagagcccaaccgaggactgcctaatagtgaaggtggacccctgaacttgaggaccccagaatctctggctcgggtgtgtcttccagggctgagaaggcttaggagcagctggagacaacagctgtccatttggaaaggggaaagcttgagcatttgaaagcattatccctttctacctccccaaacttttctaatgaatgtgtaggaaaggagaaccctctcaatcctcccagccccttatcaggacttcaagaaagatccagtcctcagccaacctgcagtgttttagtttttatcacacaaaggtttaaataaaaggaattagaattttctgattttagccaacccactggcaaattttaggaacctgaccctctatcacaaaacactacctcccaggaccatttcaagcaaaagacctcacccaaataaccccccattattgcagagccagcccccaagctggaaaaggagctcctagaaggaacttcccttcccagccttcccagctggagtctcatccttctgaggagggtcagcctggagcatgcatcaggacggtgaggagcctgggggaagtgggaagacagggaggacaacagagacaggggaagacctcagggctttgcttccatcaactgtttcatctgctattggccaatgttctggggaagctttttccagtccctcccttcctgccctgtcctgcttcccttagatcaggagagttggcgggtatgggcaagg

SEQ ID NO: 39208 - DNA, 2300 bp, Homo sapien
aactgaggctcttagtccaacatcttgaggaactgaattctgtcagcaactatgagtgagcttgggaagcaatctaccttcagtcagaggaggaccttcagatgagaccacagtccccttcccaactccccttgacaccttgactgcagctttataagagaagacctggaggaaaaggcaggcacccaccccagattccttacccacaaaaactgtgagataaatgcttattgttttctttagtatttaagttttggggcaaattgttatgtaactaatacaagatataagataattaactgaatgagaagggagagaggacagcagttatgatcaaagacaaagtgtttgagtttacaatcgtacctatgaagttatggtgttttatctgtctggagaacgtcctaaattggtgcagaggtcaagtttactgaagatgagatcaaggagcaaagaggtcagggtatgggataagtcatgctcgtagatattgaagtatttcaggattattggctgaagaccgtgcaccaagtgttaacaatttcaatgaatgacacggtagaaataggggtacggtagataaaaagccacgagatagagaggggtataatctgatggaaccaacttccacagaggttttttttttttttttttttttttttggaaaagggtggcaaattagggatctaagaaggtgacctcaaaacttaaccctgggatatgtttagtgtgggagaataaacttacaatcttttaagagagcaaggggccatgcactgtggttaatgcatgtaataccagcactttaggaggccgaggtaggagtatagcttgagcccaggagaccagcctgggcaacatagtgaaatctcagctctacaaaaaaaaaattagctgggcgtggtagcgcggacccgtggtaccagctccagctacaccggagactgaggcaggaggatcgcttgagcctgggagtgtcaaggctgcagtgagccgtgatcgtgcccccgcactccagcctgagcgacagagcgagactttgtctcaaaaaagccacaaaaccaaagaaacaaaaagaactgcaagggaagtactgtcttcagtgtagagccaagttttacgattaaatgacataacacatgcaaggtccttggttccacatagtgggcactcaacgaatattagttctcgctaaacagtcacttaaatatttgtaggccttggctttcccgttccttccccgacctttttactggggctagggaaggtatccggtggctggaggcgcttcacactgggtcgggtgagagcgtgaagcgagccttttccctaacgtcacgggagcagctgggaagagaccgaagaacgagggtcactctcccctgtatacgtggcatgtccttcctctgagacatttattcctcccaccaacaaacattaatggaacgcctcacaagtgctagaccccagcgacacaaacaagggcgaggcacactctctgactacaaaaagggcgcgcggccgcgtggcaggtcaaagcccacatcggtaggaggttccacaaagctctgattttccaagttctctccatacttttagccaaggtaaaatgtcggaagtcgagtggagcgggtacggagattcctccaggactctgcctgcgtggctccaccctcccaggccgcattcccgggtacagcggcgcccacctaggtgggtatacaagtgtgcgcccctgaggccagcggggaaggacgtcatgggcgaggtcaggcgggagggcgcggctggctccgcccctggggctcccatggccccccgcgccccgcggccagatgctgacgtgtcctttccttcccactacacctcccgacattacctactccggctgccccggaagtcccgccccatatttagcccatccttgcaaatcaactctttcagcgcttcctggaactcaccaccgttttggggaccaagaggcggggctccgcgagcagggtgcctattggcctgagggccggcgggctctgggcgctaattgggcggagggcggtggcgctctggcacgcttgcgcggcgagtagaacgtgtggcggcggcggagatcgcgtctctttcgctccgtgtcccgctgctgctcctgtgagcgcccggcgagtccgtcccgtccaccgtccgcagctggtagccagcctgcccctcgcctcgactccctttcaccaacaccgacacccacattgacacctccagtccggccagccgctccactcgttgcctttgcatctccacacatggcg

SEQ ID NO: 39209 - DNA, 2300 bp, Homo sapien
catcataacaaagttgtaaagccactgggtggggtaagattaattctatattttccttaagaagaattagaattcccaaatacaccgaaagcactaactatatttctaactactttagaagtatcattctgtaaaagtagtttcattattgtttaagcttgttttcacgtatttgtatgcatgcatgtatatgctttattaaatctatttctgagcctgactgttgggcttttacaagttgctctctttactaggaacaaatttttattctcacatcatattaatgtgtggtttttgtttgttttctacccattgtccacactcttttttgcgcgggtagctgtgacttcaggcacactaccacacctggctaatttttaaaattttttttgtagagagagaatctctatcctatactgataggatctgctatgttgccagagctgatttagaactcctgagctcaagtgattctcccacctgggcctcccaaagtgctgggaacacaggtgtgagccactgcacgcagccacattaaactcttagtccttagaaacaggctacttagtttggtgtcgttagtaccataaaacactgtgcttaaatctgtttttgatggaatcacagagcaaatttcacatgcagcttcaggtcaaactgtttccacatcagtttacagactttattatagcatcaataatatttatttgtttcaaaatatgtagaacaattaattataagaactaattcactgcagtgaatgttgaatgctgacacttacaaactaaagggacaattagttatctgacctttaataatttacaagtttatctaggcaaagcttaatcggccatagattttttctttttttttttttctttttcttttttagacagagtctgactttgtagcccaggctggagtgcagtggcgcaatcccagctcactgcaacctctgcctcccacaagttcaagtgattctcatgtctcccgagaaggtgggattataagtgcctgccaccatagccggctaatttttgtatttttttttttcagtagagaagggctttcaccgtgttggccaggctggtctcgaactcctgacctcaagtgatccactcgcctcagcctcccaaagttctgagattacaggcgtgagtcaccgcccccagatgactttttttcttttagaaacaaaaccttaggcatatttttctttattcgaattttttgtcaaagtttctgtttttaaatgcatcaaatataagtgagtgaaaaggatagaaattatctgtactactaactcttctattcaccacaatgtgggtttccttatttatttctttttcttttaagtattgtaagctcttttcaggatgggaggccttactgtgttattcttaactatacagtcaggtcctagaagagtatatggcaccaagtaggtgcttagcagatattgttggatgaatgaacgctgtaaatagttctactagaattgatttaatcagccttctattgttggatgttggggttgttttattgttttttcttctcataaacatttgttccttcagataaatcacagtctataattattttctcagaacatgtccataaagtagaaacctaggccaaagaatagcatatattttttaacaacatcatcctataaatctttattgagtaaaatgattgggtttttaattggatgcatttgttgttcttcaaaatattgaccactttctgttttaattagtaataaatttctatcataattgttgccatttttctccatgttagaaaaaactggaactttctcttctgaattgtataattatctatttttattaatgctttaaaaatgtaaggcttttaaaagactaattagacataaaaataaaactttcacttaaggtttattgaacctatactggtatgtctgcaggcaaaaatgaatgttcaaagtacttttaggaagtatgaaaagtgttttagccatttagcctttactaacatttattttgattttaaggtaatttttatattataggttacttgctgactttttttcttctctgttcttttctgaagttgcattcttgtgttgggtgggacacagttaagtgtgacatgaatttccttgccccaagttcttgatttgcccatgaaatgaagacttgtgcctcatcagatgtcttttaaattttttactctgcacattttattttaattatctctgaaggcattttctggttctgtaataagttcttacctcttgcctatagagactttggaag

SEQ ID NO: 39210 - DNA, 2300 bp, Homo sapien
tctggtgtgatttcccagatggggagttgtgcctattactagcatcccccagaagtagtgagagatagcattagctaatgggtaaataactggcttaaaagtgtaaactcctaggttttcacactccagtttttatgtggtcctggatatgtgattcttttctgccttggcattcctgtctaaaacactgatctagcaatcccaagccaccctttcctttttgcggcccttgttctgaataaaacagtgatttcatgtctcttctcactttcttccagaaggcagctagccagcacatactcactgaccagttgctgcctgcacagcagtgttttcactgctgtgttggagaaacccgaagtcttaaagggccataaggtattatttaaagagatcagtgtcatagtttaactgtcttcacagttccaggctgtaggaggtacagtttctgaggacaggggcaatgtatgtgggtttggtgatcatttctaaggcctttttcgatgacccctttgtcctttctgacacattagaattgctctttgctgctgcctgaaaaatgatgtcctcatgctggacagccccagctgaaaactcaggctgctgccttgacctatttcccttctccctgctggcattaaaagggaggatgcccccggggagctcattctgcaggctgcagtggccagggcagagtcctgggtttcctctctctcccttactccctgctttaaaaaaaaaaaaaaggtacagaaaaacattataagcaactgttgccattggggaaaaaaaagtatttacgtttcaggggaatgtggcctcagccatgaatattggtgtgtatttatgaaggggtgtatgtctgggaaataaaacttagaatacaagaaaaagtgatttcatttctttcatcgtagctccaagtgtgctgtatcgtgtctgaaatagataaactgctctaagcagtttcaagtttatctcaatctctgtccttcttgtgccctcggtcctttccctacatcaccccacaagcgctgtggtgtatgctctcttagcccttcccattccatctctctgcgcaggctccttccctgttgaggagacccacaagagagggaacactagcaaagttatatctctggatcaaaggaatgaggacagttcaagccacaggaaattccaagaaagtaatggacgcccagtgagggtgaatccagtgcaacctactctcctgactctccctgacggccatgtcgcttgggaaccctctccgagccacaaataattacctgctggaaaagcaagcaggctgtccggcaatgtttcatttattttcacaaagcccccttattctagattatctcagccactgcccaggaaaaagggaacatgttatggtcagctttctaaatagctctctcatcccacaagcttttaaaggctgtttgggggctaaggcctttatcacctccccacacatgcttgacagttcatcacccaccagtggtctttaatttcaagcagtttattcttagttaagggccatattctttgaagaagtctcaggtaagaaaaactcctgtcttaatagcgatcaaaccttaattttatatagcattttctcattttaaaagtgttttcatgcataatgtttcattttaatctcacagcaaacctataagaaaaatattaaccctgtcttacagttcaggacaccaaaatgcacagtaacttgcctctgttcacagagctaatggtaagacatatactaaaactcaaatatctgcattccaaatcaaatgctttttctcctcaaatcatgccagttttgcttttagaaggcaataattcttttagccatattttaccatttttcaaccatagaatatctggaactagttaaaggaatagtagaggacttccctgaaggtcccacattgactaagagtcagtcttctatagggcatggattctgatcctgaatgcttccaagactgcagaggaatttgaagaatttgctatgcccatgcctcccctaaatatttactctgctcttcccacagctcctgtgtctgttgtctgattcctgcttcatctgctgtttgatttttgtgggccttacttttcccatttgctcatgtatgtctatattcctatatctaatgtttcttaaaagacaaatctgactgtgtaggtgcatttgtttaaaaaatataactccccattgcctctgggataaagtcttatctcagtttacatatattcttgataacctctccaactttatgtctcaccacccc

SEQ ID NO: 39211 - DNA, 2300 bp, Homo sapien
gcggggagcaaggggcgactccggccagcgaagactgagaagccgcggctgcagctccatgaatgaacgggctgtgtcgtgggctccgggagttcacctcaatccttcctgccggcctctgtgctgtcccaggttgccattccccagctcatcacacttggtcattcctgccactgtttcccgcccccgcaaccctcattaaggaaaccctcatttaaagccccagtgagagcacaggaggggtgaggcaaagcgaaggaggggctggcggcagtgcagcagcgaagcccgggctctcggtcctgggagcctcgtggccccggccgccgtcccccgagtccccaccacgcagttccgaactccgaacgcgagtccgcgccccgtcagcagtcagcgggggtgaggatgacgcgggccgggcgagaggcaggccaaatgcagcagccccgccgcgggccgccgggcccctgagccccgctcttcagagccagggggccccgggtgcgggccggagggcgggggccggcgcgggctctcccgccgcagccccgcgccgctccagcctatcagcggccacccaactgctccctccgaccggcccaaaatagctgcgaacgcctgcgacttgcgcgcggcccctcacttgacgctcactccggctcgctcgcccgctcgccctggccccgctccgctcgtctagagggggcggggaggaagcggcccggggaggggggaggggggagggggagagaggaagagaggaggaaggaaggaggaaagaggaagacgggcggccggaggcgcggggctgcgcggcgccggccggcgcggcgctggaaggcgccggcgttaaccccgcgaggcaggcgacggagggggagcggcgctaatacataagagcactgcatcacgctaatcttctcccagaacagtatgcgtcagcagtacattcacgttctgactgaaggacaaaaggatgagagagcagtctgcgtggctgccgcctgcaacaccgcgagcccggcgcgaggaggagacggtgggcgccgcgcgcaggggccccgctgctgctgctgccgccgctagccagcggggactatgttcctgggctccggagcgtttcccgcagccgcgacccccgctgctcacgccgctgcagcagtccgctggcggcgcggccactgagggcgccgggagccgaagccgcgaactcgctccctccgcacaaagccggagccggcggcgcgccgggggccgggcagcggcgggcggcgacgggcggttgcgcgccgccgggggctgcggccgccgccgccgccggacccgcgcccgcccccggactctctgaaggggcctgcggtgcgggcgcgaccgcgggcgccgcgcgctcctccggccggcggaccgggtccgagcgcagccgccacgccgctggtcctcgggggccggacggagcgccgccccgcgtgccggcagccggcggactggagaactgaccccccgtttttgtctcttccaccctccgagaagaggcgaggagaaagggggtgtgtgtctggggagggcgaaggcgccgcgaacacctcctcttaactctcgccgctccgcgagctcacgaccgcaatcagctgccgccggcccggagcggccgacgccgggagagggagcgcagcatccagcgagtgcggcctgggcggcttcggggcgcccccgcactccctccggcggcggcccgcagagcgggccggggccgccggagcgcactttggcgatgaagcgccttcccccgcggctggagcgagccggtgccagggtccaaggacaaagccgggaagcgctggtggcgccgctccttgggcggaggggggggcatgcacctgcatagcccgccgggccttggctctcccaggcgcgcctcaactccgcggcttcgccggctccggctccggatttactagaggccattttgtctcccccaccccttccctcccctcccctcccctcccctctgccctccccgcccccaccacttcccccttttgttaattaaaactaagaagtcggaatgggaacgaggtgcccagctcccgtggagaaagcttaaggacaccacgccagtgctttcctgccttccttccgaggtaggtgacggcgaactgggtggggacggttgcagtgtgggagagtcgtagctttcggagggcttgccttgagggtgggttgggagaccaggggccgctcgagtttggcaggatttttttcggccgatccgctccgtctctctaatcgccccctcccca

SEQ ID NO: 39212 - DNA, 2300 bp, Homo sapien
gtggtgctgggtttcttatgtgtggatgtgttgctgttggccaagaagaatgagaaggagcgaatttgggcagtgggacctccaggcagccttacagttttcagttggggagtgagatgagacctggaatttatgggtctgtgtagttaaaaccatgcggtgtacaagattgcccagattgagtatgtggaaggtgtgatggggaggagagagagtgttaggaagtgctggggtcctgccatctgagaacaggagcccagaggcagcatatgcagccagaaaggagagaacccatgctgagggtcgtggataccctctatccccagaaacagaaagccagtctacaatgtccagatcccccgggagctcaggcaggttgaggcttcccaggggctgcccttggctttagctttgagaaggtgcctggtacctggagtgagagctgcgtgatcaccatggttggcactgtcaccagataaagggtgcaaatgaagaataagcaaatttactctttaccttttcacaaagttgctgaaggtcaggagagatgcaacagaaaatgctgaaggcaagtatcacaaaacacgtcggtgaagacagacatgtggagtcaggtgcagtggctcacgcctgtaatcccagcataggaggccaagcagggaggactgcttgagcccaggtgttcaaaaccaccctgggcaacatagcaagaccctgtctctaaaaaaaaaaaaaaaaaaaaaaatagctgggtgtggtggcacacgcctgtactcccagctagtcccagctattcaggagactgcggtgagaggatcgctcgagcccacaagttcaaggttgcagtgagatgatgacaccactgcactctggccagtccctatctctcttttttttttttttttttttttttgagatgaattcttgctttgtcacccaggctagagtgcagtggcacaatctcggctcactgcaacctctccctcccaggttgaagtgattctcccacctcagccttccgagtagctgggattataagtgcccgccaccacgcccagctaatttttgtattttcagtagagacagggtttcaccatgttggccaggctggtcttgaactcctgacctcaggtcacccacccacctcggcctcccaaagtgctgggattacaggcatgagccaccacacctggcctagtccctgtctctttaaaaaaaaaaaagacagagacacaggatgtcatggacatagtgcactggagcaaggtcctgctggaggaaggaagtgaaagggcaccaagtgtaggtgagctttgagtgggaagaagtcactttttctcggagacacagggcaggtgggtgggagcacagggtaggaaagaaaggggtcacttgcaaatagtctctggctgagggcaaggaaaagaaaaggggaaggcttcctatccagagcctgtttctgcctcactagggttctttctggtttgtgtttttttgtttttttggtatttttttgaggccaagtctcactctgtcacccaggcaggagtgcagtggcgcaatattggctcactgcagcctccgcctcctagcttcaagcgattctcgtgccgcagtttcccaagtagctgggattacaggcatgcaccccatgcccagctaatttttgtgtttttggtagagatggggtttcactgtgttggccaggctggtcgccaactcctggcctcaaggggtccacccacctcagcctcccaaagtgctgggattacaggcatgagccaccgtgcctggccaacctcactagggttctctggggagaaaattacaggcccctgctggccagactttcttgggagtctatggacaggagctggggcccaagtggttgttctctggcttgctctgacctgagtgtgtctctgctccaggatgatgcccgcacggacgccgtggacagcgtagttcgggatatccagaacactcagtgcctgctcaacgtggaacacctgagtgccggctgcccccatgtcaccctgcagtttgcagattccaagggcgatgtggggctgggcttggtgaaggaagggctggtcatggtggaggtgcgcaaggagaaacagttccagaaagtggtatgtgatgtggagaggcggccccagcattgcgccaccaccctcacagagaaagggactgttccacaagccaggaagggagcagggaatccaccatcctgctgttcctgctgaggaaagataatggatttgggtttgttggtgtttttttgtttttgttttaaa

SEQ ID NO: 39213 - DNA, 2300 bp, Homo sapien
agatattgctaatttcttttgctagcatggaatattaatattaacaccctgggaaaggaatgcattcctggggggaggtctataaatggccgctctgggaatgtctatcctacgcaatggagataaggactgagatacgccctggtctcctgcagtaccctcaggcttactagggtggtgaaaaactccgccctggtaaatttgtggtcagaccagttttctgctctcgaacactgttttctgttgtttaagatgtttatcaagacaatacgtgcaccgctgaacacagacccttatcagtagttctcctttttgccctttgaagcatgtgatctactccctgttttacaccccctcaccttttgaaacccttaataaaaaacttgctggtttgaggctcaggtgggcatcacagtactaccgatatgtgatgtcacccccggcggcccagctgtaaaattcctctctttgtactctctctctttatttctcagccagctgacacttatggaaaatagaaagaacctacgttgaaatattgggggcaggttcccccaatatctggtgcccaacgtgggatactgagattacaagcatgagccactgcatctggcctcttcttttgatttttttttttcaaacttttacaaatgtagaaaccattcttagcttttgggcattaccaaacccggcagtggcaggctcggttcaccaacgtcatttgcagttccccgctttatgttatgggttttgttttgttttgttttttttattgagacagagtttcactcttgttgcccaggctgtagtgcaatggtctgatcttggctcactgcaacctccacttcccaggttcaagccattctcctgcctcagcctctcaagtagctgggattacagacactcaccaccacacctggctaattttgtatttttagtagagatgaggtttcaccatgttggccaggctggtctcgaaatcctgacctcaggtgatccacccaccttggcctcccaaagtgctgggattacaggcttgagctaccacgcctggctgggttggttctcaatggagtggtttgtttttggagctgctctgcgcagtggggaccagaataggcctgggttcctagcccattgctattccttaccagctgtggattctaaggaaagtcatttaacctcgctggaccttagattcctcatccctgaagcccaagggtaaaacaaaacaaaacaaaacaaaacaaaccaacccatcatgtaaagcggggaactacaaacgatacaggtgaaacatgcctaccacaccactcacaggctatgatgacaaaaacgtggctacatctgggaccaccccccaacccccactttgtacgtaggaaatacggagttgaggatggagacccacagtatgtccagagtgtccccaaaggccacagtgcccgcctggagccctccagagagcgtgcactccctggggtgccagccagagacaacttgccctgaggcttggaactcgattctccgcgtgccagagaaggggtgggacttcagaacccccaaccccgcaatctgggtcggggagcctggcgcactgcgggccgctccctctaaccctgggcttccctggcgtccagggccgtcggggccgagtcccgattcgctcccaccccgaagccgcgccaggaccaacgagggcgcagccgtatgccccagcccgctccgcggagcccctcacagccacccccgccccgaccgcgccccgcgcggctcgaagcaccttcccaaggggctggtccttgcgccatagtcgcgccggagcctctggagggacatcaaggatttctcgctcctaccagccacccccaaatttttgggaggtacccaagggtgcgcgcgtggctcctggcgcgccgaggccctccctcgaggccccgcgaggtgcacactgcgggcccagggctagcagccgcccggcacgtcgctaccctgaggggcggggcgggagctggcgctagaaatgcgccggggcctgcggggcagttgcgcaagttgtgatcgggccgctataagaggggcgggcaggcatggagccccgtaggaatcgcagcgccagcggttgcaaggtaaggccccggcgcgctccttcctccttctctgctggtctttcttggcaggccacagggccccacacaactctggatcccggggaaactgagtcaggagggatgcagggcggatggcttagttctggactatgatagctttgtaccgagttctagccagatagaaggtta

SEQ ID NO: 39214 - DNA, 2300 bp, Homo sapien
ctaatttttgtatttttagtagagacgggttttcaccatgttggccaggctgatctcaaactcctgaccttgtgatctgcccacctcagcctcctgaagtgctgggattacaggcatgagcctggttgagacatggttatttcatcgcaatatcttggggaacccatgaatgctctgaaatgcctttggtttagaaatggatgaaggagaggccatggaaatatttagaccttttggagagatcgaaaggacaggtgatttatctccaagttcacctcgagacatgacttgggctgtcaaatgttcttacggtagcctggcaacatgtctttctcagcctggtctgtacagtgtggaggaagtaagggactttattaagagtgtcacaatagctataacctgccagtcaggtgatctgtttttccttggccatctctccgtctgctcaccactcttttttccctagtacacgaatatctttaacattcaaaaatatatcttaacacttaggatagatcaaaattggtgttcattcagataacattgtcagattctcttagatccaaatatttcttttaacaacttaacagtatgttaaaacctcattcacttgcttggagagctgttgtacagttctttaaagagttctttatatgaggttgaatcttccctttcttaatagtcaaattctatatatggtgtcttcctttggaacaccttaccatgggctatttggtcagctccattgactccttgccttgggaattttagtgcagtgagagttgtgctcacttctccttcacttcagggcctgatgtgtcaggaaatggagttttctgaattaacatgaaagttgagttgcagattgcttggttaaaaaacaacaggtggggcacagagtctcatacctatgattgcagcacttcgggaggtgggaggattgcttgaggtcaggagtttgagaccgacctggccaacatagtgagacccccatctctattattttgaaaaacaacagcaaattttttcttaacatccaagacaaggccaccagtcaaaactatcaagttttagtagtattttcctgcttgattatataatagcctggcttagagatacaacctttaaataaggaatcttaagatgatgtgcagctgttctttgccttatttgtttgtttgttggttagtttgtagtttctaagaatctgctctgttcagctgtacagttccttcttctggagttaacctgtggcaaggattatgtttcacctgtcacaaaaatgagatctgtgccttcctctattataaagttagggcatgtgattcattcttcgaaatacttcaaaatgtactttggtatgtttttgtcttgaaaagaggttttctagctagaaattcggggcccagaaggtcaaggctccagagatccccttctcatcatccttcagttgtctgaggagacagaggatcacatgtgtcacagtgagtgctgattccccagaatctgcagtcttaagctcccctgctgacgcacacagccagttctctgcttcatattcatgtgacccactgtgaagtgacaggcagctgccaattctgtcatataagaagcagctctgcccatgcaactttgaaagttcctgcacttctccatagactgctccttcatggaaataaacacatcatcacactgtgggtgcctaagctaagtttgtttgcagtttgatgatgcccagctccttttcaactcagccttaattggcactttaagggccaggatgaggtttctctcaggccaagtcgagatttccagatttccttttgtccaaggctgaccagtttagaagttattcacatccttgttttagttctttccttcttgtcctggtacctcttcctttccaggattatttgcagagtctgtgatggcttacttggtgaccagacatggggtgagctactggtatagtctgattactttggcatctattctgaactggtcattggctgtacatgagtttttgtgctggtaaaggaatatactgggaagattggaaggcacagactgggaactaattctgagaagagaactgctgagttactgaaagaccttttggaccacccctaaatggagcatcttgatagatggcaaatccagtgtttcttaaacttgtccatgctgcccagagcccactgccttttatcagatgtgagacttcactgccacagtgtcatcccacagtttccttccctggacatttgataaagggaaaatcatttcttgtcctttaaggcagg

SEQ ID NO: 39215 - DNA, 2300 bp, Homo sapien
aagcgattctcctgcctcagcctcccgagtagctgggattacaggcatgtgccaccatgcccggctactttttgtatttttagtagagacggggtttcaccatgttggccaggctggtctcgaacccttgatctggtgatccacccacctcggcctcccaaagtgctgggatcacggccgctcctggccgtgagttgtatttttaaaaaataatcgtgaagttttattttaagcatagattacttacttcgaactagagctccataaatgtgatgtttagcgtccccctaatctccactcccatcactatcaaccagtcgtctagccatccaaaatgtattgaaagtgaatggggcttgaggagatcatgaaacttaattttcaccatagtgccttataaaaggtactaaaactgtaaagtttttgagttttctatctgccatgttactatcatttaaaagtaatgatttggctgggctcagtggctcacgcctataatcccaacactttgggaggccgtagtgggaggattggtttatcccaggagttcaagactagcctgggcaacacagggagaactgtctgtacaaaaaaataaataaattggccaggcatggtggtacacacttgtggtcctagcttctcaggaggctgaggtggcagtattgcttgagcccaggagatcaaggctgcagtgagccatgatggtgccactgcaccccaagttgggtgacagagcaagagtctgctaaaaaaaaaattatttaaaaaatggccttgggtacttttttttgagctagttgttctgcaaggtgtagctctcttgcacctattcaggtcctgagcccagtggcatggcaaacactctctgtgttccagaaccaggagcacccagatttcctagccaattaagagctctcagctttgggtctgtctgatgagctgacttgagacaaagatcttctgtttctaggaggacatgggttctaggtctctgtgtataagttggatgttatgtttgctttgagtgtgtttgatgtggtcctgcagtgtgtgtgctgtgatttatttgtaagaatttttggactaatagtcttcccagccaggtgtggtggttcacacctataatcctagcactttaggaggctaaggggggctaattgagctcaggagtttgagaccagcctgggcaacatggtgaaaccctgtctctgcaaaaaatacaaaaattagccgggtgtggtggtgcacctgtagttccagctactcaggaggctgaggcaggaggactgcttgaacctgggaggtcgaggctgcagtaagccgagatcgtgccagtgcactccggcctggttgataaagtgaggccctgtcaaaaaaaaaaatctgtttccaccattagactgtaatctctatgagggcagggaccctgtcatttctttgctcaccagttttatccctaatgcttggctcatagttagagctcagtatatatttattgaaataataattgtgtactatctgtgtctatgtgtattttagtagctacaatttgtttgtgaggctgaggtgacagacagctggtgttctccgaaaatgagaatcgtccgaatgatgtatatgatatatctatgtctacgtgttagtgttccggttgtgttttatgcacgtaatctgggaatttgtggaggcacttcagaaaatatcaaacacccacagtatatcagatcctgagttacgcccggggcaaaaacgacttcttctgcctgtcctgctaactttggggaggatctggaggtgagatttttaaacagggtagaaattatttatttttattttgtatattaagaaaaaaaattactttttggaggccttccggcaaaaaccagaaagcctgctaggcaaattctaaaaaagctgtaacactagggtagaaattattgatgccaagtttacacaaaagtggcgagggcgatgctagggcagggggcggagccccgctccagaagctacgccccggggcgccattattttttcattccggaaccttttatccccctcccgaccatgttttcctccggtctcttttgggcaacgagcacttccggaatctctcggcgtgtgagcttggttgtcctaccaaagccagcgtttcggctcgcgtgcgccggcctagtttgctcgcgtcctcacgcgctttgggtttcccggtctcatggccggcctgaccttatttgtgggccgcctcccgccctcggcccgcagtgagcagctggaggaactgttcagtcaggtggggc

SEQ ID NO: 39216 - DNA, 2300 bp, Homo sapien
attagcaggaaatgggcttttctatgaggaggattcaaagaaaatgtctccagtaggataacttttattaagcatatgagagaaaattagaggctgaatcccagtttgcagcctccgggcagcccctaatggacttgggggtgggggcaggttatgataacccctgggggtgcatctggagatgtcctttgcaatgctttgttaagggacctggaataaatcccagactttatcgttgatggccctgagagtagttcagttggtggcctgatttgattttacatgaattggcggggctctgtgataaggaagatgcctttctgaaaagcaacccattgcccatatggaccccagaaccattcatcattattcacttatcaaataggcatggaccatatccacaaagtgctaagctagctctcaattactgagacagaatctgccctaggtaactctttaagcaacaccagcacccgccccccgccgccccacaccctgcaactgccacaaccttcaagagaagaagagaagggatatagatggaaagggaattcagggtcatataaaaggctataacatggtgacaataatttttctgtctctgtggctcgtggtgacgaataagtaaggagactcttataaagcatccaccatcattcttggcacacagttggatgtttagattttgagggaaagttttaaatggtgcagggagacagaagtgtttcatgttctgatacttttaaattactatcattgtttgaagaaaacatgaagggatttagagactcaaaaccacatgaatgagtcagtagtacttcagttagtcactactacaacttaacaggttccatgaagtatacatagtgactgctcggttttcttggtcatcttcaacctgtgtcagcttttgcctgagctctcttactttctgtgaaggggcacgctcttttttctttgtttttccttttgagacagggtcttgctctgttgcccaggctggagtgtagcggtatgatcacagctcacggcaacctccacctcccaggctcaagcaatcctccagtctcagcctcccaaatagctgggactacaggtgtctgccaccataccccatcacgcccagataatttctttctttcttctttttttcttgcttgcttgcttgcttgcttgctgtttgtttgtttttattttatcttttgctatgttgcccaggctgttcttgaaccccggggctcaagcgatcagcctgcctcagcctcccaaagtgttagaattacaggcgtgaaccactgaacccagcctttgattttactgttctcctcacacctcttactagaaaccagttgtaatccacttctcacaagcagcttagctcaccattctttctggcagacatttctgaaacagtatttttgagagatcagttttagcgaaaagacatgtcacacagggattggcatttggcagttcaccggtgaagtgttggaggcactgctgtgtagcagtgcaactgttgaaaaccaccaggtggtggagagggccggcagggagacggttcgagtttctaccaagctgtgcaatcttgggcaaattcggtaattttctgtgtcttcatttaattgtctgcaaagtggcgacatacacagggttgcggtgaggactcatgagataaaggaagtagaattgtccattgtacttctacttagcaaacggtgggactcttattgcccggggtgccatcctggggcaggctgccatgtgtgcgcgtgtgtgcgcgcgccctctgacctgcgagtgtgtttcctggcgcgcgtgtggatgtgtgtgctgggccgccctgggagtgtgtgattgctctcgccaggctcacagcgaggcgcccgccgcggctgattgacagcgctgggtgaatgagcgcgcgtggaggcgcccggcaccgaggtggccgcggctccgcgctgctgtgagcgcctgcctgcccgcccgggtgtggggggaccgcgggtggcgggctgggtgggaggaggaggaggaggaggaggagagagggcgcgggagcgagggcgggcggacgggagggccgtcagagccggctgccgcggagccccggcgcgggcggcttcgccggggagcgaggctcggagccaggaggcggcgccgctgggagggagcgcggagtgcggagtgcggagcgcggggcctggccgcccgcctggtgagagcgctgcgggccggggctgggccgggggcggctcaggggcagcggggcggcgaggctgcggtctctggactag

SEQ ID NO: 39217 - DNA, 2300 bp, Homo sapien
agagtgggggttgagggtggattagcggagtctctggaaaagcacagcctaacccagggctgagcccagcagcttagagtgatgaggagcccaacacaggttaaagtgggaggtgtgtaggggagcaggagaggggagtggggccatgaagtctgtaatcactgggaaggtgaccctccccatgcctcagccaggcagcctaagaaggctggggcagatgtcacagtcaggtcacctgagatggtaaaatccagctgctctcctgggccctggctctggttgaatcctgaatagtactctagccattcctaactcatactgtaggggacagtgacccagagcaggtcctttagtgacccagtaacccagagagaccactgggctggtctctgctgtgtgccaatctctgctctgtgcctgcagttggcatgatagctctgttcttctgtggccagaaaggtaccccagagcagctctgaatggtcaggcactttctgtggctggtctcactgctctgctccacgtggccagtgaaaggtcctagtgctggtgctcctcaggacgctcccctggtcccccatgtggcccgggctccctgcatgagcccaagaatgctgaaggttcagaggtgcttcccacacatcgctggcaatccggccccagcctcccctctgcacacagatggaacagtctgtgttttcctggcagggtcccgggggcatcaatgggggaggctgggcatcccagggaacctcgtggcttggaggccaagcctcccctgggcctagctgccatcacactgctgagaagtaaataaacccagcctcccagggccacagccagccaccaagccagggaggggactgtgtcccacaccaccttattctcttctccccaagtgagctgtgggagccacaggaggacacagggaggaggctgtggagtctgggtggggggacccactcttggtctgggaagagcactggcagttctggtcccataagagggaaggggatctacttcctaccaccccacctttccccatgtgaacctatctgtacccagtcactgcccccatgtagaaatctggatcttgctgggcacccagggccaccaacttctgctttggggatttttcagaagttccctagcccctgttcttatttgtatgcacacttgtctaagccaggcttatgatcctcccccatcttcccaccgcaggaccctcccaaataacaaaccgctctctgagattaaaagccctggtaccaacaccattttctcagccggagatagggcggtgagccgaagcactgggccatgaatcagaagcagtacccctcccttcctttccgaactatagattttgcctctgtcaagggaatgggtacccaatacttgtcaattaatagattgtggagttaatgtgctcatttatgaaaaatgctttgtaaactgcagagggccccaaggccacccaaaggtcaaggagtgtcattatgaagaatgccggctccctaggatgtcgggatggggcatagcgatccaacctcaaagtccttagtgctgggtagctgagagcccagaccggtttctcagggctccgggccttgatcagggtccgcggaagagtattggggattggggaacggcagaaccgtgttagaggtgccctggggagaagggcaaggtgggtggccccggctgggggagaactcgggggtggggggggtggggggtgtgggggtgtgggggggtggggcctctgctggggggtcctgggtggctggatgtagagcggcggagggggcgtgtcccggcctgacccggtactctcccccgcagccccacacctcctacccggtccgggcttgcggggtcgcagcgccgctgcaggcagctgggggcgtgcgcgcggcgcggctgagccctttgtgcggcgcgggcggaggcggcggtttccgcgggaggggcgagaagggcgggaggggcgggaggacagggcggcgccctggcccgccctgccgctgccgcagcccccgcccccgcccccggcccgcccggcccgcggcagcagcgtggccgcggcgcggcgtcagcagtagcagcagcagcagcggcggcagcggcgggcggccgcgcgggtgtttatgtcgggtcgcggggtctcgcggcagcatggcggactacctgatcagcggcggcaccggctacgtgcccgaggatgggctcaccgcgcagcagctcttcgccagcgccgacggcctcacctacaagtaagcgccgggtctcgtacccct

SEQ ID NO: 39218 - DNA, 2300 bp, Homo sapien
tgtcattcttactgtcctggtaactttatttggatttgggttttctccgcagtttaacatgtttacagacagtcctttaaattttaggctatagctagttctaagtttcatctgttgagtaattgattggttttgactagtttctccttcagagtctttataaacacatatgggtaccttatctgcttatttccaaacagaaacctttggctttagggtagtattttttaaatggtgagtccacaatctattgggcccctcaccaaaaaagggacagaatacaaagtaccagaggacactgaatataatcaatgaattaattttagcttttttgttgttgttgagacagtctcactctgtcatccaggctagagtgcagtggcccgatctcgcttcagtgcaaacctcggcctcccgggttcaagctattctcatgcctcagcctcctgagtagctgggactacaggcgtgcaccaacatagctggcaatttttttttttttttggagacagagtctcactctgtcaccaggctggagtgcagtgtgcgatctcggctcactgcaatctccgccccccgggttcaagcgattctcctgcctcagcctcccaagtcgctgggactacaggcgcacaccaccatgcccagctaatttttgtgtttttagtagagacaaggtttcaccatgttggccaggatggtctcagtctcttgacctcgtgatccgtcagcctcagcctcccaaagtgctgggattacaggtgtgagccaccgtgcccagcctaattttgtattttttagtagacatggagtttcgccatgttggccaggctggtctggaactcctgacctcaggtgatctgaccgcctcagcctcccgaagtgttgagattacaggcataagccactgcgcccaacctaaattttaaaaaacttaaataaaaaaagaatcctgattctggggagtgggtgtgtatgtgcataggaagaggcacgatgaaggataaagtccaagatcttactgttgcataaattcagcttcctttgtgaaatcgttgctgaaagtctgacccctaatacatcttagcactcctcaatcacgcagtgtttaccatttgttccctcagacttgtcagacaaaagtccagatgcgccgggcgcggtggctcacgcctgtaatcccagcattttgggaggccgaggcgggcggatcacaaggtcagaagatcgagaccatcctggctaacacggtgaaaccccgtctgtactaaaaatacaaaaaattagctgggcgtggtggcgggcgcctgtagtcccagctactctggaggctgcgccaggagaatggcgtgaacccgggaggcggagcttgcagtgagccgagatcgcgccactgcactccagcctgggcgacagagcgagactccgtctcaaataaaataaaaaataaataacataacataaaataaaataaaataaaatttccagattcttctcgacttaaagatggggctacctcagggtaaatccatctgtaaggttgaaaaatcttaagtcaaccattgtaagtcgaggaccatctgtatatggcatgagaattatcagctgtttattttcatctactttgtctcctgaaataaattgcctgagggcaaggactcttacatttctttgccatttttgctaggtgttcaatcaccgttcacaatgataacagtaggaaaaagtgcgccttctagtaagtggacaaacaagtttgagtacactgctctgccccactcccttgttacggggtaacataacaaggtaaagtacctccacaacgaggcaagactaggtcctgttccttaaggagcccgcagccttgtctgttctgttcgttccctggcagattacaggctgtggagatccctctccccgctctctaacgtggagtcggctgagcacgactctctcgccccagcgcgggaggtctgcggtctgcgggtatgaggcgctccaggggacctggcatcgtcggcgtgcaagagaggagcggacctgagacgcaaggagaagccctgcctctggagtccagctcctttcctcttctggttttcctcggaaggggccaggagacactggaaggtccggacggcagggaaggggacggggttctttccagtcccacccgtgtagggacacctctccccctcatcccccgatgtaccctcgctgaatctgggatgggagagacgaaccgagtctaggcatctgcgtagcagcgccggggagagcggggagcccagggcggagcccag

SEQ ID NO: 39219 - DNA, 2300 bp, Homo sapien
cattttacagataaggaaactaaagttcaaaggggtcagttagcctggccaaggtgttgaaggcaggactaaatcctgatgcaggtagctacatttgtagctgacagaatggtaaagcatagagctgccctcacccaaacccttcttatttccaactggcatgacctttagacaatggcagggaatatggggagaaagaattgttggagaggtgcccatcccttcttccagctgtgtgaagtataaatttagaactcaaactaagtagaactcaaatggtcattgtagaattcctgcattcattcagcaagcctaggctgctaatgagcaaaacccctcactgggagttttgtagttgatgatacagataatgttaagattcatagaatgttttttatgtgccaggcattgttctaagcgctttatatggattaattcatttaatatcaggttaagactgttatgatctcacagaacagctgaggaaacagaactacaagaaggttaaagggttcgcccaaggccttcacctggcaaagtagtggcgtttggatctggcagtgatttcgcagcttgagacctatttaataacagtgtgagagaagggtcacacagtcaagcaaaaaaacagacgaaactctggtatagcgaaggaccaaaagttctgcgggctgagcaggaaagttggctccaaatgtctgcctgcctgccagcagacctccagccccaaccttctgctttcccggcttccccaccccctcattcccgacagaccacagccagccagccaggaaaggaggggaaaggtcgcagtggggatggctcctcccttcccgtcttagagcccttcttaagcagagcccgccgagctcgctgagatgtggaaagtcacagggttctttcccatccggcacgggcacttgacccgggtacacggaaccgccagttctaaagccaccagcggccttcccttccacggcgtgtacaccccttcccgggggtcctccccattcccagtgtctctccgggactctactttctgagatcccccgttgcgtgctctcaagacagaccgcacagtcttggctgggtgggttcgggggtgattagtaaggcagcctagccccccaaatctggacataaggctggtctgtgacctcctggctctttagttcaagccgaaagcacccttaaaaatcatctagcggccgggcgcggtggctcacgcctgtagccccagcactttgggaggcagaggtgggaggatggcttgagatcaggagttcgagaccagcctgggcaacatagcgagactgtctctatttaaaaaaaaaaaagaagaagaagaagaaaaatcatctagtggccaatgtcttcattacagatgagaaaaccgaggcccatttaaataccaagtgacttgcccatatgcagttaggatcccacaccagggccaggagtatttcacgttttctgaagcgacacgacaaactctcatagaaagcagagcttgcagagcttaatatgttgcacaagggcctcaccattccagagataccgatggcaactgaaactcgggatttggaatcttggtacagctatgaagtgaaacaaaaccagctcttcagtccttgaaatgaagaaaataacgagtggggtaggggtctggtgccctctgacaatttagtgcacccgaaatctctggggaagaacccacccttcacggcggggcttcacggacacgaaggccatcggtgtttttcacctactggggagaagggatatgtgctctctgactccttcaaatgttttctacagcagagatggcagtcgagattaatacacacgcctcgtctcactccagaacacaatgactcaaaaccgcacgacgtgtacttttggaaacagctccgcgggagagcacccgggacaatccccaaaccccgttgcccgcggggtggggccgcggacgtgcgccacgtcgtgtgcgtcccgggcgtgcgtgcggcctccagtgcgcgtgcgcgtaccctcctggggcgtgctcgcggctataaggggcggaggctgggcggcgttgctctgcgctctgcggctgacggcgcttttgtctccggtgagttttgtggcgggaagcttctgcgctggtgcttagtaaccgactttcctccggactcctgcacgacctgctcctacagccggcgatccactcccggctgttcccccggaggtgagcggccctgtgggcttccccggctccccacccccatcgctagagtgctcgccgcgctagcagcctc

SEQ ID NO: 39220 - DNA, 2300 bp, Homo sapien
cggatcatgaggtcaggagattgagaccatcctggccaacatggtgaaaacccatctctactaaaaatacaaaaaattagccgggcatggtggcgggtgcctgtagtcccagctactcgggaggctgaggcaggagaatggcgtgaacccgggaagtagggagcttgcagtgagccgagatcacgccactacactccagcctgggagacagtgcgagactccgtctcaaaaataaataaataaataaataaataaaaataaaaaataaaattaagtttaggatactttagcacatttcatagaaaaaaggccaaagctgtttgacatttaaaatgtctccattggaactaatatagtaaattcaagtgaagacaatgagctgtctgcaagaaaatatccagtgggactgttgattgggaacactaacagcttttagtgaggggagaataaaagcccacagatgagaaaacaagatgccagaaataaatgtaaatcaaccaccatatctgcaaacagctggccttgagaaaagataaaaattccttgtacttgtttctgggtatggagcttgtgttcaaaatgtttccaaagaccacaagaatggcaaaagcatattgtcttcaaatgaagtacaacttctttactatctttttgattaacttgtgtatttttcttcctgattagagaggcttagagcttgttcccatttctttggaggaaaagtatagaatcattcattgctccctgtagttttacctacagaaagaatttacaatggaataaacaattactggctgggcacggtggctcacacctgtaatcccaacactttgggagaccgaggtgggcagatcatttgaggtcaggagttcaggaccagcccaggcaacatggtgaaaccccatctctactaaaaatacaaaaattagccgagtgtggtagcgcgcacctgtaatcccggctactcaggaggctgaggcaggagaatcacctgagcccaggacatggaggttataacgagctgagatccagctactgcactccagcctgggaaacagagcaagactccgtctcaaaaaaaaaaaaaaaaaagtactaattaccaatgtgctatgtctagcactgcactaaccctttccttttttaaaaaaattcatctttccctttattctgacattatgacattaaataaagtccaagagatattgggctggtccttgtttggtctctgccctttccttcttttccaagtggtattcatcatgcttctcttggaagtcttctcaaataaccttatgtctataacatactttcttctagattcttttgagagtctatttgtattagatctagaaatagaaatgtaaggctgaaatgtattactatgacaaactgtatgtgtgtattacaatcttaattgtgctaataaggataattataataaatataatatggatgattcaaaaaggttagatggttataattaaaaaaaaattgtccttggatattccatttgatttgctaagcctcgtgttctctaatttcatatatccatctcccccaccccaaccaaaatatatatacacactgtgtatacatatacacccacactatgaagagctgactatagaagctggaaattgccctgtttctttccgctgcttgctaccttcttcagttctggacatcggctccgcagtggaactaggtagcctcaactcttataatgattcaagattattcctgttttacaacttgagggaagctggggaacctgttaagaggatcccagcaatgaactgggcctcaagtggaatgtctcccactttctgcctaacctgcacgtccatcagcacctcatcaatgagatacgactcctccggggagaatttccccctgcctggtccccttccctagagagcccttcgccaaccctgggaaagccccaaacgacagctcccgagcgccacccggaccagactccaggaccgccctgtcccgccaccctttttcccgcccagactccacgtcttctgaaagagggcgtggcccgcaggaagttctcgcgttacggaaagtgaagtgtttccggctccggtgtcatggccggctcctaccctgaaggtgcacctgcaatcctcgccgataagaggcagcagttcggaagccggttcctgagcgatccggcgcgcgtcttccaccacaatgcctggtaatcaccctgccccctcgcccggcctgtcgctggccgtctgtcccgccgcctcggagcattccgaaaagcccctgaccgccggcca

SEQ ID NO: 39221 - DNA, 2300 bp, Homo sapien
tgagcaattggtgggggtgggggttattactttggccaccacagtattttatgccaggtactcagctaagcactggtgaattaagcatgaataacacacactccctaatctccatccattcatgggaggagcacctcacctgccatgctcctgagaatctggggagtcaaagaagtcttccatgaggaggtgatgccaaagcggacaagtgacagagtcgaagctagctaggaagagagtagaggtttaaggggaagcgtattataagcagaggatatcacccacttcagagactcccagaggagaaagagtgtgtgttcaaagggcagatgaggctcagttggactccatagcagatgaaatggagaggggcaagcaatgaggctgccttgcaaggcagggcagagcaggggctgttgaagggtttggacttaatccctgaggcaaggagaagtgatgtaaatgggggagtaacatgatgagattaatggattagagacatggctcaggctgctgtagagaaggcaccagggagagcagatggctcaatgggtgtgtaggagacctctcactgagtttagggagaggtttttaaaacagaagaagtttgagtaatttaaatgatgatgggaaggagctaaaagtaggggataggttaaagatacaggaaagtgggaggaagaactgacaagtgaggttccagagagggcaggagaagaggagattcccatagggggattaacactttcttttcttttttctttctaagacagggtctcactctgtcgtccaggctggagtgcagtggcacaatcttggctcactgtagtgtaggcttcccaggctcaagggattctcccaccccagactcccaagtagctggaactacgggtgtgcaccaccaccacacctggctaatgtttctttttttggtagacacagagtctcactattttgcgctgattggtctccaactcctggcctcaagcgatcctcctgcctaggcttcccaaattgctgggattacaggcatgagccataatgcctggcctctgctagttctgtattctctagagttgtctttactttgtgctagcgtgtccctcattgtgctaatcctctgtaaaaattaatacctttttttcttttcgagatggagtttcactcttgttgcccaggctggagtgcaatggcgctatctcggctcagcgcaacctccacctgccgggttcaagcgattctcctgcctcagcctcccgagtaattgggattacaggcatgtgccaccatgcccagctaattttgtatttttagtagagatggggtttctccatgctggtcaggctggtctcaaactcctgacctcaggtgatctgccttggcctcccaaagtgctgggattacaggcatgagccattgtgcctggccaaaattaatactttttatattaaatttacatatatatacatttttttctttttgataccgggtctcacactgtcacccaggctggagtacagtggcataacctctgctcactgcagcctccacctgccaggctcaagcaattctcctgcctcagcctcccgagtagctgggattacaggtaagtgccaccacacccagctgatttttgtgttttttgtagagacgaggtttcgccatgtttcccagactgttctcaaactcctgagctcaaagcagtccacccaccttggcctcccaaagtgctgggattacaggtgtgagccaccttgctcattctagtttaaactttggagtggtttgtgtctcctgattggactcctgcaaatacagaattgatgctaggaagggtaccaggagatagacgcacacagatgggatttgggaataggtttggttatccaaggagcagtgctgagctccttgctaatgggatatgggatgctggtgatttccagtaagtgacctcaaaattactcaggctaccacatactgttgattgtgatgaaatgccagttgaagcacctgtcctgcgagcttaggggtgctacaagttgaccactgcagcagtaaagatgactctgaagaatggcatgggatggatcctttcgaatgcacttgagcagcggtctccaaccacagggccacagagctggaggtgagcagcaggcgagtgaagggaaacttcatctgtatttctagcccctcccatcgcttgcatgaccacctgagctccatgtcctgtcagatcagcagcagcattattctcatagaagcacaaactgttgtgaagtgtgcatgtgagggatctaggt

SEQ ID NO: 39222 - DNA, 2300 bp, Homo sapien
tgactcaagctaccacttactgttgattgtgacgaaatgccagctgaggcacatgccttgggagctaagtggttgctgcacttgaccactgtgaagactggtgtgggaagggtcgttttggatgcacttgagcaggggtccccaacccctgagccatggagccacaaggaaccacacagcaggaggtgagtggtgtcgagtgagggagtgagggaagcttcgtctgtatttacagccactcccctttgctcacattcccgcctgagctccaccttctcagatcagcagcagcattagattctcataggagaacgcaccctgttgtgaactgtgcatgtgagagatctaggttgcgctgtccttatgagaatctaatacctattgatctgtcactttctcccatcacgctcaggtgggaccatccagttgcaggaaaacaagcttaagacgcccactgattctacattatggtgagttctataattattttattatatattacagtgtaataatggaaataaagtgcctaataaatgcaaatgtgcttacatcttttggcccagctcctacctcccggcagcctctccaggcccagaactttctccaatcagcctctacagaccaagctcatgactcacaatggcctatttaggcccataccctacgtcacggcagtctccgcagatgagcctactgccccacaacagcctccacaggcacagctccatcgttacaatggcctctttagacccagctcctgcctcccagccttctctccaggccctgaactttctcaagtcgacctcaccaggcccagctcatgcttctttgcagcctctccaggcccagctcctgcatcttggtggcccctccaggcccagcctctgcctcccgtcggcctctacagtcccaacatctgcctcacagcagattcttcacgcccagcatctgcctcactgtggaccccccaagccaagctcccaacctttcagcagcttctacacacccagctcctgccacccagtggcctctttaggccaagctcatgcttcacaagggcctttccaggcccaacttttgtctcatggcaaccttccctggccagattcctgcctgtctcccagcagcctagacaggcccagggcctctctacatgcagcttatgcctcacggtggcctctccaggcccaactcctgtcccaggacgtcatctccgggcccaaaacttactcaagtcagactctgtagtcccaactgctgcctcctggtggcctatgaaggcccaaaatctcctcaagttgacctttccaggcccagctcctgcctcctgtcagcgtctacaggcccaacctctacgtcatgggggcttctccaggcccacctcttcctcttggctgggtctacaggcacaactgctgcctcacaacagccttttttggcccagttcctgtccagctcatggcggccaatgtaggcccaaaacttcctcaagtcaaactctccaggcccaccttctgcttcccagtggcatgaacaggcccagctttgacttgagaacagcctctgcaggccctgctcttgcctcccaggggctttttccaggcccagctcttgcctcatggcagctgccccaggccaaatttctgcctgcctgccagcagcctcaacaggcatagctcctccctcacagtggcccatttaggcccaactcatgactgtcgggccatttccaggcctagtgcctgcctcgtggctgactcttgaagcccaaaacttcctcaaatcagccttttgcccaacttctgtctactgtcggactctacaggccagcctctgcctcacagtggaccctccagacccagatggtgtctcactgtggcatcctcagtcgaagctcctgcctttcggcagcctctccaggcccagctcctcctgcctcccagtggcctctttcggcccagcccagctcatgcctcccggcggccttcccaagccccgcttttgactttcggtggcctctgcaggcctcgacaaggcccagcctcctgcctcccgaaggcctgcacaggcccagcctctgcctcacagcggactctccacgcccagctagctgtcgcctcattgcggcctcccgagtccaaagctcctgcctctcggccgcttcggcaggcccagctcccacctgccagtggcctcttcaggcccatggggctcgttcctcacaacggcctttccaggcccagtttttcccttccggcggcctctccgggcccagaacctcctcaagtcggcctctccag

SEQ ID NO: 39223 - DNA, 2300 bp, Homo sapien
gaaccactgcacctagccctttttctctttttaaatatacaattttaggatcccttttttttttttttttgagatgggagtctcattctgtcacccaagctggagcgcagtggcacaatctctgctcactgcaacctctgccttctggactcaagtgatcctcccacctcagcctcccaaatagctgggaccacagggcgtgccaccacacccgggtaatttttgtattttttgtagagacgaggttttaccatgttgcccaggctgatcttgaactcctaagttcaaacaatccacccaccttggcctcctgaagtgctgggattacaggcgtgagccactgcacctggccttataatactctttattgtaaatttcatatgaccagttgattcttaccaaaagcttttgttgatttttgtcaaacgctgatatttctagccaacctatgattgcaactgacaagcaagtatagttctgacatgaatattggttgatattttgatttacattaatgagcaaggcaaaagtgaaataacaaagttgtgtattggaactttactcatttgtcaatgacgtgggcaacttcttcgctaaattaggtaagtcttcaaatactggaaggctattttctcagatttttctatgcccaaaatataatagctacagacacatctttaagtttaatctgcataattaacattttctctatcactttagtttagacaatcaacagaacaataaatcaaaccctgatttgtagcacttgctgatttcaagctagctaacaagatgaagttcctgaacacaccctgggaagagatatgcagcagcccaccactgtatactgtttcttttcttttcttttttttgagacagagtcttgctttgtcgcttaggctggagtgcagtggcaccatcttggctcatcacaacctccacctcccagattcaagcgatcgccctgccccagcctcccaagtagctggactacaggtacccacaccacacccggctaatttttgtagttttagttgagacggggtttcacccgttgaccaggctagtctcgaacacctgacctcaggcgatccacccacctcggcctcccaaagtgctgggattacagtcatgagccaccaagcccagccaagtttatatcatttaagttttaaaggctgggcttggtggctcatgactgtaatcccagcactttgggaggccgaggtgggtggatcgcctgaggtcaggtgttccagaccagcctgaccaacatggagaaaccctgtctctactaaaaatacaaaattatccgggtgtggtggtgcatgcctgtaatcccagctactcgggaggctgaggcaggagaattgcttgaagatgggaggcggaggttgtggtgagccgagatcacgccactgcactctagcctgggcaacaagagcaaaactctgtctcaaaaaaaaaaaaaaaaaagttttaataattgctgtgtttaacaactggtttgtagcattcctgaaaatgtaacaaccagctctcgtgacctgttttggtctggctccagcatacaactgtgccactgccttctcctttgcccactgtttccaaataaataagcttctcagtttagttaacaggtgtccatttctttaaaaaaaaaaaaaaatctccttttctcccatgagatggggtagggaagatgaactccctttttcctatccttagacttccctgggcaggtgaacaagtcccatggaagtttggtgaggggcttcaaggggagccaagaggattaaagcctgtatgttcccgagagccttccttgcatctggccagctcactgctgccttggcataactttgggagggtcattttttccatgtggggtaaggctgaatgtttacaaagtggaataggctgcattactgctggtttgtagttggtggaaagagggagaaaagagcctggcacatcctctgtccttcctcttcttttttttttcccttttctgttgtcaccatcacattccttgatgtcattcctgccattgtgagctgacaggccctcccagccctggtggacagcccgtaagtaaatggggaggaaatgctggggaggtgggggcagatcacatcaacatcctggcattgggctgggtcggcgtggagccccagaaatgttcccaagcccattcttaccaagaaccaatgagtaaaatcaggggcctcccacctgaggtcagggaaccaggccctggagtggaacttggggtggaaaatggccttctttgtcaactg

SEQ ID NO: 39224 - DNA, 2300 bp, Homo sapien
gatgaggactcaggggcctgtctgtagcctttgtcagaggacatggggtatgctctctcctaaaagtttttttttttaaccattttattgaggtatgattgagatgtaaaaagctgtatatatttaatgtatacaacttgatgaatgtgggttaggtatatacctgtgaagccaaccttactaccatcaaggccatagacatacccatcacctcccgaattttccttctgccctattattattattattgtgtgtatgtatgtgtgtgtgtgtgtgtgtgtgtgtgtgtgaagaatgttcaatataagatctaccctcttgggaaattttaactatatagtacagcattgttagtggtaggcatgatgcctcatagtaaatctctagaactcattcatctatcctacaactgaaactttgtactctttgaccatcatctcctcatcttcacctccctacccagcccctggcaatcactgttctacactctgcttctatgagtttgactaatttcttttctttgagaaagggtctttctctgtcacccaggctggagtacagtgtggcaccatcatggctcactgcagcctcaatctcctggcttcaagcaatcctcccacctcagcctgggaacacaggccctgctaatttttattattactatattttatttttagagatggggtctcactatgttgcccaggctagtcttgaactcctgggttcaaatgatcctcccgccttggcctcccaaagtactgggattacagatgtgagcaccctgcccggccaaatatttttgattctgtgtataagtgacatcatacagtatttgtctttttgtgtctggtttatttcattaggtccatgcatgctcttgcctatggcaggatttcctttcttcctttctttcttttccttccttccttcctttcttgctttttcttccttccttccttcctttccttccttcccttcccttctcccttccttacttccttcctcctttatttctctctctctctttctccttcctttctctccttcttttcttttgttttcttttatttccctctttccaggatctctgtggcctaggcaagagtgcaatggtatgtcatggctcactgcagccttgctttcccaggctcaagcgatccttttgcctcagcctctcaggtagctggggctacaggcacatgccactgcacctggacaattttttttttttttttttttaatttttagtagagacaagttctcactatgttgcccaggctgatctcaaactcctgagctcaaacagttctcccacctcggcctctgaaagtgttgggattataggtgtgagtcattgcaccgggccaatttctttcttttttaaggctgagtgtctcctgaaaaattttaaaaagctctcttttctatttggaggtgtatcctattctcatgaggtaatccttcgtcaaatcagcctgaagaactgaacaatggtgaacccagctgggcttttctgtctctaatgagacagtgctgtgactgataggggatttctgaaggtttttcttgaattgttttcttctactcttgaagggttttcttgaattgttttcctgagctgatttctcactccctcagactgctcttctccaatttggggagagggagggagtaatttgtgagaacacggacaatattattaattagcattctttattatcaggctatctccagattttatgtcttttctaccctttggccacctgacttaacctctttctttgttaggttatcaatagttaatcttttgttttttaaataaactacatacttaatgcgtatggcaaggggagtcattctgtgacatagcttcttcccacgggttgctaattgtccatcaatatccctcatccttaaataataaataattctccagttgtaggtgggctcatggccacccagtgaaaagctacatttcccagcttcccttgtatctgggtgtggccctgtgtttgaattccgaccaatgggatgtgagcaaaagtgattatgccattttcaggtcatagccttaaaaggaatgagtgtgaactccccattcttttcccccttctcaccggccaggatgcagacataatgatggcaggagctggagcagccacctgaggacccagagctcaaagccacatgttgagaagggcagagataactgtatccactctggactgctgacctttgaactattatgtaagagaaaatcaaaattctattttaagtcacaatactttggggtctttgac

SEQ ID NO: 39225 - DNA, 2300 bp, Homo sapien
actccagcctgggccacagagtgagaccttatttcaaaaagaaaaaaaagaaagaaacagaatgggtgttgggacagacaactaatagacaactaagtatctgtcacatggtttctaaaaagattcaatatgcttgtttttgaggtttgcaggggaagtaggaaggggtgcacatcatttttttgtttaatagagacaggatctcattctctcgtgcaggcttgagtgcagtggcaagatcacagctcactgtagccttgaactcctgtcctagagtgatcctcccaggagcctaggcttcccaaagcactagaattacagatgtgagccaccttaaagcaccatttacaaaactgcttagcatcttgtttagagctaaaaaatcctttgctcacaatcagctttctagactgggcacccaagccttcttcctctgagggttgaacaccatagaagtgggcttaacagacttgtatggaaaagagaagaagtcatctccccaactgactcttggatgtctcagtggccaagtatactcaaattgtatatctaaaccaatgagctttattgttgtggttaagctttaactgtgaacagcaacgtatcaatttattaattactacgcttttgtgctgtgtgttccctttctaggttatttccagggaaatgcaaaccaaaggatgtggtctctgatctaatccttagagaatgtgaccatgaagacacttttcctacctggtaaacaaaagataatgagaaaagtgaggttggaagttggtttactgagccaggagctataacaggtgctggagcaggggtgtgatctgaatgaccagagggaaggactgatggaattggatggtgagagcctccaggccctttaggcttctccctgactttataatgaaatacaaaagtcagcctccatgcttgtcctttgtgtgtaatgattgtcaaactctgtctatatgtgttacatttgaccttgatggttaattcattatgtaataagttcagaatttgggacagacacagtggctcatgcctgtaatcccagcactttgggaggtcgaggtgggcggatcatctgaggtcaggagttcgagaccagcctgaccaacatggagaaaccctgtctctactaaaaatacaaaaaattagccaggcgtgatggcacatgcctgtaatcccagctactcgggaggctgaggcaggagaatcgcttgaactcgggaggcagaggttgtggtgagccgagatcgcgcacattgtactccagcctgagcaacaagagcgagactccatctcaaaaaaaaaaaaaatttagaatttggtccaaattagaaaacagtttctcccaggaatggccttgaatagtggtcagcctgcttggttctttcttcctgacctagcagcccatgatttgggctctttcctcctctggttcaggggtgagggatgctgtcactctccaagagggggaacagcttgggacctagcagagctgctcatcggggttctattcctcccagccagcgccctgacaaagccagcctctggataagaaactaattacttctcctgcttcttcagtttgacctcctaagggaagtaagtcctgcagaagtaaccagcctgccgcggcagaatgcagagcaggcaccaactgccctgcaactgcttccataacctgcagatccaccagggtgtcgggggcccacatgctgcaaagcttaggaagatggggttttcaatggacatgcagcttttaaagttgtgtgagataggttgcattcagagtaaggaagggttgaaaggcaggaagggcattttcctcttagcagtggaaggatcttcctgacagccctccttgcttgctttctgcctggctcactgctttctcagcaagttccgggaggactatgtcctggggttccgaaaagggctggggaatgtccaggcacggataaggcacacaagctctctggaggaaaagggaggctcctttgcacttccccttcctgcaggtctgtcctggtttttcatgatgtcatccattcatcattgtgagctgactggtggtcccagggcttggccagctgcccaaggccaggaggggagacagagatcccaggacaaatgtgcagcaggcccctgagcatgtgtagaaatgttgtcatcatttccacatagaaagacttggaggaaatcaaagaagacagtaaaagtcacaagatcctatccaaccttcccttccctgaatgcctgggaagaattcaggggcctcttgcctgtggatg

SEQ ID NO: 39226 - DNA, 2300 bp, Homo sapien
acagcctgggcgacaaaagcaaaactccatctcaaaaaaaaagaaaaacaaaacaaaacaaacaaacaaaaaaactcttgtatataaaggttcatttccatttccctttcccttgctaggccaggcccttctccattagggaacctcagggttggagggccctatctctggcaccctcactacctgtttagcctttactaggacaattccaggatggatggcgcaccattaagctgagttccttgaggacagggacgatgtcctgtttactttgggttcaccagcacataacacagtgcctgaccttaaggagttgttatttttattttttaagagaaagggtcttgctctgttgcccaggctggagtgaagtggtacagtcatagttcattgcagcctcaacctcctgggctcaagcaactagcttgaactacatgtgtgtgccaccacacccagctaatttttagtttttgtttttttgtagagatagggggaggaagggtctcgttattttgcccaggctggtctcaaactcctggcctcaagtgatccttaaggaggtattttaaaaactgttttcgaaataatgcctcctgaggtagcctgttttattgttaatacccattagatggcttccctgtaggcacaagcttagaaactttcccaggaagacccacagttcccactgtcttcagttcaggttcctcaaattgacaagatcttccattacctctccaaacttactatccatgcttttctttcattgtttccccccacccctttttttaaccttcctcatttgctacctggcctgagaatttacctcccactctgccctccacttgtccttattcctattactcttcttgctgaatagtccatttgggacttccttagtccagccttagtcatatcttcctctgaagccttccctgactaccaccaagggtcactgacactcctttgaatgccagaaggattagttgtaaacctttcacgttgacagtaactagcttgctttcatgagcttaactgtttcatgagtttacaacttgtctcaatttgattttaaactacagaggctttatgtgctaagaatgccacaggtttacattccatttgtgttgaagctatagtagcctttatttgatatttgttttaatttcatgacatgaaattaaattttcagggacatgcaacgggttcggcccattcccttcacttaacattactgagctgggcagtaagctcagagttgcagatataaagatgaatagacagatacctacccaggagcttactctagaagaggacagatggataagctacattttatagcagaatttggcaaagtgtactgaagctataaacagctatgatggtaaataaggtaagaattatgcttagtgaggtcagggaaggcttctagagctaacatctgaactgggacttctattggcaaggcagaaaatcaggaaaacgcacttattcctggcagaggaagcctcttgatcaaaaatcttaagagatgaaaaaggaccggttgttaggaaacagatgatggtgcccagagcgcaagatgagggggagtgttgggagatggagctaaaagatacactggtgccaaagactgaagagcctcctgtagatagcgcagggcgcagcgctgaagggaaagaaaaagttgggattgttcaataaagttggtgactgattcagtcggattaattccgccctggtggtcttgtgggaatgaagataactagcaggatagtctaagaagccctgtggaagcagagtcatgagctgtgaatggggacgtggcggccacacggccgcgcccacgccacccgcagtacggggctggggctggggctggggctggagcccgccgtcccaacaatcccggggacgagagttgggcgggaatccgctccacgcaactcggcgcggtcccggggacgtggcgctttccagccaatcccggctatgcgattgttagaccaatggctactcggggacgctatgcgacagcggcgggtttgctgatgattggtcgggaggccgccggcgaggcggatgagggcggggtgcggacccgcttccggttgggcggtgcttgcgcgcgtgagctgagccggtgggtgagcggcggccacggcatcctgtgctgtgggggctacgaggaaaggtaagtacggtgatgcccagccccttcaccactgcctcatctttattcgctttctttctgtccccggtcttgttcttggcgcggcaggggactgcctcactcggtgccg

SEQ ID NO: 39227 - DNA, 2300 bp, Homo sapien
ttttaaaatatcttcatgtctgttatcttaatttggtttatacaggaacgcagattgaaaaagaattttattttctgcagttaacgccacattttttcagcttaaaaaactaaatttcacttttctatattcttatatagagactagataactgctgcttgtgtagctcgatgtcataacagatgggtagttccaaattcaatttggttgtaatctaagggtttttttttttgtatacctttgtcaagttattattgacataaagtgaactgtatgtatttaagtgcataattgatgagttttgacgtatgtatttaccagtgaaaccaccactgcaatcacgataatgagcatatccattacccccccaacatttcctcatgtcccttggtaatccttctcattctcgccattcccccgtccctaggcaatcactcatctgttttctgtgactctaagttagtttgcattttctagaattttacgtaaatggggatgaacaatacctgtcactcttggtagatttctgcgttgactgaaaaaaaacagaatgtgaccttcaaagtggtggcattctattgcttgaatccaagtgtccattatgtgaggtagaaggcctttgatttctatctttttaatgagatcctaatgtttaataaaagtagcaataactgacatttgttgaaagccaactatgtgccaggcattgttctaagcacttagatatattttctcatttaaaccttacaacaatcctatgaagccggcaccattgctagctccattttacagataaaagagaccaagacacaggccaaacagctagaaaatggtagagttcaaactcaggcagtatgggacttgagagccaccactgccttccagatgtaactagaaaattcaagccttctagtagccttaataccaatagtgaagcataacagtgagttacatagttcaggagccagagttccatgtgaacttggagctgactctgagatctgatgcctggagctgtagcccaaaactaaatgtctttgtactgctgcagttttacctgtgtcatcaattatttcttccttgcatggttttatctttattggaaattgatttcccaccccacacattttcatgttttctgaaagtcttttaagatttgacctaaatttttgttttctagatgatccagatcctgatgatggatttaactataaacagatgatggttagagatgagcggaggtttaaaatggcagacaaggatggagacctcattgccaccaaggaggagttcacagctttcctgcaccctgaggagtatgactacatgaaagatatagtagtacaggtgggtgagatgaaggattctgaacagggactcagtttctctttttgtggcttattctgtctttcccctttagccttatatagcatatcttatatatatatatgctatatagcatatcactgtatatgctatataagtattggccagattcagaatccaaggtctgtcactgtttttctgtgaccttgatcaaggtgccttgggcattctgtttagtatgataataccttctgtcatataatgtattttgccatttcattggtagcttcatattgtaagaatggggggaaatcccattatttaaaatatcccatgaccaatagtcagacattgagtaataacagtgatactaaagaactctcacagaaggcagttactgacaacatagactatctatagctaaacacataatcactggtcacatctcctgttagtgtgactttagcatgactaaggctaccaggtagatcatcatgggcttgatgggatagtttgtcattaagcagtgtcagtgttctgtcaggaagactcagttattttagattgaagcataggaaattgctcatgttttaccatttcttggctagaaatggttttaaccatacagacacacatgcatacatacatacatacatacatacatgtacaagtgtgtttaatgaataataaatgtttacctaaactagatactttactttcttctggcaaattcagagaccaacttaatagtctcttcttattctttcctgtttaggaaacaatggaagatatagataagaatgctgatggtttcattgatctagaagagtatattggtaagtctctgcttttagtgtttttcttagaaaagctgagaagctttgaaaggtgtatttgctggctgggcacagtggctcatgcctgtaatcccaacactgggaggccgaggcgggcagatcacctgaggtcaggag

SEQ ID NO: 39228 - DNA, 2300 bp, Homo sapien
actcatattttcctgtgggttttttttttctttcacacgccttttaatttttcattgtatattagacattgtagatagtgaactttagaaactgggttatcttccattgaggggtgttgatttttgttctaataagcaattaacttactagttgatcaccttgaacccgctgaggcttggttttatcttttgctagtatgagtcagctttggctttgaccttactctcagaacaaatatttagtcctgggatatagattttagctctatggtgtggccttttgggagtttcaagtagaaagccctaagtgtttacccagaccctctgacttgggattcaaattcaaactctttctctgctacagtgggtaacagtcaaaatctgcttagctctttcagacctccagtggttgtcttttactgggctcttggaaattcctccatccacagttcagcagtcagcctatgatttgaggggagtttatatgcagatttaaagactttgccttctgtggcttctttcattccaggaaatccaccttcagctgttctggagtcccaaactgtcctctgtctcctgtcctctgtcctctgactcttcaagccaaaaaaggctggggctttctgctcaagttctagctatcctgtgccatttatactcgggagtacactcagggaaaaaaaaaaacaacaatgtagatggttcttttcattgaagagttgagttcctttcagtttctgcctgctttggatactttaggtgttttcaaaaagttgtttttcatattgtgtccagtttacaatttttttgcctaagggggcattcatctaataaactattctgccattactggaccatcctttcacttttaaacttacttatacctaaagtgtgtcacttttaactcatctatatatatagtctcgctctgtcccacaggctggagtgcagtggcgtgatctcggctcactgcaggctccgcctcccgggttcacgccattctcctgcctcagcctcccaagtagctgggactacaggcgcccaccaccacacccagctaattttttgtatttttagtagagacggggtttcaccgttagccaggatggtctcgatctcctgaccttgtgatccacccatctcagcctcccaaagtgctgggattacaggcttgagccaccacgcccggccaactcatctatatatttatgatctgctgaggtggaaaagattcattcataaagcctaaagtgtagtactgagtacaagtgcaggtggaacttaaagcagagttggtgtcactggggtgggctgcacagaagaggtgtttgtgaggtaggctgtgagggctagataagacttcaatgaacagacaggaggaagactgtggcgacttgttgagctaagggtaggggtaggcatgaacatggcgtaaggacagtgaacagacccacctccctggctggaggtctgagtaggaaaggcacactctttgagtagattcaacacaaagaaatggaggcagcctggctcagggatgccctagacctctaggcattgtcaagttgcctaagtcctgttccatcaaggctgtttactgatgtgcttccagggcactccccactcccagccctttcctgcagcccagggctggttcctagcctctcagcagacttaagatgggcaccttccacaaaggggcagatgagttgaggaaaacttaactgatacagttgtgccagaagccaaaataagaggcgtgccctttctatagccccattaaaagaacaaaaaagtggaagcatcttcagtgaatatgggtcagcacctcccagacctcagggagtccacttctgttcatcccagcacccagcattgcatatccagattatttgagcccaatctcttatcctctgaagaacacaatcggctttggggccacaaaaggtttaggtagtggtttagggatttctaatcccaaactttgtccttgggaggtttaggattagtattgatcattcacagagcccaagtgtttttagaggaggggttttgtggggtgggaggatcacctataagaggactcagaggggggtgtggggcatccatgagaaaaatgtcggaggaagagttttatctgttcaaaaatatctcttcagtggggccgtgggatgggcctcagtaccacattgcccctgtctgggccttctacctccaggcagctttcatgggcactgtcttccttatagggttcccactcaatgccatggtgctggtggccacactgcgctacaaaaagt

SEQ ID NO: 39229 - DNA, 2300 bp, Homo sapien
aaacattcttgatctctgctcatcatctctctgctgagataatgagagaggcagaggaagaaaaaaggagcaaggagttgggggagggagagagacttatgggcaacatcatcattaataggcaacatttaacaccacaaatatgaaatcatgttaaatgataagacagggcattaactgggtagctgggagattgacctttaactcatttatcctgtgtcagaaactctgtcagatgctggaaatacaaagataactaagatccccctaaccttcaggaaactgggcagagcccggacaacccggagggcctggtgctgttacagacaaataggggcgagcaccacaaaagcgcctagtggggcagggatggggtgccagtcagagaaggccacctggaggtgacccccagctgaaaaggagggggaagtccaggcaaagaagggcttccttcccgtggaacagggatggcttgtggacgtgggagcctgtgggatgtcagagacatttgagccagagcaactccatcttgaatagaagctgggtaaaatgaggctgagacctactgggctgcattcccagacgtttaaggaattctaagtcacaggatgagataggaggttggcacaagacacaggtcataaagaccttgctgataaaacaccttgcagtaaagaagccggccaaaacccactaaaaccaagatggcagtgagagtgacctctagtaatcctcacactgttacactcccaccagtgccatgacagtttacaaatgccatggcaacatcagaaagttaccctacattgtctgaaagggggtgtcaggaataaaccaccccttgtttagcatatcatcaagaaataaccaaaaaaagcagcccttggggctgctctgtctatggagtagccattctttattcctttactttcctaataaacttgcttttagtttatcctatggacctccctgaattctttcttgcgtgagattcaagaaccctctgttgcggtctggatccggatccctttcctgcagcggggggaacgcagacaatactagccctcgacctgtgagtggatgtgccagagaggggatccgcgtgtgtccctggcttaggaatcttccagccatttcctggatgtgctggggagcccctgttcccaactgtgcccacttctatccttgccgagacctgccgagatgtgagaactgcctcttcaagagccggcacccagtagtcatagcctgaataaacgaatggttgaagacgtgaaataagccccctgggcttccaaatctcccttccacgagagtgaacatcagtcgtgcccactctgagcgggctactgtgggggcgtggctcgcagcccaccgggtgtgggaccggaagggaagacagggcggaggagagggggtcttccggccctgaggcttgatggggccaccggagggctcctcctaagagggtccttggccctggctcggtggggggtcgcggaaagcggagaggtcagggccctgccgttcgcccatccgggcctcgacttccctcctccggcccccaggctgccgaggggccaccgggcaggggtgggcagggcctggggccggagtcagcgcggactgctaggtgggggcgccggccgggcgggggagggagggaaggaggggcgcgcgtgtctgcgcttttggaggaaacagtcccacctcgtcctttgccgtccccattgctgagcatgaccgggccctgacacctggtgcagaagggtccctgggcacagcagaccccggggggacccgccgccagaaccaggggatctcgctcctccctcttggggcagccataagcctaggagctcctgacgctgtccgggccccgcggctccccgcgctctctaggggagagccttggggcgtatccggggtcgcgctcaccctcccgcgccgccccctgcacgggctcggagctcccgagtgctgggagggcttccgggcggcggcgagcggcggggggcggtgtcaggaggcccggccaggccccgccccctcgtccgccctccctccctccctgcgcacccggctcgggtccccgggctcgcggctgcggcttctgctcagggaggcggaaggcggcggcgggagcggtcatggaggcgggcgccggagccggcgcgggagccgcgggctggagctgcccgggcccaggtcagagccgcccctccgtcacctgtctaccgcccctcctttctctcctccatccctcctccttccagacccccaggtgctcccggcctccg

SEQ ID NO: 39230 - DNA, 2300 bp, Homo sapien
tcacaggatgagataggaggttggcacaagacacaggtcataaagaccttgctgataaaacaccttgcagtaaagaagccggccaaaacccactaaaaccaagatggcagtgagagtgacctctagtaatcctcacactgttacactcccaccagtgccatgacagtttacaaatgccatggcaacatcagaaagttaccctacattgtctgaaagggggtgtcaggaataaaccaccccttgtttagcatatcatcaagaaataaccaaaaaaagcagcccttggggctgctctgtctatggagtagccattctttattcctttactttcctaataaacttgcttttagtttatcctatggacctccctgaattctttcttgcgtgagattcaagaaccctctgttgcggtctggatccggatccctttcctgcagcggggggaacgcagacaatactagccctcgacctgtgagtggatgtgccagagaggggatccgcgtgtgtccctggcttaggaatcttccagccatttcctggatgtgctggggagcccctgttcccaactgtgcccacttctatccttgccgagacctgccgagatgtgagaactgcctcttcaagagccggcacccagtagtcatagcctgaataaacgaatggttgaagacgtgaaataagccccctgggcttccaaatctcccttccacgagagtgaacatcagtcgtgcccactctgagcgggctactgtgggggcgtggctcgcagcccaccgggtgtgggaccggaagggaagacagggcggaggagagggggtcttccggccctgaggcttgatggggccaccggagggctcctcctaagagggtccttggccctggctcggtggggggtcgcggaaagcggagaggtcagggccctgccgttcgcccatccgggcctcgacttccctcctccggcccccaggctgccgaggggccaccgggcaggggtgggcagggcctggggccggagtcagcgcggactgctaggtgggggcgccggccgggcgggggagggagggaaggaggggcgcgcgtgtctgcgcttttggaggaaacagtcccacctcgtcctttgccgtccccattgctgagcatgaccgggccctgacacctggtgcagaagggtccctgggcacagcagaccccggggggacccgccgccagaaccaggggatctcgctcctccctcttggggcagccataagcctaggagctcctgacgctgtccgggccccgcggctccccgcgctctctaggggagagccttggggcgtatccggggtcgcgctcaccctcccgcgccgccccctgcacgggctcggagctcccgagtgctgggagggcttccgggcggcggcgagcggcggggggcggtgtcaggaggcccggccaggccccgccccctcgtccgccctccctccctccctgcgcacccggctcgggtccccgggctcgcggctgcggcttctgctcagggaggcggaaggcggcggcgggagcggtcatggaggcgggcgccggagccggcgcgggagccgcgggctggagctgcccgggcccaggtcagagccgcccctccgtcacctgtctaccgcccctcctttctctcctccatccctcctccttccagacccccaggtgctcccggcctccgcggctcccctttctccgcccaaagtcttcctccctccatcctggcctccaccggggcccggtctccatccttccggcctgggactgaggcttccgcgcaccggccgcatcctgcctggtggtccctccccagcgcgtctctccacttcagtccgacggtgcttccagccttcgggactgcagaccctacacctcctgcagccccggagactcctgagcgcggggcgagggtggggtgggcaaggtccagcgagagaatgggaggagaggggaggggagcggtcgcagccctaccccttcccgcacgccccccactcctccctccctccatctgtaggccacctcagcctttcagcctcttcttcactggctcccgccctctttcagtcttggccctctcctccctgtccccccggactaaatacgcacaccccctctttctttctgtgcaagcaagagggtcctggaacagcgggttctgaggaggctgggaggcagggctgagaggtggccgagagagaggagtcgcagagccgccagagtgagtcaggcacctccactgggattacagatcccagagcctcgaggagctggaagacatg

SEQ ID NO: 39231 - DNA, 2300 bp, Homo sapien
agcactttgggaagccaagatggatcgcctgagcccaggagtttgagaccagcctgggcaacagaaagagacccccatctctacattaaaaaaaaaaaaaaaaaaaaaaaaagcagggcatggtagcccatgcctgtagtctcagatattagggatgctgaggagggaggattgcttgagcccaggaagtcaaggctgcagtgagccatgatcatgccactccactccagcctgggcaacagaacaagactgtctcaaaaacagaaaggaaaaccccccaaaccccaaatgtttagttctgtacacataagagatacttagcaaaagtttgttgaatagatgaactgctgccttacttatgcatgaatacatcaaatatctattgagcttcgttttcaggcacaatactagatcctggagctgtaatggtgagcaaaccagatatgctctctgcctcgataaagcttataaccaagtgaaggggagacttaagtacacacacacatatagcaaagtacaaggttttatgagaccatttaatagaggacttctcttatttttttttgaggaagtggaggtacaggctagaaaagttgacatctgagtggtgagtagaatgagcagaagttgggggaaggggatgggagaatgtgccttgcaaaggatttatgggaaaatcctgaccctcccaacccaatcctcattaattctctaatcctggccctcaaatcctaaattcactgttggtgtcagtgccttttactctctccactttttcgttctgatcccagatgggtacatgtgtctagaaactctgagatgctccatagatacagagaactcttaactcattattttgtaaattaaaaaatagaaaatataggcttgttctgaaaatccaaacagcacagatagatatgatatgtaaagtaaaaaccttaccacatgttatcccatacctcagaaacaactactcattatggtttgggcatagatctttccaggcctttttctatatgtttgtccatttgtgtgttatatactatacataaaatattttttgcaaaaattagatcatagcatatattttacagctctttttcttcagttaatatggaaacttctttgttttcaccatagatctgatactttcttttaaatggctgcatgatattctatttaactatcatcagtttatttatttattattgttattatttttcgagaccgagtctcactctgttgcccaggctggagtgcagtggtgcgatcttggctcacagcaacctctgcctcccgggctcaaatgattctcctgtctcagcctcccaagtagctgggattacaggggcgtgccaccacacctggctttcttttttttttttttttagcgaagactgggtttcaccatgttggccaggctggtcttgaactcctgacctcaagtgatccacctgccttggcctcccaaagtgctgggattataggcgtgagccactgctcccagcctatcatcaatttaaacaatcccttatcgactgacacttagattattatcccgtgtttggttattatgcagtgaacttatatttgaatttgagttgtgaactctaaatgcacattgttttaggtccagtacttaccacaggtaggtcatgggaactctgaggctctgtaatttctgagctctcaggatgaataggtgaaaatagtctgtatacattttttgagtcaggggatttttagaaagattcagggcatcaagaaaatactataaatgaagttaggtctttaactgtcaggtgattccttagaagcatgaaatactttttgtttacagtagactaagtgattgttttggtgccaggcctcaaaatctacttttctattggaccttactacatagagtcactctcttttcccttcttaggtactccttttattccgtccggcatgatgctacacttctctgatggggtagagacaaggttttcaggactttgcagacaagaaataagtctccctttaattttgtgcctctagaacatggtaggttagttcacctgccctcttgatcatctcaacctttggactttgcaggtgagctgcgttctctacgggaggagatttccctgttagagcatgagaaagaaagcgaacttaaggaaatagaacaggaattgcatttggcccaggctgagatccagagtctgcggcaagcagcagaggattccgcaactgaacatgagagtgacatagcatccctgcaggaggatctctgccggatgcagaatgaactt

SEQ ID NO: 39232 - DNA, 2300 bp, Homo sapien
cagttgaatggaaattttacatacagtaaacttttgaaagtttttacatacagtaaaaatttgaaagttaattaaactttcaaaaattgctaaaagttcaagagtctgcttcggttgaggctttgaagatgagcacacagggtaaatcttcagggcagatgagaagaaggacagctattgggaagaggagaaagactcactgcactgtggaatttcctgggccctgtcttctaagcctctaccttttttctgtctttagaaaaagagaagctctttaaccttctgctctcaggtttcaagacaggaaaactgggggctggtcatcagtgctttcctttcctcccggtctcatctctctctgcctgtcctctgcagaagaactgcaggagctgcgggaacgctaccatttcctgaatgaggaataccgggccctgcaggagagcaacagcagcctcacggggcagcttgcagatctggagagtgagaggtacagctgtctctggagagtgagaggtcatggggttccacaggactctgccttaccttgggctttccctgaaggcagatgccagggcagtgagcgttcctttgctcctggagacccagtcctttccatggtttccaaaggatacagataccacctacaagcagacatggggatccgacccaattatctcaagactagagggagtgagttctgaagtttacttctgctctaggcactgggttctggtttgctctgccctaaagtggatcagaagagattcttttattgtctgcatagacttgtttcagtctaatggcaggcacaatgcttccagattggagtgggcttgactaggcctagcctcaaaactaactggactggcactctaagggtctcccagagccaaacacacctttgcagattgaggggctggagactttctgtagtcttttaagcatgtttatctgagcggtgagtcacaatagaaggccccttactatctttggcctaaaatgaaggtatcaggacaaagcctgcatggctggtgatgccaggcagaactcccttcaagcatagctctgcggttctgaattgcaggacacagagagcaacagagagatggctgcagtcccaaacactgagtatgacgtcagcagagtctcagacttcagaaatggatttcttagagcctgatcctgaaatgcagttgttacggcagcagctacgggatgctgaagagcagatgcatggcatgaagaacaaggtagggcacagagggtggggaaggcaggcacatttcttgtctttctttcaccttctcccagcctgtggtagaaacatctccataggcatccactgtggagggagatagtactctggggtctcacttgcctgatgtaaatcttccagtcaaagagcgccatgctttccccaagcttgttcttggagcatatgtggtatctgtagtaaacaagcctccctgttccatttcccacatagtgtcaggaattgtgttgtgagttggaagagctacagcatcatcgccaggtcagtgaggaggagcagaggcggctgcagagggagctcaagtgtgctcagaatgaggtgcttcggtttcagacctcccacagtgtcacccaggtaaacactgcccggggaggcatctggggtgggggcagaagggcctcatggaggggctgcttcaaccggggtgggcacagtgagtatggctgtgctctgctgactcttgccctgcaactgggcacagtctgctggaaaccaactgtagaagtcatatagcactgcattctagaaatggtggtcattactgagtgtccatctcacagaagaaaccaaaccctagacctgtgggagctcctcaagatgtctgcatctgaaaaggaacccaactgatccgtagaaagacctgctgtttcttgagagtaactgttctactcacatcctccctaccacagaatgaggagctgaagtccagactctgtaccctgcagaaaaaatatgatactagccaggatgagcagaacgagctcttgaagatgcagctgcaacttcagactgagctccggcagctcaaagtcatgaaatccacacttgtagaaaaccagagtgagaaggtaacagcaaccagaggtgaggggacaacttaggtgctaagggcatccttctgaggttttggggaaggtggataagagtagtgagttaaaaataattccagcaaccacataggcagcaccacaggtaaagaactccagccctgctcgagtactacattagatatgaggacattaggaag

SEQ ID NO: 39233 - DNA, 2300 bp, Homo sapien
gagatagggagaaggggttgccaataggagagtggaattcctgagcacctcgtcacaggcagccgacagaacatgagccgcagggcccaggctatttatacctcgcctgtcactatcagggtccccacagctccccccacctccagccacacacagcaggtccttttgctctttctggtcccttctctactcctccccctccctacctaaggaccaggcaatttcattcatagacccctgtcatcataagcattgcccccacagaaccctgacactttttcctcagctccgtaacagggggtgccctcattggcccttgggggaaagagcccccaaagatgctcactatcccttcttttacaccaggtctaggggtagaagaggaattagatataatgattcatctaaaagggcccagaaccttccctggcttaaagaaacttctcaggctcagatatggcctcctagccagctcagctagacttactaggtctagaaggatgggaaagctgaagacacatggcttgaaaaagggggaactgggagatatggctgcacgtatgttacaaagttgcagaatggatcctctccttatagaaatacattctctaggcccagcacggtggctcacgcctgtaatcccagcactttgggaggctgaggcgtgcagatcacctgaggtcgggagttcgagaccagcctgaccaacatggagaaaccccgtttctactaaaaatacaaaattagctgggcgtggtggtgcatgcctgtaatcccagctatttgggaggctaaggcaggagaattgcttgaacctgggagacagaggttgcggtgagcagagatcatgccattgcactccagcctgggtaacaagagcaaaactccatctcaaaaaaaaaaaaaaaaaaaaaagaaaaaagaaaaagaaatacgttctctagctctttctcctcaccccaggccagagtctgtttgggtgcctcggtttccctgctgttctattccccaggcctgcagcctttggcttgccctgagtgcagctttgcctgggcatcccagctggctcccttaggctctccctgaccactctgcccctggtcctgcctacccacctggtcacatttccccctggctgctctggctggggctctccctgtttctgcctggctgacccaccctttccctggcaggatctgccctgtggcccaaatgggcatgttgcccagggggctccctggcactatgggggaagagtctctccttcccctcttatcatctcagttgagtcagacttgggggagggggatacacagtgtgagtcactgggtacccttttcctgagctcagcttcataccgaggcgatgaggccaaacgggctggtgacagggacactgagtcaggggcaggggccccggtcttactcctgggcctctggatttgggccctacatgaggcttttctatctgtaaagtcaagcaatggctgggaggcacacacaaccccccgcccccccgcaggcttctccttcattggcccgggcaaggtccctgcttcctctcaggccgtctctgcacaagcacacacacttcccttccctgtccacaggtggacaatgccctgggctaggagccagccctcgcaggccctgtcaacagcctgccaccaactagtctagaaaattctgtgaacaccagatcagtgggttttgccctaatcactggcctcagtttccccatttacctcttcagcccgtgcggggtgtggagggagcatatttcattcctgacagtttggtgtgttgggtgtggatggagaactgtcggccctccccgccaccttccagcgcggcggcaccgggggcccagggggtgggcgccctcaaccccgtcccgccgcccgggcggcgcgggggaggggcggcgggggcggggcgtcctgtgcggcgcggcccccacccgcgggccgggcggcattcctgggaggccggcgctctgacgtggacccgggggccgcgggcgcggcgggggggcggcggtccgggggcttcttaaaccccccgccccggcccagcccgcccttcccgagcaccgctccggccctggagggagagagagccagagagcggccgagcgcctaggaggcccgccgagcctcgccgagccccgccagccccggcgcgagagaagttggagaggagagcagcgcagcgcagcgagtcccgtggtcgcgccccaacagcgcccgacagcccccgatagcccaaaccgcggccctagccccggccgcacccccagcc

SEQ ID NO: 39234 - DNA, 2300 bp, Homo sapien
gatgctgaagtccactaccttgcctgtccccagccgagttcagcatctggacccgggaggctggcgctgggggcctgtccattgctgtggagggtcctagcaaagcggagattgcatttgaggatcgcaaagatggctcctgcggcgtctcctatgtcgtccaggaaccaggtgggcgtccacactggcagtggggctgggcctgcctgaccttccagactgggtttctgcccactggccaggcaggagatgcttggggccacagaactcccctccccggagccccctgctcttcctctgccccgtctccctctaccccacaccctcagaaacatgtgtctgcctccagatctgagcgctgaccacagagcctttcctgggataaggccagggtggggaggctcccgccctgccaacctccatcccggaacctgtgctgactggtctctctccccaggtgactatgaggtctccatcaagttcaatgatgagcacatcccagacagcccctttgtggtgcctgtggcctccctctcggatgacgctcgccgtctcactgtcaccagcctccaggtttgtgcccagggtgggggtggagggtttctgctatctgagagatgggcaggagttgaggacagcaggtccatggggccagggatttagcagtgaccttggaagggccagttaggagtcccttctcataaggcacgaggcagggcccttggggacggtgggctcccaccctgggggcttgcccgtgcactcaggcatgccacgcctcgttctgcctttctcagggtgtgtctgcctgtcctactgccacctgccatttcttgttacagtttgttccaccttctgttgtaagaatgctagatgacaacatttataagaatgagagcataaaatctatacaaactaagagtaaaccagtttgcacagagggtgtgagaggctcctctaaagggaatgcctatgggctgcagagcctgggctgcatcctcttcaggccgctgggggcctggcttgctttctcttgctgctgacttctagagatgtggtgtgttcctttcattctgtcacagcggacatgtgcaaggaaggctttcagcaagtcacactgaaacatgcaaaccagggggccaggtgtccaggggacacattgtaaaggagcttctgcataaggcgcacagaatgggcttcaccccacctccttctcccacgcgcctcctggctgcccctcagggtggtcacattggcccatccagagtccttgtgcatctcctcctcccactcctgaactgggctccccgatgcaggctccaatccctcccccagagcccttctgtgcttcttctggtcctccctgttggtccaccttctccaggaagctctcccaggccaggccagtgaaactcagcttcctacctcagagctctctggcacccccagcccacacagcccatcaggcacttgccctccgccctcagcctgcttcacacagagtggggcccttccttcctcagccaggacagggcacatcgtctgtcatctcccacacaccaagcacagctaggatagcaggtgcacacatagggttgcataccggaccctggctcctcctgctcccaggctgggctggcaggcaggggccaggctgggcatggggtggcagcagcctttgggctgggcttacagtgagcaccgtgtggggcttcagagaagactgctccagccccggcctcccaggagtctgagcatcctccgtggcctttgcaggagacggggctcaaggtgaaccagccagcgtcctttgccgtgcagctgaacggtgcccggggcgtgattgatgcccgggtgcacacaccctcgggggctgtggaggagtgctacgtctctgagctggacagtggtgagctggccctgcccctgccaactcccttccgggctggggccttctggggaggggaaggatggaggctaagccaccaaccctttatccacagacaagcacaccatccgcttcatcccccacgagaatggcgtccactccatcgatgtcaagttcaacggtgcccacatccctggaagtcccttcaagatccgcgttggggagcagagccaggctggggacccaggcttggtgtcagcctacggtcctgggctcgagggaggcactaccggtgagtgcctggagctggggaacagggtgacttctgggggtgcttggccactagtctggtgctgctttgctccagaggtaggggccctgcttcctaagccaggagtccccacagaggctg

SEQ ID NO: 39235 - DNA, 2300 bp, Homo sapien
tgggaatttcagtgatgagtctgaaaccgtacctttaagtagtggggcacagattgaaacccaggtgtgcccgaatcccaagcttatcacacatacaatcgctagaccagaccacgggcacgtctcaagcactccaaactcacaaaccccatgccagacaccgggagtgctgatttgttaaaagggaggaggaaagagtggctccttccccttcagcctgctcatcttacagaggtcactttcttggcaatgttactcccatccatgtgctgcacaggccagaaacctggaaatcacccaggtctctctctctacctcactccccaaacacatccactctgaaaccagttttgtcctaaatatctaaatatctctcggctctacctacttctctgcgtttcccattatcaccacctgagtcctggccaccattatctctcacagtggcctcccaatttggtttctcctccctcagtttcgcctctgcacacagcacagtcaacagtgagtgacagctctaaaacgtaagtttggcgatagcactctcttacttgaaatccctcagcagcttcaggataactgtcctcaggataacttccagatctttttttttttttttttttttttttagacagagtctcactctgtcacctaggctggagtgcagtggcgccatctcagctcactgcaacctcccttgcccgggttcaagcaattgtcctgcctcagcctcccgagtagctgggactacaggcacacaccacctcactgggctaattttttttgtatttttagtggagatgggatttcaccatgttggccagactggtctcaaactcctgacttcaggtgatctacccgcctcagcctcccaaagtgctgggattacaggcgtgagccaccgcgcccagcctgcagatcctttttttttttttttagacagggtctcgctctgctgctcaggtttaagtgcagtgccgtgatcatagctcactgtaaccttgaactcctgagtaagccctgctgcctcagcttctcgagtacctggaactataagtgtgcaccaccacgcctggctaattttttttttttttttttttttttttttttgagacagagtctcgctctgtcacccaggctggagtgcaatggcacaatctcggctcactgcaacctccgcttcccgggttgaagcaattctcctgcctcagcctctcgagtagctgggactacaggcgcccacaaccacgcccggctaattttttgtgtttttagtagagacgggttttcgccatgttggccaggctggtctcaaactcctgacctcaggtgatccacctgcctcagcctcccaaagtgctgggattacaggtgtggcgtgagccaccatgcctggccttaccaattatttaactttccttgaaggccctacgctctctagtcagtacgcctttgcacatgctgttcctctgcctagaacaccgtcttgtcctcacttctatccccttcatcctgcaggtccttcaggtctcagcttagatctgaagcaagcttcttggggaagggttctttggacgccccctctctccatgggttagttaccatggatgtgtgcttccatatacttttcacattctaaccattaacacacagctttgtagtcgcctgttcccttgactttccacctcactaggcagtatcatcattaacttttgcattcctttaactgaacaaacgtgtgttacttgttaactatgtgtcatagttacacacatacatacacgataaagacccagaccctgcccttgagatgagtaactgcgtctcttctctggggtctcggcgtctaacagcgtcaggtccaaagcgcttgttgaacgaatgaaccaaggaacgagtgaatgaacgaatgaatgcccgcgaaggacgtggtgccgcgcggtcttctgggaatcgtagtcccctggttcgggcctgtctttacggcgcaggcgtattcacatggaggccgtgttgctgttaatgcgcatgtcccggaatgcggctgggaggactgcgcatgctcgaagggtgggggttgaggccgacggggcgccgtacggcggaggcggggtttcagtggcttctggtgctctagggtgagctctgcccggctgcagggatggcggggaggggtaagctcatcgcagtgatcggagacgaggacacggtgactggtttcctgctgggcggcataggggagcttaacaagaaccgccatcccaatttcctggtggtggagaaggatacaaccatcaatg

SEQ ID NO: 39236 - DNA, 2300 bp, Homo sapien
cacagagcccctcttcttccttctctgtgggctgtggctgccactcctctcccgcagcagctccagggctctccattcgccctgacatttgcccacttgtcctgactgtcacatcctgcctatgccttactcctccaccagctccctgagatctgccattctctacctcttgtgttcacatgggcaggacctgacatggctctgcatccaccaggcttgtcctgagctcagctgtcccctctcagagcgccacactccccctgggagctgctgccccgtatgccggggtaagtgcccagccttggcctccaccctcagagaggagcccagggggaacacaggaaggggaggcattcatgggccaagcgggcagcccagggtttgtactcggtttctagaacagaatgcagggttcattcttttctagaaatggaggggggctgttcttgaggtggagaagagacccatgaggcagggggaagctgggatgaagcctagattctcaaggtctggcctgatgcctgtcagggggctcaggatccccaggcccatgaagagggcattgcactgctgagcgggcagctggcccagagtggggttccagcctctggccctttgggctcctaggaccctagagacatcctgagctctgatgtgaggcctgatgtctaataggccctgtggatattggctgaagaaatcaacaccatcagggtggtagggacacggagtgggtgctttcctgccgtgaaatgctgggtaagctccaaggagggaggatacagcaggagggacagtgcctgcccatcccatgtctcccccctcagaatgtgtggtggaggccgagggccggagagtggcagatggagagagctggcgggaccccagcaatgcgtgcatcgcctgcacctgccatgtgagctggggtgggcctgggagggtggaggatctcgcagatggataaagggaggagtgtccaacactccaccagcagatatggggtctttaagggtcaggggcatccctgcaccggggcatggagccgaaggctggatttcattcccctcttgaactgtgaagaatgtattgtgggaggggcaggcagaagtccatgcccagaggcccccagaagcatgaggctggggactccggccctgcagaaaaccccagaacaatgatgtctgtcctcagcggggccatgtggagtgccacctcgaggagtgccaggccctctcctgcccccatggctgggcgaaggtgccccaggctgacagctgctgtgagcgatgccaaggtgcgcagccagggtgatgggggaggggtaagccagaccttctgggcatgtgggaggagcagctgaccctcccagctcctatcccttcagctcccacccagtcctgcgtgcaccagggccgtgaggtggcctctggagagcgctggactgtggacacctgcaccagctgctcctgcatggcgggcaccgtgcgttgccagagccagcgctgctcaccgctctcgtgtggccccgtgagtgccgcaatctaaaatggtggggagggtcagggtgggggcacatggtaccgccatcctggtgtgaccaggcatcagagagggaggctgggctcctgccgccagctgggagctggggacagtgctgttcccagtgcgaccacgatgtggtgccctgacctcactcacagggagcctgggagccagagtcctggagatccctggagactcctgggagatgcttggttttctgggagggtctgcgagaggcatggcggggagggcggtgtgtctgacagtgtctggggctgagtgcaggacaaggcccctgccctgagtcctggcagctgctgcccccgctgcctgcctcggcccgcttcctgcatggccttcggagacccccattaccgcaccttcgacggccgcctgctgcacttccagggcagttgcagctatgtgctggccaaggactgccacagcggggacttcaggtgtgcatcccctgtctctcttctccccaacccctacacccagccctgctgaccattggcacctgggactttcctgcccacagtgtgcacgtgaccaatgatgaccggggccggagcggtgtggcctggacccaggaggtggcggtgctgctgggagacatggccgtgcggctgctgcaggacggggcagtcacggtgagcaaagccgaggagtggaggaaggtggatcctgtgctgtccacccatgtgcctcgacatcacccctcctcccacctcctttatcctccaggtggatgggca

SEQ ID NO: 39237 - DNA, 2300 bp, Homo sapien
gcacaatctcggctcactgcaacctctggattcgagggattcacctgcctcagcctcccgagtagctgggattataggcatgcgccatcaagcctggctaatttttgtatttttagtagagatggggttttaacatgttggccaggctggtctcgaactcctgacctcaggtgatccacccgcctcagcctccgaaagagctggattacaggtgtgagccacctcgccgacttttctgttttttgtttgtttgtttgtttgtttgttttttatggtggtaagacactaaaatgtacaatcctaaccatttttaagtgtacagtttgtggtattaaatacgttcataatgctgtgcagtcatccctggcatccatcagggagggctgctctgatcaacacttgctagggggtgcttcaggggaagggaagaagactaacattgattaagcacctgttccatgccacagactgtacttggtgctcttaataaagtctctcgcttcattttcatagttacccagtgagggaagtattattaatctctttttacagattaagaaactgaggctcagagaggtggattaatccaacctaataagcacaggcactgagtgctggcatcaggattcgaacccgggatgcctggctgtgtgcttccctgcgcagttgtagccacactgtattacagatagcgggagggagagcaggccgcagactggccatttttagtgacctcaggctaaggaagccatggttggtctgtttccagtcaccttgcacccccacccggccccaaataatagcctagcaaagtttcttttaaaacgtgtaaacttgactgaattgaagagaaagaggacttatcctccctggagtcaaggtgctgggatatgggtatgctcaggagttcgagttagaaacctggggacacagtgcatggggacagctgggatttccagccctgtgcccctctttctgtcccgcactctggattcttgtcttcacagaggccttgagtaactgttcagagggcctgctgggatctgagctagccccaccagacccctgctacacgtgccagtgccaggtgagccctcctgccttggggactcacagagcccctcttcttccttctctgtgggctgtggctgccactcctctcccgcagcagctccagggctctccattcgccctgacatttgcccacttgtcctgactgtcacatcctgcctatgccttactcctccaccagctccctgagatctgccattctctacctcttgtgttcacatgggcaggacctgacatggctctgcatccaccaggcttgtcctgagctcagctgtcccctctcagagcgccacactccccctgggagctgctgccccgtatgccggggtaagtgcccagccttggcctccaccctcagagaggagcccagggggaacacaggaaggggaggcattcatgggccaagcgggcagcccagggtttgtactcggtttctagaacagaatgcagggttcattcttttctagaaatggaggggggctgttcttgaggtggagaagagacccatgaggcagggggaagctgggatgaagcctagattctcaaggtctggcctgatgcctgtcagggggctcaggatccccaggcccatgaagagggcattgcactgctgagcgggcagctggcccagagtggggttccagcctctggccctttgggctcctaggaccctagagacatcctgagctctgatgtgaggcctgatgtctaataggccctgtggatattggctgaagaaatcaacaccatcagggtggtagggacacggagtgggtgctttcctgccgtgaaatgctgggtaagctccaaggagggaggatacagcaggagggacagtgcctgcccatcccatgtctcccccctcagaatgtgtggtggaggccgagggccggagagtggcagatggagagagctggcgggaccccagcaatgcgtgcatcgcctgcacctgccatgtgagctggggtgggcctgggagggtggaggatctcgcagatggataaagggaggagtgtccaacactccaccagcagatatggggtctttaagggtcaggggcatccctgcaccggggcatggagccgaaggctggatttcattcccctcttgaactgtgaagaatgtattgtgggaggggcaggcagaagtccatgcccagaggcccccagaagcatgaggctggggactccggccctgcagaaaaccccagaacaatgatgtctgtcctc

SEQ ID NO: 39238 - DNA, 2300 bp, Homo sapien
ggatagcagtggtgctggggacatgaagagagctgggaggaagaggaggtcatggctatgcaggggggtgttactggctcataaggtgatagtgttgccagatttagcaaatgaaagtctagaatgctttgttaaatcttaatttcaataaacggcatgtaagtttttagtataggtatatcctatgcaatatttaggacattcttatactaaaattgacgtcttattcttctgaagttcaaattttactgggcatcctatatttcatctggaagcccctccgagagaggagtctcagttggtagtaagaaaggtgggacaaggactcagaccagttgggtctggaaatgcagcctggagtgctggctggagatgaggactaaaatcttgggggttgatggatctcaaagaaaagacacacaaagaaaagacccctgacccccgctcccccaacacacacacacacactcttcagggcacgtggtgcctcagggccactgctagcctatatgatgtctttggtgaaattttaaaaggcaccctttcctcaagacactacttccatctgttgtaaaataatggaaccatgctgatgatgtgcctatcggacactttactgccatctgctggaaaggggtagtaaatatcaaagtctctgatgtctgtcacgtgaatggtgcccctttaatgtggcacccagtcctttgggtctcttacttgggggtctgggcctggttttccaggctgccccagggccacggggttggggaaacatggcatccagggccctgtgtcatctgcacctgccaggtaaaggaatcagccaccacccacatccctgctgctgggcagactgccggcctgaccatgccaagcccaaatgtgggggctaggcagggctgctactgccactgcccaggcatcagggctgaagcctgctaggcctgcagagtaagccagctctggcaaaggagagggatggaacaggaagggacgaggagggagagcaggagagagagaaagagggaggatggtgggggaagggagggctggctcagtgtctgccctgcagacaggagccgtgcagtgccaggggccctcgtgttcagagctcaactgcttggagagctgcaccccacctggggagtgctgccccatctgccggcccggtgacctcctgccctgtcctgccctgccccgccatcccttcaaccccaagggtccagtacctacttggggtcatgccttacctcaagtgatgtccacccaccctgctgcctggtgacccacttgtcatcctgccaaccttcccaggctgtgattatgaggggcagctttatgaggagggggtcaccttcctgtccagctccaacccttgtctacagtgcacctgcctggtgagtccacctgtcccctctgcccaggccctgcacctccctggacacctgccctgccctgggccctgcctgccactcctccagccccctcacatgcctcccgagaggtggagccagctaggttctccctccatccctgccctgtgcccccctcctccgagggtgcccaacacccgcccacccagccctctgcgggagccagacctgaagcctcacagccactggtgcattacagaggagccgagttcgctgcatggccctgaagtgcccgcctagcccctgcccagagccagtgctgaggcctgggcactgctgcccaacctgccaaggtgagagcccctggcccctccctggtagagccacaggtaggttgtcgtgccatttcttgaattccagagcccaccttgccggcctccagtgggtttggtccgtggcggagctggaatgcctgagctcaaattctgccattgccacctagtgcttgtgtgactctcttcctcaatttccccatgtgtaaggtgcagataatgatattccatgcctcatagtgcagcttaataaatgtttgctttctactttgtgctccccaatcatgagacatggggtcagccctcagggatgacccctagagtgtgacactgagtcatacactaatgcaaaatcttgtaacagccaagggcaggaatagaagcaggcaccagctagtgtgcgaattcagaggaaggagaccgaatccagcctgggcacaggagggaaagcgtcctggaggcagctggtccccaggtggcccttaaggataaagaaaagttagcttggtgaagggctgaggaaggcagtgagccttctaggaagaggggagaaatcaagcacaggcgtggccctgacacggagggtgagtgtgca

SEQ ID NO: 39239 - DNA, 2300 bp, Homo sapien
acggccccaagaccccctgtgaggaggtgtacgtgaagcacatggggaaccgggtgtacaatgtcacctacactgtcaaggagaaagggactacatccttatcgtcaagtggggtgacgaaagtgtccctggaagccccttcaaagtcaaggtcccttgagtcccaaaagtgcctccccagcctcagcccccacctccagccaaacacacattacatacacacacacacacacacaaatgtgccacacccagacacacacacacagaatcagacactacaaacacctgccttgggggtgaagtgaaggcccagcctccccaccccaccgcaccccaggggttggaggaccttttctgtgtcaggacagtgtccctccctgggaatgtgatatgagggccgactggggccaggctcagtggcagaggctaagacacaagggactggaaggggactgtggggcgagggaagccctgtgcatcctcccagtgtggtttagagctgctcaccctgattctctctgattctttctgtaaaatggggatggaggtgcccccattcttcataagggaagtaaaaattgctcatacctctgtgccaagcaccatgcattactaatccttacaaacactccatgaggtgggtgctgttagagctccagtcacagttcagaaaaatcagccaccaaaagtgaagtgaccagccagaggccccagagcagaaagcaagagctccaggatgcgccctggcaaccctgccagaatctgtgctctgaaccgtcccactacccagcccctcagaggacttgctttccagaggcacccggtcaatgaaagccaccttccttaaacctgccaggaatagtgctgccgcttccttgttcctcttctggctggctggccctggctttcctctgtgacctcagctccaggcactgaggccaggtcttagcgtggcattgcagcctccctgccccctgtggcaaaggctcaggtccactatgggcccagactctggggcagagaagctgccgtctccttactgaagctttaagcttggtggagagtgggctggggagacctcagtccctgcctggtctagggggaggggtggcttccgacttctggtctttatgacagggagggagagctttggaagggttcacagctccgccctcaatgttcctttttgcctgtgagcttcgcctgtgagacccaaccctctgcttcccagcttcaaggaggagtttcccagcctgtgggcccacagggacggctgtcctcacttcctccctttggccccctctgcctgctgagcccagggcccagccctgccccctacccaggctcaccccacagccaggcctgagctcaggagtgggaaatggggctgagaccagccagtgaagggcggccttggcatttggggccaagcctgggactgctggggtgggtaggggtgttgagtggagttcaggaaagaaacttataggggagagaggaaaacactggtcgtgtccatgatttcagagatcaggagttcttattattattatttgttatttactgagcatttaccatctctctaccgactctaaattctttacttatataatctcacttaatgctcactgcaagtctataaagtagatgtggtgatccccagtttacagatagggaaattgaggcacagagaagttagtggtctaaggccacatggaattggctgagcagggatctaaacccagctcagtctgcttcttctgtaaacttgtgagagagaggaaaaatcgatctggaaaccctagggcgatggagtaacctaaaagggcagggagactctctaggatcccgagaggggtggacttgggtttattttcttttcagggtctcctcctggatcttaagcggagacaaggcctacacccccgttgggcttcctgcgagctggagctgctctctggggtcaggaccggccgggcccggggcgggtggaggtgtgcatgggaaaggcgcgcgcggtggggggtttgagccctccctgaacaaagcctgggtgggagcggcctgtgtgtccccaccccgccttccccagcgcctgctgagccgcgacgacagacggcgagccgagcgaggcggagctagcatggccggggtcggggccgctgcgctgtcccttctcctgcacctcgggggccctggcgctggccgcgggcgcggaaggtgagtccaggtgcgggaggcttggggtccggccaggtgcgccccctccctcctatcagcccggcctgagggggccgaga
